United States Patent Application Publication US 2011/0183924 A1 - sequence listing, part 239

SEQ ID NO: 653708 - DNA, 300 bp, Homo sapiens
ctcccccattgtagcctggaggttctagagactatgctattcaaagcttctaaaagtgagggccttagccagtgactgactgatggggcacaaacttgggtaggagctctatacacagcacccgacatgctgctatgaggacctcctgggactgctgcagcccatcaacacccgcatcactgatccccagtacttcctttacacgccccagtcagtggctacgacccctagccctctctctccttctgtcccttttgattcctgtgctattaaaacttctaaaacctagggggtaccgag

SEQ ID NO: 653709 - DNA, 191 bp, Homo sapiens
ccggactggggcggtttggcctccgggactctcgggctaccttactttactctcttaccggctccgtttcttttttttttttccccggtcgacgaccggggtctggcttcggttcccagtcggtttactctctacatttgtggggctcacgggtgctctctcccattctcacgctctcccaacgggtgcgg

SEQ ID NO: 653710 - DNA, 332 bp, Homo sapiens
cgtgtgactgtctcgccactggtcatgtggatctgtgcaaactaggacagctcctgatcttgggtcgagaggcagcaactttgtcattgatttgagaattcaagataggactccttagaactaagatgtaaatactatagaatcttaacaaacttgcgaatacatatcctagaattcataactacttctagttgtccttgtttagtagccatctgggacgctgaatttccaggtcagtctccaatgcacgtttcgtctagtggtgggaaaagctgagttatttcttgatattatacagattgatatttacctgatatttaaggatattaaat

SEQ ID NO: 653711 - DNA, 323 bp, Homo sapiens
gctctagtggatccccctgctactatgagaggaccgggacgatgacctgagatcgggagcgggatcgagaccgtggatctagacagagtccgagtgctggacaggcatcggcatcgggatcgagatcgaaaccgggaacgggacctggatcgggagcgggactccagaccgagatcgagaggggtcctttccgcaggtcggctgcattccctgaacggtgagcccctaggaaagggaatactctctatgtctttttgagagagtgacaccctgccttctccgttgggccttctctccttttggaaacgtcatttacctctcca

SEQ ID NO: 653712 - DNA, 141 bp, Homo sapiens
ggtgactctagacgatcgctatcacgtgcattgtggacgcctagtgaagtaagactccattaacaactatgctgacagcacacacgtgtgacagctctgagggtagcacctttcaacaccttctggtgtcaccagcacaac

SEQ ID NO: 653713 - DNA, 578 bp, Homo sapiens
  misc_feature (8)..(8): n is a, c, g, or t
  misc_feature (125)..(125): n is a, c, g, or t
  misc_feature (131)..(131): n is a, c, g, or t
  misc_feature (192)..(192): n is a, c, g, or t
  misc_feature (218)..(218): n is a, c, g, or t
  misc_feature (294)..(294): n is a, c, g, or t
  misc_feature (314)..(314): n is a, c, g, or t
  misc_feature (546)..(546): n is a, c, g, or t
taacattnagctcaccagcgccaccgtccccggcgaagttctgcgctggtcggcggagtagcaagtggccatggggagcctcagcggtctgcgcctggcagcaggaagctgttttaggttatgtnaaaganatgtttcctcatctctaaggcttaccagaagctctgatttgaagagaataaatggattttncacaaaaccacaggagagtccacggngctcgcatcgccgcactcacaacagagtgccgttgacacaaactacggattggcagaaaaagatcctgcatatggncaggtcgcttcagaaaaggnagatgcaatatcccagatactgtctcgttgaagatgcttgattgcgtgcataagaactagatgcgagtgaagttcagctatctaatgattggcctgacaggtggtaggatgcatcttcatggttattgagggcaagaaggctgcccatcatgacagcgagcacgttatgatcaagcttgaacttagaaaagaaagctcgtctgaaagaggaagcagctatgaaggcccaacncagagtagcagaggtatccgtgttggctggat

SEQ ID NO: 653714 - DNA, 221 bp, Homo sapiens
ctagaccgtcactcacaacacgctacttacgtcgggacgtacgacgtttgacacctcctatgacgacgacggacttactgactcgcgaccttgtgacgatgcgtatcgctacgttatgactgtttgctacggccagaactacgtacacttgacggactgtaacgtcccgctgggacgacttactgacgacactacacctgtcgcccgtgtgacacgctggt

SEQ ID NO: 653715 - DNA, 870 bp, Homo sapiens
gagaggaagaagcagaacacacctagggtgaactgtcagccagtggagtgtcaagccgtgcctgactccagcccgtgcgtgtcctctccgggggtgtaacggtgtgggttcacaccgcgtctaatgggtctccgcccgcggtgtaccctattcaagagaacaggggtgtgcccgccgaaccaaatcaggggcccccgcttcgtaaagacagggacccgaaacacacgggaaacaaatgagccgcaggattaaaaagttttctagctctgctttcggggaaaaaaaacactacgtcggagagtcataggcaagctcctttagcgccatattccccacagaagccccgggcattctcctggaaaccgattttgggaaagacgccgacgagaatggggatgtcgagaaaaacccaaaaaggggcgtcagttcccgccaagcaggtcacaacaacgaaagctcaggggccaagctttcccgacgaagagcatgaggacatgcagacgtggctcccctgcccaaggaatcaaaactatgggggcgaaaaaccggctcacacgtggcatggttaaaatgcaaggagaatacattgaaacatttttaaagagcagtttaaatccctcttccccgcttttacaaaaggggtcatatacaagtcaataccttgatgtgcgtcgttttttaaaaaaacaaaatttgccaccaagattagtttgtgagcccgcacggccactcacgaaaaacatctgttgcttcttcttctttatacgaagacaggttgctggtggtcacgaccgcgcagagaaagccccggtagggccaaaagaaaaacaggcatttttttctaaaaaaaaaaaatagtcggacataaaa

SEQ ID NO: 653716 - DNA, 152 bp, Homo sapiens
gagctacttcgtgatgaaaaggaagaaccagattcacagtatggggaacttattgaaaagtgcattaaagaaggaaagaaggtaccagttgagataaccatcattgtattaaagagggaaatggatcagacaatggctgcaatgctcagaag

SEQ ID NO: 653717 - DNA, 376 bp, Homo sapiens
aagcaaggttatgcaaaggaagtgacagtcaagcccgtgagtctcgccgagcagaagcagctcaagggttacatccctgtcgcggattcgctgggtcaaaactccaagagcgtgggtcaaaggttcaagaagtatcttggctgggagccccaggtgaatgactcggtggaggacgacattgccaatgttgtccgttcaaaggcaaagagccttgggctgtaaactagtttacgctgtttcgttgtttcgaagaggggcaaggcgtgctgtgctgtgtaagaccgcaaggaggtctgttccatgtgatacgctggtgtaacaacacctgtgctttgagtatctacctactataatataccttccagtcgatatagaa

SEQ ID NO: 653718 - DNA, 327 bp, Homo sapiens
cacagctctccttcacaggcatcggcaccctctccagccatttctgcagttccagcttctcctcctctctcactgtgatgttcttgatctcagaggacaatgagaatacccttaaaagctcaatctcattcacggtgggctatcatcagctggttgtaactctgcactgtatcattggtgatgtattattgactggctataccgcccagttctgtcacctggaagttgcccgtcttcttgtcgtacttgaccagattgttcttgtccagcatcaggacagctgtatgaaccagatctagtcggcgctggtccagcaggggatctccc

SEQ ID NO: 653719 - DNA, 155 bp, Homo sapiens
cgtataatcggtagtagcgacagcatgcagtgtgccaaggccaccggaaagctagtggttggtaaaaatccgtgagctcggcaatatgttgtttttctggaacttacttatgttaaccttttatttattttctaatataatgggggagtatcgta

SEQ ID NO: 653720 - DNA, 630 bp, Homo sapiens
  misc_feature (28)..(28): n is a, c, g, or t
  misc_feature (125)..(125): n is a, c, g, or t
  misc_feature (206)..(206): n is a, c, g, or t
  misc_feature (248)..(248): n is a, c, g, or t
  misc_feature (335)..(335): n is a, c, g, or t
  misc_feature (367)..(368): n is a, c, g, or t
  misc_feature (372)..(372): n is a, c, g, or t
  misc_feature (374)..(374): n is a, c, g, or t
  misc_feature (393)..(393): n is a, c, g, or t
  misc_feature (399)..(399): n is a, c, g, or t
  misc_feature (433)..(433): n is a, c, g, or t
  misc_feature (441)..(441): n is a, c, g, or t
  misc_feature (443)..(443): n is a, c, g, or t
  misc_feature (447)..(447): n is a, c, g, or t
  misc_feature (452)..(453): n is a, c, g, or t
  misc_feature (455)..(456): n is a, c, g, or t
  misc_feature (461)..(461): n is a, c, g, or t
  misc_feature (463)..(463): n is a, c, g, or t
  misc_feature (467)..(467): n is a, c, g, or t
  misc_feature (587)..(587): n is a, c, g, or t
  misc_feature (602)..(602): n is a, c, g, or t
ttttttgtctaaaactatgcatggaganattaatctcttgtttataaattaggttaagtctaacatcactatttgaaaccagtgttatttacaaaaatgaacctcttctttgctttattgttggnttacaggaataattttaaaccaacctcaatctatctttaaaaatcttcctgccttcaaatgcccagcaacccttataaggnagggggcagccctttgacagcaacattcatcattcaccaggnatgtagaaccacaagtgaacaacaacaacaacaacaacaagattaaatcattcccaacaattcctatttgcttttccaaagcatgcnatgtctaattctgcctttctatgcagacaggnngaananggggcccatagggtatatnaatgtnaattaaattaacttcctttaaaagccaacaggcnggcttggngnggcnggggnngnnctgcngngggnggcactggcgggggatggggggaactttaaacccagggtagtaacatgtgctccagtgactgaccagctcagatagagacttctcatttactctgggtcccatgtgcaatattttacctnccgattgaatatggngccagaatctttcagaatgggggggggg

SEQ ID NO: 653721 - DNA, 564 bp, Homo sapiens
aacagaaacacagctattaccaggaaagacgctataccaggagccgctatcaccgggcaggttctataccgcgcacgtccatttaacccaccaaagtctacaacagcgctctatagctgcaacagcacgccgttctatcacatcgcgtcacctaccagaagcttctagcgtgcaaccgccggcttctcatctggagtcaggctctcgtactgccgcagctgcagcagctgccttatccacccggagcttgtgattcctggcctggcgaagaatggtgttccggcgcatggtctttgcatatgggtttagcttcaacatgattctcaagtttttcagtgggttcttctttaggactctgcgatggatcttcttgcgtggtgctcgaagggctctttggatctctgggcttttcaagattctgctaaggtctgtattaatcatcttgtgcatgggaagattgtagttactcttgagggaagcggctttacgccaagtgccgtacaattcatctaacttccggaaagcactttcactccaaatgcagaaacgtcccacatgcccacc

SEQ ID NO: 653722 - DNA, 100 bp, Homo sapiens
atacatttgcaagtataaaagcagatgggtcagcacatccagttaggtctataatccttaataaataactcccaaatctatgtaccagtgtaccatccca

SEQ ID NO: 653723 - DNA, 136 bp, Homo sapiens
ttctaagaccaaccactccacttgtgttctttttctgtagttatatcctttctcttctgcatcatcaagttctttctgtctgctgaatctatccactggtataaaatacgctgtaaggacacaagtggagtggttg

SEQ ID NO: 653724 - DNA, 117 bp, Homo sapiens
ctttgggaactgatttagttgggccagtcatttaacaggatattttttggatttatgtaacaactttttgagagcacatgccttataaccccattataataaacttttgaggtttga

SEQ ID NO: 653725 - DNA, 347 bp, Homo sapiens
cgggcggatcatgaggtaaggagatcaagatcatcttggccaacatggagaaaccctatctactaaaatacagaaaattagccaggcacggtggcatgcgcctgtagtcccagctgctcgggaggctgaggcaggggaatcgcttgaacccgggaggcggagattgcagagagccgagatcgtgccactgcactccagcctggcaacagaataagactctgtatcaaaaaaaaaaaaaaaaaaaaagaggctaatttcaaaagtgaaacttaggggaattaaccattcctttgcaaaaaagggttaaggctacaatttaatttagcccagcttagtgtccttttcaa

SEQ ID NO: 653726 - DNA, 116 bp, Homo sapiens
cgagcttgtacccggagacacttacgcgatagaggatgaggaaaactctctaccgagatttaacccaatatgttctgcccagcagaacctaccaagtaacgtgccctagggtctca

SEQ ID NO: 653727 - DNA, 200 bp, Homo sapiens
ccgtagctgtaagtagagagttgacagactcggtctcacacaatgccacagggttggtcagcgagttcactgtcaggcagatgtcgcagtcactgattttcaggtcggtgagcatgttctcaggtaggatgacaggcagcacgggcaagcagttaaagatgaccccgttgagcacagagtaccagaagtctttggaaggc

SEQ ID NO: 653728 - DNA, 460 bp, Homo sapiens
tccggcgtgtgccctcaaaggtgtagggatcacaggcatgagtcatcacatccagccaaaatctatcttttatctcaccgcaagcttttaattcatttccaactataaggaattagttggtttcataagcctgagatatgtgcaggattttggaaagatgatttcggtcagtgtggaagcatgtggcctccagcagtcgttaaaactttcaccagctggtctaagagttggattcaaggtctcatcgtcctcggacatgctactctggctagtaaacaagcaaaaggaaacggctagggctcagggttggggtgctacggagggttacaaatactcgagcggtagacaagcaattgttcccggacacagaaggaagaggggtgaggatattcctcttaatcctcagttcggctgaaagagagagagagagagagagagagagagagagagagtgagtgtg

SEQ ID NO: 653729 - DNA, 656 bp, Homo sapiens
ggagacgggggtctcaggagcaccagtgagtgagtccgggagagggggggctggtgagaatctggggagcgagtgtgagtgtggggtggagggggcatggtgtaacagaaggcagaagggcaggcagcggggaggctgcgggaacctgaagaccagagggttgacccttggttccaggaaaggctggatcaaattcccctgaagtctcccgcaaagcacagaggtggggactggtcttccctcttcggtctaaggggaaaagggagtcagagagcaagagagggcggtaacctccagctttcaagtaagcccaagattggtgcgtaccttttccagaaacacaaattctacctgatggtaaaaaaaatgaacatagaattggttttttcaagtggctttaagaaatccaggtccagggcggggcgcgggggctcacgcctatgtaatcccagcacttggggaggccgaggcagggggatcaccggaggtcaggagttccagatcagccgggccaagagggtaaaacccggtctctactaaaattacaaaaaaactagccaggcttggtagtgcacatctgtagtcgcagctacttgggaggctgaggcaggagaatcctttcacgcggggaggtggaagtcgcagtgagccgagat

SEQ ID NO: 653730 - DNA, 945 bp, Homo sapiens
accaagtggaagctgctgtaagagcagaatgtggtcaagagcagccgtctcccagacatctttgaggcccagattgctggctatcgtgggtcagcttgaggcaatgcacggtggatggcggccgcgtggaggcggatctgcggaccctgccaggatgtgagtgtaggacttcaagaataagtacaggaacgactgaaattgaagcccgccggcacgagtgtgctgtacgcaatcgacgttctctgtggctgctgataccaacggatgtggatgctgtcctacattggaacgaagcgatgagaatccttggtaggccagggctcgcgtactgccctggagatgtatgatgatcacacttcctcaggaacctcactgagacggagttcgtaccaagagctcgcaaggtcccagatctccgacgacatctgtggtgcttgctccatgggacgacaagttctgctccctggaccttgagacaggcgatcagttcggctagagtgtcaacggcaccagatatcgacgtgagattgggcccaattgcctgccggcggcttcacggcgtgacatgctcgtggtacgcaggacgcacatgcttttgaggactcatctcaagccccaggctgggatgcttgtggacgaactccggaatacccggaatgagaattgcagagatgaagcgggcatccaacagggctgcacggctgtggatcgacaacatccaagaaccaggcgttcccaaggtgcagagccgcccattgcgcatggctcgagagcgtgggaagctggcagcaccacgggatggtcgtgccaagcaggaggagccggaaaccgcccggtagggggccaagcaggatatgggacaggcagagggtaggttccccgaactcatgaacgccaaactggcctcggcattgggatgcccctcacccaggggtgaagggagaa

SEQ ID NO: 653731 - DNA, 124 bp, Homo sapiens
aacaccctaaccactacaatcttcctagggaacacacactataacggcacatctcacccttaacacatctacacaaacactacttttaatcaccaccgacccatacgttcttaaccgtaccagt

SEQ ID NO: 653732 - DNA, 609 bp, Homo sapiens
  misc_feature (87)..(87): n is a, c, g, or t
  misc_feature (112)..(112): n is a, c, g, or t
  misc_feature (130)..(130): n is a, c, g, or t
  misc_feature (135)..(135): n is a, c, g, or t
  misc_feature (168)..(168): n is a, c, g, or t
  misc_feature (180)..(180): n is a, c, g, or t
  misc_feature (182)..(182): n is a, c, g, or t
  misc_feature (188)..(188): n is a, c, g, or t
  misc_feature (208)..(208): n is a, c, g, or t
  misc_feature (218)..(218): n is a, c, g, or t
  misc_feature (224)..(224): n is a, c, g, or t
  misc_feature (226)..(226): n is a, c, g, or t
  misc_feature (229)..(229): n is a, c, g, or t
  misc_feature (242)..(242): n is a, c, g, or t
  misc_feature (249)..(249): n is a, c, g, or t
  misc_feature (254)..(254): n is a, c, g, or t
  misc_feature (259)..(259): n is a, c, g, or t
  misc_feature (262)..(262): n is a, c, g, or t
  misc_feature (265)..(265): n is a, c, g, or t
  misc_feature (294)..(294): n is a, c, g, or t
  misc_feature (304)..(304): n is a, c, g, or t
  misc_feature (306)..(306): n is a, c, g, or t
  misc_feature (310)..(310): n is a, c, g, or t
  misc_feature (313)..(313): n is a, c, g, or t
  misc_feature (315)..(315): n is a, c, g, or t
  misc_feature (334)..(334): n is a, c, g, or t
  misc_feature (336)..(338): n is a, c, g, or t
  misc_feature (442)..(442): n is a, c, g, or t
  misc_feature (449)..(449): n is a, c, g, or t
  misc_feature (453)..(453): n is a, c, g, or t
  misc_feature (457)..(457): n is a, c, g, or t
  misc_feature (461)..(461): n is a, c, g, or t
  misc_feature (472)..(472): n is a, c, g, or t
  misc_feature (475)..(475): n is a, c, g, or t
  misc_feature (477)..(477): n is a, c, g, or t
  misc_feature (564)..(564): n is a, c, g, or t
tctaaaagaaacttttatgttataagagttactttttggataagatttattaatctcagttacctactattctgacattttaggaangaggtaattgtttttaatgatgganaaacttgtgctggtgttncggancttatgatgctgagcatgttctgcactggtgcnaatgtctaatananttttanatttacacacatacgtgctncccagagatnaatttngnccntatgaactattgncccattnttcantgagnccnccncatacgcacccccaaatcagtgtgtttanaccccccaantntctnacncnttcccaaacatgtaccaantnnnataaacctcttgatttccagcaacatactatagaaaacacctgctattcaaaacacaacttctcagtgtcatccattgctgtcgtgagagacaacatagcaatntctggtntgtngcangctntcaagatagcntgnanttaaaaagttggtgcattagttgtatctgatggatataaatttgcctcctagttcactttgtgtcaagagctaaaactgtgaacctnactttctcttactggtgggtaataactgaaaataaagatttattt

SEQ ID NO: 653733 - DNA, 195 bp, Homo sapiens
tatgtttggacgaacacaaactaccacctacctccctcaccaaagcccataaaaataaaaaattataacaagaccctgagtaaccaaatgaacgaaaatctgttcgcttcacttctattgccccctacaatacctagcgcctaccctgccgcatgtactgtatcattcatatttccccactctattgatccccac

SEQ ID NO: 653734 - DNA, 1240 bp, Homo sapiens
gccaaccatgatttgtgagccttctgggaaattttgttatataaaggaatatatagtagtcagacagcaagttataatcagtcttgcgcaggaaccataagaaaaggtgtcccagggtcatctatataaagagggttacacattattttatcttacctatgctaggttaaacacatttatagcacaatcattctatgaagcatggcgcaggagcagtcaaagggcttgcttgccccagcagagttcccagcagacagaccatggctcttcccagcagcctgtgcaaattctgatagatggccccgaccccggacgcacgcacacgcacgatcagtgcaatcaaccagacaacaatcacaccccgcacccacgcatgggaacaataccaataatagagaataataacatagagagagaaacaagagccatatagaacagaaaactgggccaggacaaaggcatactcagcaccacacacatagagaaaaacgaataccatcataagcccacactcacgtcactctgcctcagctcaagcctaaaccaaaaagagaaagacaaacaaccacaccacaagcgagagcgaggcacaacccccactaagagcgcaccgagacacaggagcaagaaaaaaggaggaacaaacaacaaaaacacacaagacaagcccagaaagaggaacacaaaggaaaacaaacaccacacagcggaccaacaacaaaaaacacaacaacaagcaagagacaacccagaacaaaaacacgcagaacacaacaagcacacaaaccacgcacacaaccacgaggaagacagcacagaacagacaacaaaaagacaccgagagaaacaagcaaaagacacaaagaagcgcgaacaaaaagacacagagaaaaccaacaaacaaacacgaaacccacgaatgaatggagggacacctgcaagagagagacggcagagaaacacagcaggagcacacgcagggacagaaagaaaccagcgaggacgacaacaagaacgcacacagacagagatgaacagagacgacgaagagggcagaaaaacagcgcgaggaagaatgagccgcaggccgacgacgccgcgacgcgcggcgacgacgaccaagagaagaagagaagaagcagacacgagaggaacaaggagaggcgcggagggagaggacggagaggacggcgcgcagagaaaaggaacgacacgaagcaagagatcacccacagcggtc

SEQ ID NO: 653735 - DNA, 776 bp, Homo sapiens
attcaatattgaatatacatataactatataaataggagcatatatatatagctccttaaacatagccataatactcttatcgccacctaaaatttacaatcattccataaattatcgaaatacaagtcaatgtgcaaattgctaatagctttataaatatgcgtctttaagtttgtaggaagaaacattcaaataggtctattcagtctcttagattgtatgttgctgactttatatcccttgacttgagaccttatcatttgtttcttaagacatcgtagttgtatatgtagacttctacgtaagtctgaactccagttattggcatccctcggggtagtatatacatggtgcctctgtaatacgtatgtgtcctgattatcgagagtggaagactaaagtgtgtaccaaatataggttctacttcatagatagtgtgtattactatgaaagcatgcacaagatggggatatatccctgtttctaatactggtgttaaatcaaggtgcaatacctaggatccatacagtaggtgaaagtgtgaaaatagtgacactgctatatgatgctaacaacatagtgcgacattattgaacaggggcacgcttatagccatccataccaagtccagtgtgaattaacgcagagggaacaaagatgaaacacagaccaaaagcagggttaatatgggcatggaaaattagtagaccaaaaaagcaggaacgttggaaaagtataaaacatctccgagcgaactatgcaaagtagggacaga

SEQ ID NO: 653736 - DNA, 1111 bp, Homo sapiens
aaaagggtctgacgggagaaacccagaatgttaattctagggtagaaaggaaaaggggcacactcctggcagagggagatgtatgaggggaaacaagtgaaggaggggtctcaccaggcacaagaagtccgtgagtggctcacagcatgcaggaccgtggcagaggtggtgggtgcagggaaggcgaagtagcagccagcgtgaggtgaactcgaaagcaaggggtgacaggaacaggatcgtgtcctctggcacagggctctcaaggctcccaggggccccccaggaaaggcctccatcagattttggaccagtgtgagagggtctcgtgaagaagtcatggctaaaccagccgatgggtggatatcagagtcaaaaccttcacgaaactcttccgtcgctcacattcacagcccaggatatgcactggcatccccaaacagggcagattcctggacaagcgccttcaagagacggggcccactccacaatccagggaatcccgaagcagcaccaggccgcccaaggccaacagggagtccaacatctccaactcgacgtccggtccctgatctggggccctctgatggcgtcatgacccagtgtccttcctcctcggggtgaaagggggccgagcactcgggcgtactcccagcattaggacctaacataagtcgggcaatgagacggcgcactatgtacaaaatccccaggggcgcgcacaagcaggatgtgagcccatccacgagccctgggcaaaagccgaacggaaaagaaccccgacaaatctcccggggaccgggcgggaacaacataggggaaaagccggacactgggggcacactcccaacggcaaagggcgcaaaagtacaccgagggggacgcaagcataggagaccaaattccgtaacaaggggcccataagggcgaacaaaaacaagacgcccgagataagagcggcaggacaacgacagacacacggacgacaaccgggggggaacagggcacaacgacagagcagcggccaacgacgcgagcagagacggagacgtagtaaacaacacagcgagagaggaagcagagagaagaacagggcaaagcaagaaacaaa

SEQ ID NO: 653737 - DNA, 129 bp, Homo sapiens
ccccccccccccccccccccgggggggtttttttttgggggcccccccctgccccgcccccccggtaaaaaaaaatttatttgttttttttttttgggcccaaaaaaaccccccgggggttttccccca

SEQ ID NO: 653738 - DNA, 237 bp, Homo sapiens
acgagggacaggaggagccgccgctgaatcaccagggggctgctcgcacagaggtcaatctacggaagggcacatgggacaagtgcaacttcctggccagacagatccgggagcaccgcgagccggccacactgtgatgaggaagaggatgaggagcagttgaggtcaaccatgacatgcaaccagcacaggagatgcccatgtacatgcgtattcggaggttagagagacgtccac

SEQ ID NO: 653739 - DNA, 689 bp, Homo sapiens
  misc_feature (14)..(14): n is a, c, g, or t
  misc_feature (246)..(246): n is a, c, g, or t
  misc_feature (255)..(255): n is a, c, g, or t
cttttcactcagcngcagcctttcaagctctgctctggccgtctcaatattcttacgggcctgggtcgcatttctctcatgttggataggaatcagaggtaaacctccaatcttgggatttttggttattgaacgtttccgttcctttccagctggcggccatatatcattctcatgctgagcaatgaagatactggccatccactccatctgggcttgtaaactgtcacaacacaggtgccagtnatgtttttnagaatacacagtcaatccccaacttgttggggtttcattttcttttttacaccaagataaaacttcatcgccctaagaggaaacatcttgtcgtgtttgctgctctttggatccttgtaaataaagagatgcccatctcgtaaaacaacacatcgatcttgaaatttattcccagacagtattttagatggttcttctttgagttttaagatgccttctttgatacttttctctctgcactgtttaatgctgtcaatggttaagaatctcttcaccacaagatacgcagaaccaggctcagctaatgaactccactgaagcacctgctccaacacattctctgtgtagtgaagtggacgttctagctcttcattttcaatgacttcaaaggtggcccaaatatcccctttcataggaatgatattttttatcgc

SEQ ID NO: 653740 - DNA, 848 bp, Homo sapiens
  misc_feature (51)..(51): n is a, c, g, or t
  misc_feature (88)..(88): n is a, c, g, or t
  misc_feature (107)..(107): n is a, c, g, or t
  misc_feature (120)..(120): n is a, c, g, or t
  misc_feature (127)..(127): n is a, c, g, or t
  misc_feature (140)..(140): n is a, c, g, or t
  misc_feature (143)..(143): n is a, c, g, or t
  misc_feature (147)..(147): n is a, c, g, or t
  misc_feature (152)..(152): n is a, c, g, or t
  misc_feature (158)..(158): n is a, c, g, or t
  misc_feature (190)..(190): n is a, c, g, or t
  misc_feature (193)..(193): n is a, c, g, or t
  misc_feature (196)..(196): n is a, c, g, or t
  misc_feature (199)..(199): n is a, c, g, or t
  misc_feature (201)..(201): n is a, c, g, or t
  misc_feature (212)..(212): n is a, c, g, or t
  misc_feature (220)..(220): n is a, c, g, or t
  misc_feature (240)..(240): n is a, c, g, or t
  misc_feature (261)..(261): n is a, c, g, or t
  misc_feature (263)..(263): n is a, c, g, or t
  misc_feature (283)..(284): n is a, c, g, or t
  misc_feature (305)..(306): n is a, c, g, or t
  misc_feature (313)..(313): n is a, c, g, or t
  misc_feature (335)..(335): n is a, c, g, or t
  misc_feature (361)..(361): n is a, c, g, or t
  misc_feature (365)..(365): n is a, c, g, or t
  misc_feature (382)..(383): n is a, c, g, or t
  misc_feature (386)..(386): n is a, c, g, or t
  misc_feature (400)..(400): n is a, c, g, or t
  misc_feature (423)..(423): n is a, c, g, or t
  misc_feature (435)..(435): n is a, c, g, or t
  misc_feature (556)..(556): n is a, c, g, or t
  misc_feature (616)..(616): n is a, c, g, or t
  misc_feature (632)..(632): n is a, c, g, or t
  misc_feature (723)..(723): n is a, c, g, or t
  misc_feature (833)..(833): n is a, c, g, or t
ttggtgggggggacgagagagccagagaaaacctaaagtagaccatgcttntttccattccaatgaaaggttattgtcccgggaaganccccaccccctcgctttcntcctccgtttttnctaaacngtctcgagggggnatntatncttantttttntttttttattttttttttttcaattgtttgtnggnagnggngncctggtactgntggtactnggaacaccaggtcgtttatnttgtttttggcttaggtgaantnaattttgttcatgctatagnncgtgtaaaagtgaaggaaggnnttgggcnggaacatgggggtgaactggtnggagatgggtttgaagaggttctggntggnggtgctgttggggatgnnggngggggggattttgnggggggggggggggatgtggganaggggggtgttnacgttgttggggatgcattttaggaagtagttgttgtttttgttttgcacgttgagtattttttcgttcactttcttcatggacatgcggccccggaagatggcagccaccgtcagtagcngccgtggcgcgggtcgcaggcggccatcatgttcttggagtcgaacatctgctgggtganctcgggcacgtgagcncccggtactgctggctgccccggctggtcaggggcgcgaagcggagcatgaagaagtgcaggcgagggaagggcaccatgttcaccgccancttgcgcaggtctgcgttcagctgggcccgggaagcgcaggcaggtgggtgaccccgctcatggtggccgacaccaggtggttgaggtcccgtaggtggggggtggtcancttcagggtgcggaa

SEQ ID NO: 653741 - DNA, 854 bp, Homo sapiens
  misc_feature (33)..(33): n is a, c, g, or t
  misc_feature (148)..(148): n is a, c, g, or t
  misc_feature (205)..(206): n is a, c, g, or t
  misc_feature (226)..(226): n is a, c, g, or t
  misc_feature (249)..(249): n is a, c, g, or t
  misc_feature (254)..(254): n is a, c, g, or t
  misc_feature (339)..(341): n is a, c, g, or t
  misc_feature (343)..(343): n is a, c, g, or t
  misc_feature (345)..(345): n is a, c, g, or t
  misc_feature (347)..(347): n is a, c, g, or t
  misc_feature (349)..(349): n is a, c, g, or t
  misc_feature (351)..(351): n is a, c, g, or t
  misc_feature (355)..(355): n is a, c, g, or t
  misc_feature (359)..(359): n is a, c, g, or t
  misc_feature (371)..(373): n is a, c, g, or t
  misc_feature (375)..(375): n is a, c, g, or t
  misc_feature (387)..(387): n is a, c, g, or t
  misc_feature (413)..(413): n is a, c, g, or t
  misc_feature (417)..(417): n is a, c, g, or t
  misc_feature (419)..(420): n is a, c, g, or t
  misc_feature (423)..(424): n is a, c, g, or t
  misc_feature (426)..(429): n is a, c, g, or t
  misc_feature (437)..(437): n is a, c, g, or t
  misc_feature (439)..(439): n is a, c, g, or t
  misc_feature (442)..(445): n is a, c, g, or t
  misc_feature (451)..(452): n is a, c, g, or t
  misc_feature (455)..(455): n is a, c, g, or t
  misc_feature (459)..(461): n is a, c, g, or t
  misc_feature (464)..(464): n is a, c, g, or t
  misc_feature (472)..(472): n is a, c, g, or t
  misc_feature (474)..(476): n is a, c, g, or t
  misc_feature (481)..(482): n is a, c, g, or t
  misc_feature (484)..(485): n is a, c, g, or t
  misc_feature (489)..(489): n is a, c, g, or t
  misc_feature (498)..(498): n is a, c, g, or t
  misc_feature (579)..(579): n is a, c, g, or t
  misc_feature (829)..(829): n is a, c, g, or t
gtgggtgtgtctgcacatacctctgcagtaccncaccagggagcattccagtatcatgcagggtcctgtgatctagccaggagcagccattaacctagtgattaatatgggagacattaccatatggaggatggatgcttcactttgncaagcacctcagttacacattcgccttttctaggattgcatttcccaagtgctattnnaataacagttgatactcatnttaggtaccaaaccttttgagtncaacngaccaaaccaaaggaaaagtgttgctagagaaaattagggaaaaggtgaaaaagaaaaaatggtagtaattgagcagaaaaaaannnantnananangtantgantggcaaccagannnanccaaggagaacngaattggctaggaaaaaagaaaaacngcangnnaannannnnccgaagcngnccnnnngaggcnnagncagnnnatngggaaaangnnnaggannanncccngccattagnacccatcttatgtatgttacccctcagtaagttccccccattttagttttctaggactgaaaggattcttttctacattanacatgtgtgttgtcatatttggcttttgctatatactttaacttcattgttaaatttttgtattgtatagtttctttggtgtatcttaaaacctatttttgaaaaacaaacttggcttgataatcatttgggcagcttgggtaagtacgcaacttacttttccaccaaagaactgtcagcagctgcctgcttttctgtgatgtatgtatcctgttgactttaccaaaaaaaatttaaaaataaaagtaantaaaaaaaataaacacacacactga

SEQ ID NO: 653742 - DNA, 939 bp, Homo sapiens
  misc_feature (33)..(33): n is a, c, g, or t
  misc_feature (148)..(148): n is a, c, g, or t
  misc_feature (205)..(206): n is a, c, g, or t
  misc_feature (226)..(226): n is a, c, g, or t
  misc_feature (249)..(249): n is a, c, g, or t
  misc_feature (254)..(254): n is a, c, g, or t
  misc_feature (339)..(341): n is a, c, g, or t
  misc_feature (343)..(343): n is a, c, g, or t
  misc_feature (345)..(345): n is a, c, g, or t
  misc_feature (347)..(347): n is a, c, g, or t
  misc_feature (349)..(349): n is a, c, g, or t
  misc_feature (351)..(351): n is a, c, g, or t
  misc_feature (355)..(355): n is a, c, g, or t
  misc_feature (359)..(359): n is a, c, g, or t
  misc_feature (371)..(373): n is a, c, g, or t
  misc_feature (375)..(375): n is a, c, g, or t
  misc_feature (387)..(387): n is a, c, g, or t
  misc_feature (413)..(413): n is a, c, g, or t
  misc_feature (417)..(417): n is a, c, g, or t
  misc_feature (419)..(420): n is a, c, g, or t
  misc_feature (423)..(424): n is a, c, g, or t
  misc_feature (426)..(429): n is a, c, g, or t
  misc_feature (437)..(437): n is a, c, g, or t
  misc_feature (439)..(439): n is a, c, g, or t
  misc_feature (442)..(445): n is a, c, g, or t
  misc_feature (451)..(452): n is a, c, g, or t
  misc_feature (455)..(455): n is a, c, g, or t
  misc_feature (459)..(461): n is a, c, g, or t
  misc_feature (464)..(464): n is a, c, g, or t
  misc_feature (472)..(472): n is a, c, g, or t
  misc_feature (474)..(476): n is a, c, g, or t
  misc_feature (481)..(482): n is a, c, g, or t
  misc_feature (484)..(485): n is a, c, g, or t
  misc_feature (489)..(489): n is a, c, g, or t
  misc_feature (498)..(498): n is a, c, g, or t
  misc_feature (579)..(579): n is a, c, g, or t
gtgggtgtgtctgcacatacctctgcagtaccncaccagggagcattccagtatcatgcagggtcctgtgatctagccaggagcagccattaacctagtgattaatatgggagacattaccatatggaggatggatgcttcactttgncaagcacctcagttacacattcgccttttctaggattgcatttcccaagtgctattnnaataacagttgatactcatnttaggtaccaaaccttttgagtncaacngaccaaaccaaaggaaaagtgttgctagagaaaattagggaaaaggtgaaaaagaaaaaatggtagtaattgagcagaaaaaaannnantnananangtantgantggcaaccagannnanccaaggagaacngaattggctaggaaaaaagaaaaacngcangnnaannannnnccgaagcngnccnnnngaggcnnagncagnnnatngggaaaangnnnaggannanncccngccattagnacccatcttatgtatgttacccctcagtaagttccccccattttagttttctaggactgaaaggattcttttctacattanacatgtgtgttgtcatatttggcttttgctatatactttaacttcattgttaaatttttgtattgtatagtttctttggtgtatcttaaaacctatttttgaaaaacaaacttggcttgataatcatttgggcagcttgggtaagtacgcaacttacttttccaccaaagaactgtcagcagctgcctgcttttctgtgatgtatgtatcctgttgacgtttgtctcagagaatgtttttatagaagtttagagcttaacatatgtgaacttctaatgcacgacattctctagagttataaaggagtgtcttcatattccttatttataataataacaaatactgtctggatgtggtatg

SEQ ID NO: 653743 - DNA, 228 bp, Homo sapiens
ctccggcgtagggcgatattagcggtacttccgtcacccgatggtagtgttctggcgtatcgcgctaacaatgctggcgtagtagaagcttacaaatcttctccttctggttgggttcctgttactcgcgctatccatttacctttcaataatggtacgtctgaaattaaggttggcgatactatcactggcgcgagttccggtgcaagtggggtaccggagctcgaa

SEQ ID NO: 653744 - DNA, 125 bp, Homo sapiens
  misc_feature (50)..(50): n is a, c, g, or t
ggccttctcctcactcctgtccggcttccggctcctcttcctccttcagnagcagtcagctgcagattgcaatgcccagtgaggtaggtgtccccctgactaccgactatggtcgatagactcaa

SEQ ID NO: 653745 - DNA, 193 bp, Homo sapiens
ggtgacatgatcgaatcgagctggtaccgacagcatcctaaccagagatgcaactccgaagacctcaggctcctctgggaagttgttagtgctagagacagcctcactgcaacgcctcttctgtggagggctggatcctgggcccagagatagctccctcgtcatccgtaagcaccacaaagagctcgcaggg

SEQ ID NO: 653746 - DNA, 273 bp, Homo sapiens
tcatctccaagtagtgggtacaggtgttgcacacactggctgatattgtatttagtagagatggggttcgcggtaggcaggctgtctcgaactctgactcaggtgatccactgccttgcgctcccaaagggctgggattataggcgttgagccgctgtgtccagccaggaaatcttcagtggtagcactcaagtaacggaatttggacaaggaaagaacttcacaagtttaatgaaatcattcctttaataaagaataaccgatctcttattt

SEQ ID NO: 653747 - DNA, 259 bp, Homo sapiens
actaccgccagtattttcaccctgagccagctcatcacaggcaaggaagatgctgccaataagtatgccctgagggaactacaccattgtgcatggagatcattgaccttgtgtaaggaccgaatacgcaagctgagctgaccagtgcaccggtcttcagggcttctgggttttccacagctacaggtgaggggaacctggttctggcgttcacctcacctgctccatggacacgcctctcaagttgatccatggcacg

SEQ ID NO: 653748 - DNA, 265 bp, Homo sapiens
aatgttcattgtaatgattcattggtctggtttgaggattatggattatgatacactgtcaacactagaacctcactgggactcctcttggatattcagttgttgccctctgtcatggaggttgtgtacctttggatctctgcctttatgcactgcagttcatagacaagtagatgtagttggagtagggctgggtggtaggtcagttggtcagcaactcttccccatacacccactccaccagatcagctctccaggtcgacgc

SEQ ID NO: 653749 - DNA, 211 bp, Homo sapiens
gcacttagcttgtatggaattggtcgtgccttcgcaactcctctgccgagtgctctgggaggccacggtggatggactgcttgcgccctcgagtttgaggaccagcctgggtaacacagcaagaccccatctctacaaaacattataaaaaattagttgagtcatggtggtattgagcctatagtcctggctactcaagaatctgacgcag

SEQ ID NO: 653750 - DNA, 325 bp, Homo sapiens
cgccgggagatcagggtcggctcgggatagccgcgtaacgtcccctcttttccatgagctggctctctccagtcgtctacagccatggatgagtactggccgtgcacgaggaagcaatcactttcccgtgaaaacttctcaaaaacaagcaacaacaacaacaacaacaccattccttcgcttttctagcagagtaaatgttttcaggaaaaaaagaattccaatcatccctccccacagcgtgtgcatttctgcctctaggtctttgctggggccactcctctgcccaaggtgctctgtatcccactaggatacagtagggaga

SEQ ID NO: 653751 - DNA, 386 bp, Homo sapiens
gggtaaccttgattaccctactgtagctctttagctcggattattccagtggtgcgtttcgtccagatgcacacaagactgagggtgctcatccgttcaaagatatgcgtgaagactatttccacgtcttggtgttgactgcctttgctcagcatctctagcagagtccatttgacgatcatggttaattcgcgtgtgaagtgactgaatacgcctgatcctgtgtagctgatgagtcagatgcaaattgagactaatgacttcataccctgactggagaccaactatgcacagatgcaactcttattgacacctatggagtggctgactgctgagctacacatgagcccgctagacaggcgctgattgcatcacatagatgacgc

SEQ ID NO: 653752 - DNA, 113 bp, Homo sapiens
atttaacagcaaatagctgaatcactacttcgcactagttcctcgtgtactatgcatattggtccacgtatcaacaaagtaatgatagcattagaaggactcagggtattggt

SEQ ID NO: 653753 - DNA, 1163 bp, Homo sapiens
  misc_feature (125)..(125): n is a, c, g, or t
  misc_feature (196)..(196): n is a, c, g, or t
  misc_feature (367)..(367): n is a, c, g, or t
  misc_feature (380)..(380): n is a, c, g, or t
  misc_feature (393)..(393): n is a, c, g, or t
  misc_feature (396)..(396): n is a, c, g, or t
  misc_feature (417)..(418): n is a, c, g, or t
  misc_feature (436)..(436): n is a, c, g, or t
  misc_feature (521)..(521): n is a, c, g, or t
  misc_feature (939)..(940): n is a, c, g, or t
ggggcggctgcagacgccgactgactggtcgacctaggagcgcatcggagccccgagaccgtcgccggcgccatggtaggtccgagtaccgatactccgatgcccgtctaggctccgtggtgaangagccccgaaacatgagtccaaccgtcggacattgagaggcgtgaggtggcggaccggcgtgcgtggaggntgtgggccgaccttcaaggcccatctgtagaccgccgtctgaaccgcgtagtcgttccggctgtctctgcagggacctagaaagggttaagtgttacttcctgtgcgaagaactgaatgtgtctgggactcacacgcaatgcctctacagcgtgcaactggccattcccgnacagcgtatgagnaagcggccgatgnttntccgggcgatgctcggcatgnntgacaacttgctggaagnagtgtccctgtcagaagaactgtgcgcagcataactgcatccgagccaaaatggctgggcgtggacactcacacatggacgcgangcccgtgcgtaggattcgtaaataccaggtggacgaggcatagtcgcatgaggcgacttgcgctctaacgctgatcgtgtggtgaacggtcacataggcggagaggttactatgcgggacatccgttatctatcctcgcgttgggatgggggagacaagcaatcctcatagggctcttgatagcgtggccctaggcaaaggcaatttcgccacaggcctggggatcgctggtttgtctacccggtgtacatcatctcctaatgcgcgctggcttacaggcttttccatggggttcgcagcagactatagtgcacctgacgaggtacatacaagtgcgagatactcttaaagcaagcacgactggctcgcgactccagggagcgcgttttatggttcacgaggcagccgataggtggannacaacgaagagttagccttgtggagtgctcgtgacatcgcgtgtcatccgagcccgctcatttcgacgaagcgagttgtcgcaggctggacaaacccaggcgtgccaagtcgagaactggcttgcttcctccaagggtggttggttaactcccgtggagaccaactcaagaattttgcgggattgaattgcccaagggtgggccgctattgtgggcacagaag

SEQ ID NO: 653754 - DNA, 133 bp, Homo sapiens
aactttcataatgtatgcatctgctacttatgaatgtacgttactttccgacatgacactgtactaagtctcccgttttccatacatggacaaatactttgtttcagccaactctcagtggaggggcaaccag

SEQ ID NO: 653755 - DNA, 486 bp, Homo sapiens
  misc_feature (66)..(66): n is a, c, g, or t
  misc_feature (71)..(71): n is a, c, g, or t
  misc_feature (133)..(133): n is a, c, g, or t
  misc_feature (158)..(159): n is a, c, g, or t
  misc_feature (171)..(171): n is a, c, g, or t
  misc_feature (200)..(201): n is a, c, g, or t
  misc_feature (278)..(278): n is a, c, g, or t
  misc_feature (331)..(331): n is a, c, g, or t
  misc_feature (382)..(382): n is a, c, g, or t
  misc_feature (391)..(391): n is a, c, g, or t
  misc_feature (471)..(471): n is a, c, g, or t
  misc_feature (480)..(480): n is a, c, g, or t
gcaactacaggatcgtgcagatgctgctgccggtgaccagccgcacgcgcatacgcgtaggggtcnagctncgtgcacctggcggccgagcgcaaccacgacgaggtgctggaggcgcctgctgagccgcgcnttcgacgtgaacacgccgcctggcnncgagccgcgcgncctcctacgaagaccggcgcagtcctgcnntgtacttcgcggtggtcaacaacaacgtgtacgccaccgagctgctgctgcaacacggcgccgaccccaaccgcgangtcatcagccccttgctcgtggccatccgccacggcttgcctgcgcacaatgnagctgctgctggaccacggcgcgaacatcgacgctatatcgccacgcaccncaccgcttncccgcaacatcatgttcgccatgaagtgctgtcgctgctcaagttctcatggaactgggctgcgaggcgaacctgttctnatgctctanggaaag

SEQ ID NO: 653756 - DNA, 165 bp, Homo sapiens
  misc_feature (7)..(8): n is a, c, g, or t
  misc_feature (12)..(16): n is a, c, g, or t
  misc_feature (18)..(21): n is a, c, g, or t
  misc_feature (23)..(23): n is a, c, g, or t
  misc_feature (26)..(26): n is a, c, g, or t
  misc_feature (34)..(34): n is a, c, g, or t
  misc_feature (39)..(39): n is a, c, g, or t
tgtgtcnntgcnnnnngnnnngnganctcaggcngtctnagtcatcactatttcctgtgtgtttcttcctataagtgaaataatgtgtagtgtctagcacggtgcctgacagctcacagaaaatccccaacttcccctcccccaccgccatgcgtggattgccag

SEQ ID NO: 653757 - DNA, 689 bp, Homo sapiens
caaaaatatggatacatctttattgtttaaaattaagttttacaggtgattctgatgcacatcaaatgttaagacgtgttctgtaacatagttttcctcttttgctggaaggagtttactttgagaatgcatttgaatgatatttcactatttaataagcataccataaatgcagttagcgaaattatcatgggaatatgatcactacatgatcatacatctaatgagtgatgtgataatgaatgtaataaatgcataaatacataaaaaaattaaaatgtattatttaatagatacctccttatatatttaaaagtaaccaacatagagattcagtttaatggtgctacctaaaatgtaaagtggctttactctttatactcgaagtcttattgatattttgggggaaaaactaaaagatctgcaggatccactttcatgtctacgtaagactcatgtaggattgtactcacttgcaagtggcccaagtaaaacttgactcaggactatttttagaaagaggtaacacatttttacaattacttcaaataaacaatttaaaaactttgtccttaagtttcaaaaacacctcagaattcatttgtcccttacacgttaacagccgacctaaaactggaactaagtttctctgtgacagtgaagtggttttattgatagatccaccaagt

SEQ ID NO: 653758 - DNA, 947 bp, Homo sapiens
ggctgcagagtttctgagcgccgcttcctggcggctgcgcacgctgcgcatccttcccctggccaggggggcggcagggcagagctggaagaggcccgcgggggcttcgcgggagtccaaagggcccgacgggatgggatctccggtgctgaaaccccccggggactacctgccacaagctctagaaggccaaaggttaaagaagcagctccaatccagagttcctgacgccttgcttgccggggaactatttcttcggcacgaaccgacctgggtgaaagcaattccctgatgatgtgtagatagaagaaaacccgcgcagaaccagtcacaaagaaaaaagaccccggagagcctaatcctcctccacgaaacttcattccacaaaccgcaacgctgccgggtcacttggcccccaagcaaagccccaatcggggctcgccatggcgccgaggagaacccccatgcagggaagagcctgggactggccctgccccggcgaaacgcacacgacgacgatcgaccggacggaacaccaaaaggaaggcggcaccccacgtggccacccacccatgcaccgggggggcggaacaaaaccaacggcacgcgaactccccatcgtcgaacgaagcgagacaccaaatagcacataagtctaaatccgatatccgaaagaccagagaaccttgcactgttcttaaacccagacacagtgtcctgcgagacatcacactctctataatgcacaattcgaacaaacgcgtggatcgatcgagtgtttacccagagcttttgcacagttgggagttgtcccaccagaccatcaccatgtcattctgcgcctctccaccatcttagaatgaggtccggcgctcaaactcaaaacacttgtccgcgagcacaataatcgaccacagggagcaactacattaccaatcacgagtcgt

SEQ ID NO: 653759 - DNA, 1211 bp, Homo sapiens
  misc_feature (1160)..(1160): n is a, c, g, or t
gtgtcggtttggagtgctctgtttcgtctatgctggtcatggtgagggtttgttctccttcgttgcttgctcctcagctttgtctgtcgttcgttgttctggctgtgtggtgtgtttttcgctcctcctctttttgttgtggtggtagtgtgtctcttggtgctagttgttgtcttctgttgctagtctggttttgtggcgtgcggctgttgtttgtgttgttgtttgtttctccgttgcctgttttttctcgtcgctgttcatggtcgtctcgccctcagtctatcgtctgcgtgcgttggcggttggtgggtgttgttgcgtcgcggtctccggctggctgtggtctatgcttgggaggcggtgggtggtttccgcgtcgtgcgactctgcgtgttggctgtggcagggttttgtgttgtgcgcggcggtgggtgtgcgctgttcgcggtggctggctgtgtgagtggtgtatgaccgccctctaggggtggggcttgctgagtatatattacgttggaaggtgagagtgcgtctgatttttgtgatgtgtgtggtgggtggtggtgggtagggatgtgatacgagtgtagggggggtcggagtaaagtagggtggggatgagggggtttgaatgtattggttggttgatagtatatgttgatggtgtgtcatacatgctgatggagaagtgtgtgtggcgttgtgtagtggagtgagttgtcttcgtctgttgtctcttctccctctcggtgtttgcggctgttcggtcgtcgtgtctgtgtccttgttgctcgtctttctcctgttggtttgtgggctgggtcgttcgtgcctggtggcggcccccctgttcggtcgggcccgttcgtccgctctcggtcggcttgtgtcctgtcccgcccacgcgcgtaggattatgtgttattgtagaataattttttgctgtctctcgtgatgtggcgtgtgtgtgttatatatatttgctcaccagaatgtgtatatgattgtgttcgttgaccatatacgttttgtattgtttgtcgctatttgtggaacaataatttgtggtggagtgtagaaatagtggtttatggtgttcttgtttgtgttaattatttttcttcttctctctgttgtgtgtttgtttactacttgtntcggattatgcttgtagatgtagtatttgtgatatataaataatatataaa

SEQ ID NO: 653760 - DNA, 490 bp, Homo sapiens
cattcttatcctacaccaccatcatacaccagcaactacatcttattattatcgtgctggtataaaagaatttcctcagcaaatacttagccttcacatataatatccatctcataaataatgcaggatgccagaagtcccccggagtagcacagggcaatgctattcccaagctctctaccagaagtggtggtctttctcataatgaggacattatctgcaaatagtgaaagattctggtaacttcaggatgctgaggtctctgtgacaaaccttcatccacagccagaattaagaaagttgtagtagcagttggtgtccagggatgagatggaaggcaggccagcaagaaggggctcatgtagacatagtgctctcagaacttccagtctatggttgccccttgttgagcgagactcaaggtagtctccagtcagtcaggcaatgccacactatctatggggctgaacctcatgcgcacagatgtgga

SEQ ID NO: 653761 - DNA, 213 bp, Homo sapiens
gcctacctcgacatttgcagatgggacgaagatgcagcgcatcttgctcccatcaggatacattgctacagctagcaggatacagagatgatctaaggtggcctcagactacatccaagggacatatatattgggcgttctttttgacagtagcaacgtccatatagcgactctgccagacgttatactatgtctttgtacttgttactttca

SEQ ID NO: 653762 - DNA, 445 bp, Homo sapiens
  misc_feature (23)..(23): n is a, c, g, or t
  misc_feature (32)..(32): n is a, c, g, or t
  misc_feature (49)..(49): n is a, c, g, or t
  misc_feature (430)..(430): n is a, c, g, or t
aagtgtaacccaccaattcccgngtggacttngaccccggcccccactnggcctgccacaccctagaacctcccccgcccgggccctcgctccttccccatctgaaaagtccctggtagttccttgaggtttaccttctcaaatgaaatatttttagtaaaaagtacaggtatatctcggagatattgtgggttcagttccagaccacctcggtaaagccaacatcacaataaagccaaggaagcgcattgttttagtttcccagtgcatctaagtcatgtttacgcatattgcagtccactaaatgtgcaatagcattatgtctaacaaatatacaaaccttaatttaaaaatatttactgttcaaaatgctgacacagaaacgcaaagtgagcacatgctgttggaaaatggtgccaaatagatcttnctgatgccaggctgc

SEQ ID NO: 653763 - DNA, 118 bp, Homo sapiens
catctagaggatcctgtggagagggggtctcaggcaggtaaaaggatggggcacccacagtctctccgcagtgccgcggcccagttggcaggacagctataccttgggtttattccag

SEQ ID NO: 653764 - DNA, 374 bp, Homo sapiens
ctatagaggatcctgcgacgcaacgctggaggagcacgcaagctgcaggtgagtagattgtccatgacaagaaggaagggtagggcctccttcctcccctgcctgagctggttccacctggcacgtgcctgctgcttcctgagagccctggctctccctccagtacttctgtttgtgcccttctgcttcccccattcccttccacagctcatagctcgtcatctcggcccttgtccacactctccaagcacattacaggggacctgattgctacacgttcagaatgcgtttgctgtcatcctgcttggcctggccaggcctggcacagccttgtgttccacgcctgagcgtggagagcacgagttagtttgtag

SEQ ID NO: 653765 - DNA, 1184 bp, Homo sapiens
  misc_feature (287)..(287): n is a, c, g, or t
ggacctgacgtcgacggtggaccctttgaacagcagtcgccctacagtcgctgattccccccgcatcgccctcccgtgcgaagcccagtgcccgcttcgcagctttctcccttctgtctcataacccatgtccactcatgcgagtaatgctaacaccagctgcccgtcttcacagattcaagaacagaggggacaaacgcacagtacagaaactgagtgcgtcgcgagaataggaggatcaactagtggatgctgaggaaagctacatacactggattgaccaagantggctgacaggagcacgagaactcgtaacgctcactccccctgagtgagttgctaccttcttccggttgcatgcgatataaggctgtaatcatactcaggtggcatcttgtagcagttgggtctgtctgattgacctgggctcaaaaggggcgctcatattgggtcagtcacagtgatggtagagagactcacgactcctaagacgtaactccaatggcgtgccagggaaatctcatattttccacgtagaaagaactatggcccgcgcataggatcagacattacatccggagctgggtgttgctcccgtaaacctatgatgtcgcttcctatgggggaggaactcgcaatcgtaagtccccacttcatgttgttgcaatcttgcctttggtgacacgtccaacttaatcaattcgcattctgggtgaccactcccagtatacctagaaacgcaaaggtctgtcgtggccaagattgtgacgtgtcgccgatacccccaagcaattccaattatcctccttagttagggcatgctcccctcatgtgcctcacctggtcgagatgcacaacctgaagcactgtcgaagaggtttcacaagggaaaaatgacttaggacagtggttgattgcgctcaaagttggttaccagaaggaacgttgggatagcatgaaactggtaacaggagcgccagggtggcgaaccgcaacctcgtttgaggcttcaatcccttcgacagagatcccctgattgattggccgattcctttcaagcattcggaggggtaactataactttgatccctgtacctgggggcacttcaggcttacatgcttttgcccgaggaaccaaggatatgcctagcaccccccaggtaagattgctggaggagccaacg

SEQ ID NO: 653766 - DNA, 94 bp, Homo sapiens
cggacgcggggtcgacccacgcgtccggacccacgcgtccgcaccactacaatcttcctaggaactatcaggtaataaaagctttgactccctg

SEQ ID NO: 653767 - DNA, 157 bp, Homo sapiens
ggccccccccccccccctttggttccgggatccaaaaatttttggggcccccccccggttccccttggggtccaagttttccctgttccccccccaccccaagggggttgcaaagtttagttttttgttttgaaaaaaaaacttaattcccctttta

SEQ ID NO: 653768 - DNA, 425 bp, Homo sapiens
ctgacactgtgtatatctctatacgtgctggcttccactcgtgttgtgagatgtggactcgtcaggcatccgaaattgcgacgtgtgctgtgggaccatgttgactgctagcttgcggaggtctgcattgagctgtcctggagattgcggctggtggtgtcctcacttatggtggctgagacaaggtggttcagatccccgtagattgtcttgatcagattcagagtgctgaagcatatatcatagacggcctcgttgtcaatgcaaaatgtctcatcagtattctctaccaactgatggacggagagggtggcattgtagggctcgaccacggtgtcagacactttgggtgaaggcaccacactgaaggtattcatgatgcgatcagggtattcttctcggatcttgctgataaggagagtgcc

SEQ ID NO: 653769 - DNA, 239 bp, Homo sapiens
gtggagctggagacggcggagtgtgatagactgcctaatcaggcgcaactccaccatccccagagggtgcccaagatcgaggtgaccttcgacatcaatgccaaggacatcctgaaggtcacggccacggacaagagcaccggcaaggccaagcaagatcaccatcagcaacgacaagggccgcctgacgcaggaggagatcgagcgcatggtgcaggaggcgaaccagtccaaagcgg

SEQ ID NO: 653770 - DNA, 420 bp, Homo sapiens
  misc_feature (397)..(397): n is a, c, g, or t
gaccttatccccaacaccttctcttaaaacatgtgatttagaaaaatttttttgtaaaaattttacaggcagctcactaatggagatgaatgtgaagattaactttataaagctcctttgcattttctgggtcaccgaatgtgtttatgtgttgtgggtgtgtagttgggatgcttgatagatgccattccatgtgcagaatcctattgacccacataatgtgttatatatatccaaatccatatacatatctatatctgtacacacacacatatatatacatatataaagtattgttgtacaagagcactatggttggtctcttcagaatctgtgtcatttcatattttcagaaagaatacattttaatcaattttctaaaaattgaagttatggntttagtgttgggcgataacatca

SEQ ID NO: 653771 - DNA, 533 bp, Homo sapiens
ccggtctgcacaacaggatgcctgttcatagatcctattgtctctttctttctttctttaagcctctcaatatctcatcttgcaggagcatggtcttcagcagcatcatgataatgggtcccacgtgaggtaaaaactattgtagatataccaaaaattcctaatttgtcgcagaattctgaatcgaaaatcattgtaagaatttttagaccaatccttctacatttccgctttgtttctcagaaagctcataacattcttctgttcatcctttgtatttgactttgctttatttatttaataatatctctgttctctttctggaaacttttcaattttttatctttagatcttaaaatatcaggatgagataccttggtgatataggttttcatttattgtgctggactctctctggatattttcaatctgaaagtgcaagtacttactaccagggaattttcttgtattatttcttccataattgcctatcctctgtttgtatgttagtttgtgtgtgttgtggtgacttt

SEQ ID NO: 653772 - DNA, 1107 bp, Homo sapiens
tatagatgcgcctcctcccttaagagcgttttttagtgtttcagaccgggttttctttgatcactttagcgaggtattcttttaataggccacacttgttgttaagcaacgcggtttttctcccgccaagacacggggggaaataaggtccccaaatgttccccggaaaaattggttcccacaccgtgggccacactcgtgaaataaaagggaattgtctaaacccaaatttaaaatgtttaagccaaaacccccgaacctgggtgacaagactggtgaatttggccacacgtttttaaaatggcctccggggtaaaaagtggcaattagttttttccgcgccgttcttttccaaaaaaccgcgagtgtgcaccgtgaagtttaatacccctatagcccaaaaagtaatgtgttttaaaaatgccctttggaaaagaatctggagtaaccgctcgcaccccacttctaatagattcactggagcctcctcaaaattgtcacatgggcacaggcccactaagtttctacactttaatttgaagagagggcccaaattccctcgctggagagaactaatatccaccctaattgtttttctgaggaattaaagtaacctccttgaggcccgcctaactcgttcgttaattgaataaacaattctgtgtgaaagcccaaggccccgctggttgcccactaggaaagggtcccttggttcacatttcacaccccaatgaaaggtgtgaaacctgaatgtttctcggaatgccaaactcacggctcacgggaattcaattttgtgttttaagttttaaaagcactccctattttttaaaaacccccgcttcaacgtccctaatgttgggaaagtccacaaatttgtctcgctttttcttgcacagcacatcatttccttaccaataactgtccggtggaccaaaatgcaccaattgataatagtttttttgataataaatatacatttagctgccactaaccagtaccaatagcttgttaataggtttaataataaggccgggcgaatactactttgtaacttttaaagtcttaaacttttccaataaaattgagtgagacttataggcccca

SEQ ID NO: 653773 - DNA, 999 bp, Homo sapiens
gatcccagctgtcagcgtgctcacggaatcctacccagtccacctgtcctgtaatggagtgtcagcatccaccccttggttgtcatcgaggtcgccctcccattcctgggtgaaagatatttaggtgccaccatgggctccctctggccccttcacgatagtgcacatgtagacacgtgcttatttattgctaggacactattgagatgttacaaaatctgtaaacctgcgtagatagggtcactgatgttgaggacacgcgttgtgtactgccctagagttgcgtgactacggacagggacgacacttgttgcacaggtgtctctggtgatggggtgtgtatgtgttaaataaactgcacgtcaacaacatacaattacatctgtttgctcgtgaaatatactggcacctactgggcataacgcctttacatgtgtaggtattaccctagtgagggcgctacatgggtacacccacgtctcccggtctcgtctaaagactcctttggaaactttaaatacgcttgcgattgctagacgtctgtgagttcacgccaaaactcagccctcgttagctaagagacatccctcatctcaaaggcccctgagggcgagagacgggggccaatctttctcatacattgggcacggccgttacagtgcacggcgattacctattctcgccttagcataaaacagttctaacgaagcgcactcggcagtcgcatcggtggtctctgcatttcccggcagtccccaagttcttagctcccggcgtagatatgcatctggattgatctggcgtatgcagccctctgggtagcccgggcgtcttatcgcgcccgagtgttttaaccgtggtgcggagaacattctgctgtgcctgggtaaccacaccgtttgtctgaatccaagggttgggtctgcgttaggtacctgacactcgggtttgggtagctccctgtaccttgttgcgcttgttggtcatctatccacctct

SEQ ID NO: 653774 - DNA, 127 bp, Homo sapiens
aacccgcgcgctcaagagcttcgaacaggagttcactcaaagaacaggtggctattgcgccaccgagctgtgttgttagccgactaacaagagcttcgcgatcgcctttcgtcatgctgacttcacc

SEQ ID NO: 653775 - DNA, 159 bp, Homo sapiens
acagatgtaccttctgaacagtactgaattccagcctcaaattagaacagttgacaagagtcacagtgactcatgcattctttcttcaaacaacctaccctaccaaggatcttctttcagctctgttagaacaaggcaataaactgcgtaatgccaagg

SEQ ID NO: 653776 - DNA, 855 bp, Homo sapiens
  misc_feature (19)..(19): n is a, c, g, or t
aaataaaggaagaaagaanaaagaagagggaagaagaaaaagacaaaatctagctttccccggaaaagggtgtcatggggagcacctagagcaatgcagattcatccataatccctttcttttgttcaccaccacccatcatccatctgtgtagtttctgaacagtcagcgattccagggtttaaatagtttgcaaattttcattttctacacactttataattctactcgtgatttatgaacaaaacttttttcattaatgtatatgataatatatatttattcagaatggatctttcttctatttattcatgtcctatctattttatatcagtttccttgagttacgcgtagttgcaaagatcaccgtcttcacctgcgtccccccccacagcctactgccacctgacagagcctacctccgacgtctcattcagttcacatcaccatgctgctttacttgtctattgactatcttcgggttctgtggcggtttgtgcatctgggggttattgttattgcattctgtatctcacgtgaagtgatgaagattattccacacactttattttaatttttttcgttctgttcgccttggtcataatacgtaggtagtacgatcatgacctactacactctttttctattcctccaaccctttcgtcttcgatccttcagacaacccaacaggatcgacacttccgaccgcccccccctcgccccacatcttgccacatcacacatccaccacaccgcatattaactgacatatctcgactgacaacaatcaacacactcttctccccggtgagtcccgcccgtgttttcttcgcatcagtgaagaccgcccggcct

SEQ ID NO: 653777 - DNA, 1140 bp, Homo sapiens
agcggacgtcggccgccatgtcgccgagtgtgggctggaaacagacccggacgcccagcggtagccctcctatgcgcctccgattcccagacatggcacaggtctattacatgtaacatattacaatggttacacctaaaggcatgctctcactggctgaccagcgactactccgtaccatattcactctgcaacatacgaacgcacacagcatggatagtcactccataggctgacagcagtgcgcacaacggacgtgctgaccatagtctaggcctatcctgcaatccacgcactgacaacatgacccaatccagccctctggcacccggagcaccggggcccacctgccagcccactccctggacccaggcccacgcggcaccaagatgccgcactggcgccacaccagccccccccccacccaggaatcctctatgaaagccaacccggaaatcctagagtcacaatccacaccatacaacttacaccttgaacaaccagcccatgaccacccccacatacgcaacacaccccatggacacgcaacaaggactgcgcaccttgccaagcaggcctagcaacgccgacaaacccctacggcccacaacaccccaccaacccccaccacaactcacgcgcatggcaacacagaaacccccaccccccaagacaaagcaaacatcgcaaacacacaccgaagcccacccaatcaaccctaccgcagacgccacacccaccggacggcaaaacgagaaacacaccatccaccgcactatccccccaatggcggaaaccacaccacacacaggaacccagcactacccaccaaaaccgccccacacagcaccaccacccccccgaccaaacccgcgcgccacaacacccacgcccacccaccaccacggcaacaacatagtcataccattactcccccacaacctcacccgcacaagcaacgtacacccccctcttcatactttcttatatatctcccacattacgagcacaacgccacaatctacatcttctgggacaactaccacacaacatattgactaatccacaaccctctgccccccacacctgccgcaatatctcatcaacccaccattcacccatcataaacatcctacacac

SEQ ID NO: 653778 - DNA, 318 bp, Homo sapiens
gacaatttaagggggatgggggggcacgaaggctcatcattcaaaataaaacagagtaaaaaagtgttaaggcgaagattaaaaaaaagtttgcattacataatttacacgaaagcaatgctatcgcctcccatgtgaggacttgggagaggactcggccattctccttagagagaagaggggaggcttttaggatggcaagggacttcctgtaacaacgcatgtcatatttggaatgactattaaaaaaacaacaatgtgcaatcaaagtgctcggccacattgcgaactttgggggatgctcgctccaacaggact

SEQ ID NO: 653779 - DNA, 245 bp, Homo sapiens
  misc_feature (9)..(9): n is a, c, g, or t
ggatccttntgagcagcgggaggaggaacgaggaggattaaggaggaccagtgagggcgacagagagacaccatcctggggaaaagccactccggctgagaggagaagacaggaaaagtgaagtactcacggcttgccaaagtacttctctcaaataaaagaaggggatttttaacaaacctgtccagcttgctcaggccggggtaccgacgctccgaatttcggtaactcaatggttcatagcc

SEQ ID NO: 653780 - DNA, 177 bp, Homo sapiens
cgctcgccacgcgctccatcatcttcacatcggtctcggtgaagttctcccccttggtggtggtggtgaccgtgtgctgcttgatggtgatattgacgcagtcgtgcacgaagttgttctggttgctgtactgatccactggcctgtagtacacttggttagggagcggcacatgcg

SEQ ID NO: 653781 - DNA, 683 bp, Homo sapiens
  misc_feature (30)..(30): n is a, c, g, or t
gcctgtgactgtgaccctgtgggtgtctgnaaggggatttgtgtgatgctcacattaatgagatccatggcctcctctctgggcagtgttgctgcaaagtgtgtgtatggggtcagcactgtgactcctactggcctggtcactatggcctgagctccacccaacctcagagctgccagtgtgagtgacactcagggtgggcccccgcctccatgtcctcctggctctgcccccagttactgccctgataacacacgcacctacccacctcactgcagttccattagcaagctaagagccctaagccttcgcctgcaggtgtgaccccagggttcaggtccctggtactcatgtctgttatccctccagtggtacctgtcactgcaaatgctttgtctctgggcaggacggtagccattgtctggtgaggcttggcccaccttctgatttaaccttgacctttggcactgagcttcttggagctatagccttataatgagtataaggctatagttatcatgactgtggactgagccttgtacttgggtgggtgccgctcactgacttggtcaccagggtcagcatcactttggctagctgaacctgtatatgccctcaggtgggagtttcggaaacaaaagggaaattgattaaacttgtattatacactggaaaaaaaaaaa

SEQ ID NO: 653782 - DNA, 253 bp, Homo sapiens
acccaggcgataacccgagaacacgggcgtacaatagagccatgacccgactgcagcatctcttctggctcccaagcagagcccagaatgtgagaacttcctggatgtaggactgggcagagagtgtacctcaacacaaggagtacttaaacgagaatctgggagtgattctgacctctttcactcacccagtgctgacatggacagcatcatcttcccacagccagaggccgcgcatttggcctgtgatatc

SEQ ID NO: 653783 - DNA, 469 bp, Homo sapiens
  misc_feature (306)..(306): n is a, c, g, or t
  misc_feature (441)..(441): n is a, c, g, or t
ccctaaaggaaccctgtacccatccacattttttcctaacctccccagctctaggcaactatcaatttactttctgcctgtacagattttcctattctgggcattttgtataaatgaaatcatacagtacatggttatttgtgactggcttcttctatttagcataacgtttcagggtttcttcatgcctagcaggtttcattatttcattcattttatcgccaaataacattccattgtatgaatataccacactttacttattcattcgtcagttgacgggcatttgggttatttccatttttnggctgttattagtaatgcttctgtaaacattcaagtttttagtggatatatgttctcatttctgtggattatatacctaggagtggaatttctggatcatatgttaactctatgtttaaccttttgaaaaacaancagactgttttccaaagtggatggacaa

SEQ ID NO: 653784 - DNA, 151 bp, Homo sapiens
gtgtggttcgaagaaatatacaatattattagttctgtggctgatgaatgttataattaacgagatttgtaaggagatcagatatagtagacggtagagttttctttcgctgatagtggtacactgcgattagtggagttggcttatcgag

SEQ ID NO: 653785 - DNA, 201 bp, Homo sapiens
ctggccaacacggtgaaacccggtctctactaaaaatacaaaaattagcggggcggcgtcttggcgcgcgcctgtagtcccagctactcgggaggctgaggcaggagaatcgcttgaacccaggaggtggaggtagcagtgagccgagatcgcgccactcgattgccccactgggcgacagagtgagacttcgactcaaaa

SEQ ID NO: 653786 - DNA, 1093 bp, Homo sapiens
attatgataaaattgctgcaagtacttatgtgcaggatttgaatgaacttaagttttccaaagtgactgtacacttttgatttccactagctatggagagttctggttgttcctcatcttcgacagcatttggtgtgttcaccgtttgtgtttagccattctgataggtttacagtgatatctcgttttaatgtgcaattccctcacaacaaatgattttgagcatctttctcatatgcttatttgccatctgtatatcttattaatgaggtgttcagatctttcacctttttgtatataaggggcaatggggagaggtaaaaagttcccgagaaaattcgtccaataattatgggggggacgagcgagtttatcccgaccagagaacttattgcgggtcaagttatttccccccaagttggtggtgcacgtggcctttaccacaagtccctctataaccggtgtcttttgcacacaaacgagaagagtgttaaatgtacagacaggggagcgaccaccacagtcaaaaatggccaggtgcagcaatgacgacgaagaatggggtcacctagagagagaaaggggggaacccctaaagaaagagcgccgtcaaggtgaacacccgagggatacccccccaaaattttgcgccacacaacaggagcctcaagagggaatacgcaaagtgggtatgagccccccgtaaacactttcccccgggtgtgcagcgaactccacagtgctacaacaagggggccactaccaagacgcgggtgcacataacgacggggacctccaagtacaaatacgaagggacaatgggcggcatagccacagactggtgctaaaagcaacccagaaaaactgggcaaaaggagagaaacacaggacgcagaaaaagcggcgcttaaaaagcccaccaggggaaagaaccaggcgactcggaatatagcagccgcggaaacataaggggcccccagaatgacccagacaaaacggcacacacatcaagggaggaggagagcacccatgcgccgaaagcacgtaccagaacatgcggacgaaacacagggcgcaacgagggacacgcagg

SEQ ID NO: 653787 - DNA, 220 bp, Homo sapiens
tgtccgtgtgtttgaccgtggcttcagtgacacactggtgccttcgggacagacgaggcgcactgcctctcccacggcaggttccttgtgagagacctccctgtgaggtttgggcacacacctcctgctgctctgaacatggaccctgtatgaccaactgcagctgtggtgctcagtgaagtgactggccgtgcgcgtcttcatccttataccatgcacc

SEQ ID NO: 653788 - DNA, 304 bp, Homo sapiens
agcatgaaatatctctccatttatttagttctttgattctttcatcagatagtgttatagtttccccatagagatcttatacatattttgttagatttatacctaactctcatttttgggggtcctaatgtacatgatattatgtttttaatttcaaattctacttgttcattgctggcatataggaaagtaattgacttttgtatattaaccctgtatcctataaccttactgtaattgctttttagttccaggagtctttttcaattctttttgattttctacatagatgatcatattatct

SEQ ID NO: 653789 - DNA, 126 bp, Homo sapiens
ccaaagagatactgtggtctctgcacctgctccagcccctattcacaaccagtttacagcgtggaaactggttgtgaataggggctggagcagtgtgcagagaccacggttatctctgtggacact

SEQ ID NO: 653790 - DNA, 817 bp, Homo sapiens
  misc_feature (817)..(817): n is a, c, g, or t
tcttccttcttttaaaaatggttgtttaaaactttaacaatgggaaccccttgtgagcttgctcagtatcatggtggaaaaccaaaagggcctcttaactgtaacaatgtccatggttgtgatagatattttttgttttttttaaaatataaataattcccaagtgtttttattataaaaaaacaaaaaaaaaaaagaaaatagaaaaaaaacaagacaaacaaaaacaaaaaaaaaaaaaaaaaacaacaacacaaccacaccaagacacggctatcatacgccgacatcgtacttttctccgagaacacacccatgtgtcatagcacccgacacaactatactgctgcaacgagaacctactacctaacgctccgtcacgcactataaaaaagaaccaaacacttgaacacacacgataaacaaaacactaccataagaagcaaacaaaatatcaaaacaaaaaaacaatataataaatatagaaagagacacctaactactctctctacattgtcagcaacacaaagtagtaacatcaaaaacactatcacacgcaaactataacatatcatcaccaaatcaggcatcaatacattacagattaaataccacacaatacacatacatcagattctgtatcctaactcaacaacctcgcacaatgataattacttaccctcatcggtgactaaataaagttcctatatctgacacgtcacgacatatcactatatctcccaccaaataactatatatcctacccaacatcaactcatctcatcaacaaaaatttacccaaatcaagagacacagn

SEQ ID NO: 653791 - DNA, 151 bp, Homo sapiens
  misc_feature (33)..(33): n is a, c, g, or t
gccccttgccacttccaatgagagggggctggnggcaggctcacattggtctgggtggcaaatgaggtgctcctgctccaacccaagaggctttctgtcccaggctgtgtccccccctccactgcccggacgtgctccaagcccagtagag

SEQ ID NO: 653792 - DNA, 587 bp, Homo sapiens
cggccggctatttggtttttgtattttttgggggttttactgtgttgcccaggctggtcttgaactcctgagctcaggcaatctgcctgcctcagcctcctaaagtactaggattacaggcatgggccaccacgcccggccttatttttatttttgagacagtctcactctgccgcccaggctggagtgcagtggtgcgatctcggcttaccacaatctctgcctcccaggttcaagcgattctcatgcctccgtctcccaagtagctgggattacaggcacctgccaccatgcccggctaatttaacgcccagctaattttggtatttttagtagagatggggtttcaccatgttaaccaggctggtctcggactcctgacctcaggtgatccgcccgcctcggcctcccaaagtgctgggattacaggcgtgagccactgtgcctggctgatttttattcttttagttaaggctggttgatattaccttgtgtgtatataccacatgttgtttatccattgttgttgatggacatgtgggtggtttcaccttttggctatgtgaataaagctgctatgaacactg

SEQ ID NO: 653793 - DNA, 553 bp, Homo sapiens
agcgcccccctgctcagggatttggggttctaaaggcgacaaaggcctctcgttcaggggccctttatcctttatgataagggtattctccggcagatccctgaaaagaccctccctgttggccgctctgtggatgaaactttgagactagttcaggccctcccgttccctcccaaacctggggaagggggccccgctggctggaaacctggcagtgatcccctcaagcctgatgtcccaaagagccaaaaatatttttcccagccgaagtgggcgctgggctgttttagggcccgggtgcggggggcacccctgagaacaaacccttttttggatttttttttttcccttaggaaaaccccagacttcagattcagccgaattgtggtgtcttcccaggccggccctttccccccgggggggggaagccccccccttcttcctttgggaggaatggcccgagttggggttgggggccggccactggtttgtatgatgtattagtagagccccccctttatcttttgtggtttggtttaaccttggcctgaga

SEQ ID NO: 653794 - DNA, 642 bp, Homo sapiens
attagtatagatggtagaccagatcgagctagctccacaggatagagatcgtaatcctgcctcttgtggtcggaagcaccgagtgtgctacttctatccgtggtcgtaccttgatggagcggaaggcagattagacatcgaggcttccggaaaacaaaggctgccagctcatggacacggccacactcaagaggaattctggcgcctgcctgtgggtggccgtgaaaaggctgatcctttgctatgagatccagagaacgaagccattccacagagagttcactgagattgtgtggtcccggcagcgtgcagggcctggcggtgctcatgggacaggctctgtgtaggctacccttctgggttctggctgctgagcatcgcaggcggaggggcagcctctagaccgtggtaaatcccaatgacccctcgcttgcgttcctctcgcgactgtcttttgacgccctttgtgctgtggagctcgaaagcgaggagtacctgctttgcttcaggctcgtgggactgtacgtggacccgcaaggccggagggcacgcgcgcaggagctcatgtggcctgcggctcctgtcgcctgtagtatgtatatgttttctgtcgcatatccctgttgctgctttcccaccgac

SEQ ID NO: 653795 - DNA, 250 bp, Homo sapiens
atgcagattcactggagccagacagtgagtaaggcatatatgactattcctctacccactctcacatgtaaagtgtgtattcagtgaaaggctgatcacagactcaaaagaaagcaaacttttggccgggcatgctggctcacgcctatcatgccagcacttatgggaggctgagatgggtggattcacctgaggtcaggcagttcaagcacagcctgggtgcacaaggcaagactctgtctcaaaaaaa

SEQ ID NO: 653796 - DNA, 1395 bp, Homo sapiens
  misc_feature (183)..(183): n is a, c, g, or t
  misc_feature (218)..(218): n is a, c, g, or t
  misc_feature (1245)..(1245): n is a, c, g, or t
ggtgacagtcgtctttaaaccctgcgtggcaatccctgacgcaccggcgtgatgcccagggtaatggacagggcgaactgtggatggtccagacttacttctctttaaggatcatctcacacgtagttggatgagttattccgaaatgatttcacttgttggtgagcagacaattgctgggcntcctaagtcacgtatgcgaggcatggatctccagncaattggtcaccgattccggctggagtgaatgtgacgtggtgtggatggccatggagtgggtgccagaagcaaaccacctccatgtggaaatgtccgccacaaggtccctatgtcccggaaggggggcgacgcttgagcgttcacaccgcgcaaatctcgcaagttacgtccgtgagtgaagctgaaaaatctttggtcctgtgcctttcagaattatttcgccgcgggggcgaaaggactgcctgtgcggtccctgttgtgctgcctttgcagagccaatagggaaagggcacactcggttcgaaccttttggcactggagttccaatgcgtgcaaaaccaatttggtgtggggctctaggggcaccaacagatcacaaaggggtgtggcacctaatggcgtcgggcgtgtgcccccacgtgaattggccattaggggttaaggtcgcgaaggtgttatgggcgacccctcggaatgggcgttgggccataagggctttcccaccgttgcgctttgggccccgaaggaccccgccgaagagaagaaacctaaccgtggggaggttcccttggccgggaatggtcctccccgggaaaggaaataaggaaacccatttccacacttttttaatagtcctcccaatgggggggtattaacttacagggcggctttattgttccaaacctccggaatcgggtttagacccaccagagattcttatccccacgaagtggggggttgggcaaaaccgcccgaaattttgtggcgacgcaaaaggcttcccaccttggtacacggattaggaacattgggcgtggccgaagggcccctctgaggggttccgataagcgagaaaccttgggggtgataggcgaaaccccaccaagagggggtctgaaggcgggcaagggcccccccaagagcaccggcaataaagataccccaattcggggctctttgggttccgttgtggaaaggcgcaattgttcgcgtaccaaaagcgaaatgtccttgtcgcctccccanttgtggcgttcccctgtttgtggaggcgccctgtggggggttccaaaattcccgagagaccaagggggtgggatatgcgggaagccaaagaatcgggggccaaggggggaatatccttagacaaaaaaaagggcccttgtgaaaacagag

SEQ ID NO: 653797 - DNA, 485 bp, Homo sapiens
agagctgactctagaggatacactgccgtactgtatcctacagaaataaaaactaccattagaaaagactctaaatatctctatgcaaataaaatagaaaatctagaagtggggtcattcctgaacacatacaccctcccaagactaaaccaggaagaagtcgaacccttgaatagaccaaaaacaagttctaaaattgaggcagtacttaatagcctaccaactcaaacaagcccaggaccagacagattcacagccgaattctacatcaatattctgttgatgtggggtgtagaggagctggtagcattccttctgaaactattccaaacaatagagaaagagggactcctccctaactcattttatgaggccagcatcgccctgataccaaaaccagacagaaaacaaaatttcaggccaatatccctgatgaacatcgatgcaaaaatcctcaataaaatactagcagggtaccgagctcg

SEQ ID NO: 653798 - DNA, 732 bp, Homo sapiens
gaacagtccgtaatccagaaacctgatctgacggaagaggagactctgcgcacagcagtatgagtccggagggcgagactccgccggaagcattctcgggcgggtgacccaccatggtgcctcttgtaattggattcgccattttatttttcttgctgctaaattaccgagcccggatgattatagagacgtatttctgggatttctgtagacacacccacccacatacatacatttatatatatatatattatatatatatatagatatctctattttatatatatattggatgtatttgactgctgtggactcgaggtgggaggggaatgttcccactcatatcctgtcagggaagaggaggagatgagagactctggcgtgatctttcttttgtcccacttggcggggccagagtgctctctcctgcccacgaatgtgcaaggccacggcatgccggacaatataaccacattttgggaacaccgacaaactcagtcctgtcgctgagcctctctaccccacttcagacggacagagagacagatcacaggtacagggatgaggacacttgcctctaccaggagattgtggagttcatgacattgctgtgctttggggattccttcactgctggacgcgcttctcagccccgcgcttgctggaggattcatgaccagggcggccctcgttactctccctgccttttagtgccacgaggccttgccgtcc

SEQ ID NO: 653799 - DNA, 1421 bp, Homo sapiens
gaaccgcgtaccgaccccgtcgagcacagagcctacgcctattgccgataccgccgcccgtaccacacccgccgccagctacaccataggatagatagataatacgccgcgctacgtacgtacgacaacggctaccggcatagtagcaaggccggctatacgcgggcgacgatagccccccgggccgtactatacccctaccatacgtaggggcgccccagtgcaccagggcgtagataggtagggcatagggtacagaaggatatcctaatagtagggcgacgccggcccagcagcaagacgaggcatacctacaccctagaagtaacctccatacgcagcactggcatacgtacatccaactagggcacgcacataggacgacaaatactagtgcacccaccacctatactaacacatagacgctaagcgtagtagtgctacccggagcgagcaacctccgttagcttagctagacccgcagggctcccccctagcacaccccgaagggccccaacccgccgcagcaagcatagacccccagcatacataggtactgcatgaacccctatacaacacactccccaagtcccatagtaaccgtatggcctaataactccagcggctagctgcctcattccccttagttaaccggccctacttaggcccggtaacccaccttaggtccatatacggcttgcacttcggcggcaccctacccggggcatagcaaccgctgcgtgcctacacatcctccaatccatcctaggttgaggaccccctccgctcgctaacgccaagcgggggctacattagcccccttaacccccctcgacccatcaagccccaaataccccactatggcctctctactcaggcgcaatctccttaacgccccttcgccccaccatggccgcaaaccccttgccaacccttagccaccttcaaccacttacacactcgcccaatcgccataacccctctctcatccctgtcaacgcccctgctccgccacgaccactatacccccccgccccatatcatccatgctccacatcctcctcaactcctgacgccctccgctacctcctcccggtgtcccaccctcactttctccctatatcccccggcatttcaaccccctcccatttcacacccgcgtctcccgaacactaccctccacttccagaccccacttccaccaacctctcctccccaccccctatatattaccacactcatttttcccctcaaacccccccaataactcaacacgaccacatgacgcgcacaccaccacaccaccaccaccattgcaccacttactcacacccaactacaccttcccccacttacaccccccactccgccacaactcaccccctccctaccactcccttacacccatcccacatacccca

SEQ ID NO: 653800 - DNA, 274 bp, Homo sapiens
taggattgggactttcagcctaccccataacctttggggaaaaaaaaggggctgccagttaagttgatccccaatggcttagtttaatcaatcatgcctatgtaataaaacctctgtaaaagcccaaaaaggcagtgttcaaagagcttttggatagctgaacacgtggaggttcctgggagggcatggaagctccatgccccctcctccatacttcatatgcattttttcatttatatcctttgtaatgtcctttgtaataaactgataaaca

SEQ ID NO: 653801 - DNA, 435 bp, Homo sapiens
gccacatggcagtgtgtgacacttccaggaaaactcgcgcacatctttcgcgagatacacgaagcgtctgtcctcagataagatacaaaagtggtctttctgtgttaaatatgggccgcaaagagaattgcgttacacatctattgggaaagcttaaacacgagcacacacttggcctggtgcggggggagaagaatagcctaagaataggttagacacaattctgaaaacgaatttaccttataaagaaggtcatggtagaactgggaaaaggaacaaggtatttttctgtgcaagccctttttgtgacttgcgcgcgtattacatattttagaattattttttattttcgaaacatccacaaaaggaatgcttattagtgagaaaggaagaatttccatttcaacacacttatgaaactgacttgacatcctg

SEQ ID NO: 653802 - DNA, 160 bp, Homo sapiens
gagaaccttgcagacccgagtgtgagggggccaacggggaagggtcgtctagaatttctaaatctaaaagtaggggcccactccccttggggagaattttttgattggcccttgttgaacttgtcaagggggttctttatttctttgggtgtggtaggaa

SEQ ID NO: 653803 - DNA, 903 bp, Homo sapiens
  misc_feature (5)..(5): n is a, c, g, or t
  misc_feature (93)..(93): n is a, c, g, or t
  misc_feature (142)..(142): n is a, c, g, or t
  misc_feature (196)..(198): n is a, c, g, or t
  misc_feature (328)..(328): n is a, c, g, or t
  misc_feature (349)..(349): n is a, c, g, or t
  misc_feature (354)..(354): n is a, c, g, or t
  misc_feature (375)..(375): n is a, c, g, or t
  misc_feature (522)..(522): n is a, c, g, or t
  misc_feature (561)..(561): n is a, c, g, or t
  misc_feature (620)..(620): n is a, c, g, or t
  misc_feature (658)..(658): n is a, c, g, or t
  misc_feature (660)..(660): n is a, c, g, or t
  misc_feature (696)..(696): n is a, c, g, or t
  misc_feature (711)..(711): n is a, c, g, or t
  misc_feature (715)..(715): n is a, c, g, or t
  misc_feature (723)..(723): n is a, c, g, or t
  misc_feature (726)..(726): n is a, c, g, or t
  misc_feature (784)..(784): n is a, c, g, or t
  misc_feature (786)..(786): n is a, c, g, or t
  misc_feature (794)..(794): n is a, c, g, or t
  misc_feature (800)..(800): n is a, c, g, or t
  misc_feature (847)..(847): n is a, c, g, or t
tgcangtagtaacttatagatatatttggaaaactgattatcttttaaaaaatgactactaaacagattaaaatgcagagttcattaaaatanagaggatgcctctggttctctggtattgactctttttgtctactaaganaagaagtctgggctaggctgaaaaactcagaatccagagtctggggtttcccannnctatgctcccatttcccagtactgtgctcccatttcccagtactatgctcccatttccgagtactgtgaactcccctttcccagtactgtgggctcccatttcccagtactgtgctcccatttcccagtnctgtgctcccatttctcagtnctgtntgcccatttcccagttctgtntgcccatttcccagttctgtgctcccatttctcagtagtgtactcccatttctcagttctgtgctcccacttctcagttctgtgctcccacttcccagttctgtgctcccatttcccaatactgtgctcccattttgcagtgctgtnagcccccatttcccagttctgtgctcccatttcccagtnctgtgctcccatttcctagtactgtgctcccatttcccagttctgtgctcacaggtgtnagcaaacatgcccggcccatcagctcttaagcagcaanangccctgcagctggctggctggctggacagcacagtnaagcaggtggctgcntccnctgcagtngcnggcagcccatcttcctggagatgtaaaccctcctgcaaggctggctcttctttgggtntnatgaagangatganagaaatggatgctgggctctgagggtcctggttccttcgaaggacanccaggggcctctgagaagatgggctctggttcctggcctgtagcatgggtaggagc

SEQ ID NO: 653804 - DNA, 412 bp, Homo sapiens
  misc_feature (113)..(113): n is a, c, g, or t
tgctgggtttacaggcgtgagccaccatgcccagccaactggcggtttcttaaaaggttaaacctattcttaccagatgacccatccatttcacttccagatatttacccaangataaatgaaaacatatgtcctcacagtgacttatatatatgaatgttcatagcagctttttttttttttcaacaatagtcaaaaccgggaaaatacaccagcaggtaaagggataagcaaaatagggggtactcgtacaaaaaaatccgggtgggaactaaagggtacaaactagggataaccagaccaagggggatgacttccacaaatataatcctaaggggaagagggtgggcccaaatgagcacatacggaatacactcggttcatataaaactcatcagaactggtcctggat

SEQ ID NO: 653805 - DNA, 301 bp, Homo sapiens
  misc_feature (298)..(298): n is a, c, g, or t
ccaagaattcggcacgaggtctacattcaacgttattgacaagtaaagacttactcttgccattttgctatttgttgtctggttgttttgtgttcttctcttccttcttttccttccttcctgtcttccttttagtgaaggtgattttctctggtggtacgctttaatttcttgcttttttgtgtatatatccatcatatgtttttctcaatttgaggttaccatgaggcttgcaaatactatcttatgacccattgtttttaaactgatagcagtgattgcagaaacaacctaccancca

SEQ ID NO: 653806 - DNA, 953 bp, Homo sapiens
tctggatgtcatgacactctgcttgtatactaactctgtgtgctacttgcccgtgttttctatacgtgcattcggtgtaccccggcgtctcttcaccacttcgggtgccaaacgcccattatcgttttccaggatgtccttagtacgtgttatcgctcagcacactgggtacaatcgttcaacatagacatttggtgggattgatcacgagggaccgcttttatgctggtgttgtcccatagcgcccccggatctaattctgcgaacagctttttgctccccgattttttgagagggtggtgtcacccgcgtccgttctgtgtccggccccattgttgggcagccctgttgcttatgtctcgtccacgctggtaaatcgtttacgacggctcttgttcggagcgtgtggttgcgagcaccaccggcttgggtgggcccaccaggccacccgtgtgtgcggtccctctcgttaccccgatctgtgcttcctgtacgacgcttgttcaaaactctgcgtgaggccgcacgtgtgcgctcgtgacgcagaggcgccacgcttcgggagattcttatcaaaatagaagggggctcccggctccggcgctgggttgtacccccgttgtgtgtcgcagccccccttttgggtgtgccccgattgggcctaatttactctgacgtgctctctggcttcctgcgtccatcactggccccaacctgcctgtgtgcctcgacgtttctctggctccgcatcccgtgcctgcgctcccacgaacttgtttcgccgccgggctcgcaactcagccgcttcttgtcctcgtgatttttgcgcggcgcccctgccacagggggagtttcctgggcgcccggtggcacgcgggtccccgtcgtctgagcccgggcccccacgggccccccgggggggccgcccaaaaagttttctcccaaacaaaaca

SEQ ID NO: 653807 - DNA, 321 bp, Homo sapiens
ggacactgcactataagcgagagttcaagcctctgtggcgagtatgaagagacatcgtacattctacagaaggtcacgcagcgagaacgatgacatgtaccttgatcatcgggcttcctctcaagctagccagagggggggagcctacaggaaggcgtggggtatacagatggagataatggtcacgaggtccagagcacaacgtcccaaagtctcagagcatgccaggcgtgccctttcgtgcttcttcgcacaggtcctatcctgttacgctcgtggctggttgcagcatctgcttggtagggtggagcgtgtagagga

SEQ ID NO: 653808 - DNA, 148 bp, Homo sapiens
ctagaggatcccgtgaccagccagctttcttttgatcagcctgaacggggcaagggggcgatcgatgccaaggtgcacatgcccctcaggagccctggacggagtgctatgtcacagaaattgaccaatggtgatgtgccctgttccc

SEQ ID NO: 653809 - DNA, 237 bp, Homo sapiens
  misc_feature (63)..(63): n is a, c, g, or t
tcttcttccgaatcgtcgactgcagtccactccagagtttctgggtacagtctccaccaaggngcttccacgcctccatcctgtggcaggtcctggcagtgcgaggtcgctgagtggtgacctgagcggtcgtgactcgcaacacctctcccgatagacgtaagagcaccctcgatgcttcgacagccagacatggtcgttggtagcgtggcacacgagcccagggtgcgggggctg

SEQ ID NO: 653810 - DNA, 1223 bp, Homo sapiens
aggatcgcttgagcccaggagtttgacaccagcctgggcaatatggtaagaccccttctctaccctcccccccaaaaaaaaaatttcagtagtggcatggtaggtgggtgcctgtggtcccagctacatcgggacgcttgaggtgggaggattgcttgagcccaggagtttgacaacacagcatggagcaatatggtaagaccccattatctacaaaaaacaaacaagaacaaacacaggaacaacaacgacaccggcgcgcgagacgagcgccgagcagaggaggccacagaagacaaccgaacaacgccggaacacccaggggccgcgacgcatcgacagcgagcacaacaccacacgcttatcacaacccagtcaacttgggatcatatagagcgaatcacaccccatctttcgatagcaaagagaataacaaacctaacccagtacgacgaaaatatctgactaccgccgcccacagtcgaggcgcgcccggcgccgcggggcaacacaaccaacagtaagggaggagctatccagaggggagggaaaagcagcaacagaacagcaaccaccacagcacaacgcggaggagcacagggagagtgtaaagacaaccatcgcccacaaccgaccccccaacattgcccacaccacccccccaccacacaaccaggaggccttacgcggcacccgcggagcagcagatagagccacccacaccgagaggacacacctcaacacacggacgcgcggccaaccaccacccggggagccgatgggccaccgagaccaccgacacacaaaacaaacccaccgacccaggcaagcgcctattctctccccaccctaccttacaaaaacaatccaaacatcaaaacaaaactcaccaaaacaccaacatataaacatcaaaaaccacttaatatcactccccctcatcccaagcccacaccccacactctagcacccaaccacaacctcacaccaccacaccaaatacacccgacttcccctccacactcgcaacagcgacaacacggcaacaccaatagcagagtggcgccgagccaataagcccaccggcgcaccaccacacacaccaccgagcaaggcaccaaccacgcccacgcaccgccacaccacgcgcacagcacagcgccaccacccacgccacaccacgcaccagcacggcaccaccgcacacacgcccacgacgaaca

SEQ ID NO: 653811 - DNA, 317 bp, Homo sapiens
  misc_feature (167)..(167): n is a, c, g, or t
  misc_feature (207)..(207): n is a, c, g, or t
  misc_feature (215)..(215): n is a, c, g, or t
  misc_feature (249)..(249): n is a, c, g, or t
aggcgctctagaggatccttttgggtgctttcacttcccacctgagaaagctaatctatcagagtaggtaggggttctgtgattggctcacggaaatcaggtctaaatgaaactagagaaagatcattctatgagcaggatttggtttaaggcaaaggaacaataanccccttacccaaaaagaattacaagcaattccatactaanccttctanccctggaaagatgtctcatctaaaaggtcccaanaatgaccaggacaaagtggtgatattatgtgacttgaggagaaggaaggggagatatatcatagtttt

SEQ ID NO: 653812 - DNA, 211 bp, Homo sapiens
tgaagaggagctgacccaagtcttctcgggttcttcgtgccaccccctatgcccagcctgggcatctgcccagtcctgctgaccccagcgggttgctgacttaccaggtcttagagaagaacactctataggtgtccacaacctcatgccataagccagtctcacaagagtgtcaggtgtgcaaaaattccccagcaaggatccagcaggc

SEQ ID NO: 653813 - DNA, 980 bp, Homo sapiens
  misc_feature (298)..(298): n is a, c, g, or t
  misc_feature (497)..(497): n is a, c, g, or t
tcgagcgcgcaaaagggcccagaaaaaggggacacaagttccagaagaatgggtaagatgagaaagcaccccgcaaaggcgcacaaatagagaatattgggaagaccggctcgtcaccccgggacccaggggccccaaagggccatctcgagggttctccaaagggtccctttgtttgaagtgagtcttcctgaattgccagaatggatggaaattgccatttagaaaatttcaagctggagttacccgaaaagatgtttcacgggtaaaaaactggcccggactaactgtccactgngcatggggtcttacccgctggagccaaaaaggtggtgtgccactggtgccacaaaaatggggcacgaccacatggagttgtaagcttcaccgcttgagagtgtccaagagactatccgagatggtgtaactttgcttcgttctcgtttctcgtgttggttttaaactaaaataccgccaccacaatcacagagatatcnggagaagagccctctttaatgcctcacagcaccccaacacaggtcccgcccaaatctccggagaaaaagagatgagatggggaaatcacaggagccccgagagagaggtggcaagaccacaatgagactctggaaagagaagtggtcacaataaaattgagattccacgagacgcaattggagaaaagaaactaggaaaaaggcttgccacaatctaatttaatcctctccacatgagatgttttcgttatgagaaagtataaaatgctcgaagaagccccacgtttgagattggggaaagctcactggaggcttcactggtgaaaggcacgtaagtttctgggaaaagccacctcggggaacgagaacacaggtggctaaaagttgaaacgaggctgagtggatatggaccccccgtcccagaatctgtttataagttcagacttcaaatagtggccaaataaaaagtgctatttgtgatga

SEQ ID NO: 653814 - DNA, 595 bp, Homo sapiens
  misc_feature (416)..(416): n is a, c, g, or t
caactttatttggccaagggggtcaatacggttgtgaaacagaaatgcctgaagaactagaaccgactgattcaactgcagcatgcttgggcacctggccacccggaaaggaagggtagtggttatggcttgaacagaccacaggccgtgctagagagaggccagtggctacaatgcgcccacgactggaggtggagccctggcttggagaaaggggaaggcccagccctgtgccgagccccatggatgtataacaccatctcctcttcacaacatggtgaacaccctggcaggatccagaagtctccatttacccaaaaacgcaagagccatgatcagacatggccacactgcaagctgtacatgagtgaccatgtccagtccggattcgtcctgtgcacacagcagactagttnttcctatgtggactgagcgaggtgggacagagaccctgcctgctctaaaggcctaaaaaggccacagacggaagttgtcagatgaggagaaaccttccgcgggagggaggtatcatgacttcatacacggttgctagcgacttggacagactcatgtattaaaaactacatgatggctt

SEQ ID NO: 653815 - DNA, 108 bp, Homo sapiens
gcctgcaacaggttgatgccaaactcctctcaactcatgctcaatgtattagcattcccaagtctcgtttttaccaggaaaagaccctaagaaaaatctattgaagac

SEQ ID NO: 653816 - DNA, 345 bp, Homo sapiens
atgcaagaatacaggcactagccctcagccaggacgatgcaaccgtggccacagcttctgcttttgatgtcgtgatgttatcccccaatgaggaggggtactggcagatagctgcggaatttgaagttccgaaactggttcagtaccttgaaatagttccagaaaccagaaggtaccctgtggcagtagccgctgctggagatctgatgtacctgctcaaagccgaagactccgccagaaccctcctttacgcccacggcccgcctgtcacatgtctagacgtctcggcctcccaaagtgctgggattacaggtgtaagtcactgtacccagcccaaaagcagtt

SEQ ID NO: 653817 - DNA, 222 bp, Homo sapiens
cacgcagtcagtggaatcagtctgctatgcggcctctgccagagcgcatacgacgattgctcactcagagatatcagtacccccgtagagtatgtatctgctaagtcttttgacaccatgacaattcacaaatcaagctttattgttacggctttacagatcttctgccgaagaaactgataggaatcttggatctttccgggtagcgaactgaatctcgct

SEQ ID NO: 653818 - DNA, 674 bp, Homo sapiens
ctatgtctcgatcgttattttctcactacctccccgggtcgggagtgggtaattcgctgtggtgaatggttaaatcagcctttttctagcagaatagccccatactttaagattttggagtgagtaagctcccttttggcttttggacttaggatagttctgaactggtgaggtgtgctcacaatgaggtttcctctaaaggttatttttctgctttcttctgttagcaaagcagtggcggctacaggtggaatgcattggggccatcgacgggttcctgggttaaggattttggatagaaaggctactggtggtcagtggcttcagagctttgcgggctaggccttggtttgacacggacaacaaaagggtatgggagtgttatggggtcacagagaagaccttcaattatcaatgataggtttgaaatttacccgggcttttaaagaaatagggtacactttttttctttactactcctatctttctctttctctctttctttctcctttctgtcttggtagatggcttggggaaacccagtggaaggatgtgcgctcatggcccccatttgccactataggactatgcgcctcccttttatttactcaattggcttttatcctgatctattatgttgttgtagaccagttcccagttgtacatatgggtac

SEQ ID NO: 653819 - DNA, 1108 bp, Homo sapiens
  misc_feature (710)..(710): n is a, c, g, or t
ggaggtggaggttgcagtggcagtgagccaagataccggcactggactctagcctggtggcgacagagacaagactccactctcacaaataaataaatcatataacaaataaacataggtgaaacacaaagttataacagataatacacattcatgcaactgcgaacatacataaaaccataaacaattacatttaaacaaaatttcaaagagagccgggcgacagatggcgttcatgccctggtaatccacagcacaattttgggcaggcacgagtgccaggagagatcaacttgcagccccggagagtaccaagcaccgagcactcgcttaactataactgacgagacgttatcactctactacaacaacaatacaacaacaattagaccagagcatggatggcgatagtgccttgtagattccacgcgtactacacggagagcatgagagtacggacggactcactcagacgcccacaggcggtaggagagagacagtaaaagccacagatatctagcgcacatgagacatcccagacctcggactggacaagagataatgacaccatactctacacaaaagaacacaaacagacacgcacacgaaacaagacgaaagtaacagcaagaacggcttgaacaacgataaaatgcagaacacggatagcagatacgctacactgacctagtacagtccacagataactnaagaggaagagggtcatgacagagcgagacttacatagcaggggtcaacagagattatgaaaaacacaggactggagccaaacatagattgaacaaccaatggcagcctaactacaaagctacacacaacatataagccacgcacaggatgggggggcaccagtaagacaccaagaaacacggcagggctgagaacagaagaatacttgaaacctcagatatgaaagttgacttggagtgagccaaatgtgcaggagcccaccaggggacgatagacacaccgcaatagaagacccacagacagagacacaaaccactacacaagcagatcgcctccaacgccacaggcgaccacagaacaccacaagggacagaacgcacagacagtaggggcaccg

SEQ ID NO: 653820 - DNA, 329 bp, Homo sapiens
atactctagcctcgtgagaccgatcctagaatgccgtagcgcgtacgaaggtatgattctctcataccgtctactagagaaacatgtaccatcaatagctgatatctgacttgcactagggagacttaggcggaggtaatgggagtggtcaggggccatgggctgtcctacctgccgttttggtcacagtgactgccacgtgctcttccaagggcactgcagctggagaacactaactcttcttccaaaggggtctaactggctagttaggaggccgctctggggctgatggattgttgattggtgaatccctggtctacgggtcgtct

SEQ ID NO: 653821 - DNA, 122 bp, Homo sapiens
ctctagagtatcccgctggagaaaaccaagctttggcgtcacattaggtctcacccattagagcatctgactagtatttctcatcaccaagtcagttagattgaaagttccgttgaagccgt

SEQ ID NO: 653822 - DNA, 860 bp, Homo sapiens
  misc_feature (1)..(1): n is a, c, g, or t
  misc_feature (71)..(71): n is a, c, g, or t
  misc_feature (83)..(83): n is a, c, g, or t
  misc_feature (91)..(91): n is a, c, g, or t
  misc_feature (95)..(95): n is a, c, g, or t
  misc_feature (98)..(99): n is a, c, g, or t
  misc_feature (140)..(140): n is a, c, g, or t
  misc_feature (162)..(162): n is a, c, g, or t
  misc_feature (165)..(165): n is a, c, g, or t
  misc_feature (174)..(175): n is a, c, g, or t
  misc_feature (189)..(189): n is a, c, g, or t
  misc_feature (214)..(214): n is a, c, g, or t
  misc_feature (216)..(216): n is a, c, g, or t
  misc_feature (286)..(286): n is a, c, g, or t
  misc_feature (308)..(308): n is a, c, g, or t
  misc_feature (313)..(314): n is a, c, g, or t
  misc_feature (331)..(331): n is a, c, g, or t
  misc_feature (361)..(362): n is a, c, g, or t
  misc_feature (371)..(371): n is a, c, g, or t
  misc_feature (376)..(376): n is a, c, g, or t
  misc_feature (435)..(435): n is a, c, g, or t
  misc_feature (489)..(489): n is a, c, g, or t
  misc_feature (644)..(644): n is a, c, g, or t
  misc_feature (654)..(654): n is a, c, g, or t
  misc_feature (667)..(667): n is a, c, g, or t
  misc_feature (744)..(744): n is a, c, g, or t
  misc_feature (838)..(838): n is a, c, g, or t
natttttttaagttaaaataaaatgatataaagtaatttgaatgttccaaaaaattcaaaacttaattttntgaatgttttanataaatgngaantanntgttcgcattggtaacctgctgctgtatttcatgtcttaanggctattttgaggttcattaanaanatagaaagnnttgaactgtataancagctagattccttaataattagtnantagagaaagcccaaagacaaatattgggcaggaaatcagttctcactgagcccggtttccatgtaaaatntctgttgtggtgggcatagggnggaannatctaaaggaaaagagngtatttttttttttttaaaaaagtttgtgnngggagtggnaaganatctgtttataaattcaaaatatttgatttactgctaaacatcactctgaactttatanatgtgggatactaacttacatacattatatcgggcatatgtccataaatatttntattcttttaatgggaaaaagccattcaatattcaatatgaaagggatcacatataaaaaaaacccaatacataagaaacagcctccaagaacattcaagcagcagtcagagagaaaaatgtttcgacagccaagttttcttcaaaatattatgngacagaatangactcaattcacnggctacaacaattcatagaatttttcaatgttttcttgagatgcaaaagttcactgttgcagtgttttcaaatgacnaatcaagtactacttcttggttaacaggccacgggtagagtcatctgagtgtagagaatgtccattcactgctggaaaaatccactggctccanagaaaagaaaatggtctgaagc

SEQ ID NO: 653823 - DNA, 161 bp, Homo sapiens
  misc_feature (56)..(56): n is a, c, g, or t
tgccgaccacaggagccaagccttttcactgtgtggactcatgtgccaagcttagncttggtacccaggcccttaccacggtgaccccagccaatcgggacagttcaaggaggaggagaccccttattacacaggttggaataaaatatttaaatctcgta

SEQ ID NO: 653824 - DNA, 646 bp, Homo sapiens
cgatggtcctcagtctaaggtgatcagtcaacatcaacagtgataggtcatgttgacagtacgtaccccgtgatgtgatgtaataggaatggtcctttacctctgtggtcttcctccccgagacccagaacccagtctaaccatgagaaaaaacatcagccaaattccaacagagggacgttctacagtatccctgaccagtactgctcaaaactgctaagattatcccaaacaggtaaagtctgagaaactgtcacagccaagaggagcctaaggagacatgacaacgaaatgtaatgtaggatcctggatgggattctggaatagaaaaaggacactaggtcaaaactaagataacatgggctgggtgcagcggctcatgcctgtaatcccaacactttgggaggccaagacgggcggatcacgaagtcaggagatcgagaccattctggctaaccacggtgaaactccgtctctactaaacaaaaaatgcaaaacttagccgggcctggtggtgggcaccttgtagtcccagctactcgggaggctgagtcaggagaatggtgtgaacccggaaggcggaacttgcagtgaacgagatcacacacaccctgcatgggggaagaggagatcgtttcaaaaaaga

SEQ ID NO: 653825 - DNA, 339 bp, Homo sapiens
gatatcacatagtatgaatgatgccacgttcacaggccccggagccgaggacctagatactctagaggctaaataatacaccgtgtggccgggcgcggtggctcacacctgtaatcccagtactttgggaggccgaggtgggcagatcatgaggtcaggagttcgagaccagccctgaccaacatgatgaaactctgtctctactaaaaatacaaaaattagccaggcgtggtggtgcacgcctgtaatcccagctatgtgggaggctgagacaggaggattcctggagcccaggaggcagaggctgcagtaagccgagattgtgccactgtactccag

SEQ ID NO: 653826 - DNA, 717 bp, Homo sapiens
agcgggggcgcccccggcggcgtgtgaatggcggcctccgcggcggcagcctcggcagcagcggcctcggccgcctctggcagcccgggcccgggcgagggctccagctgtgcgggcgacaaaggcgctccagacgccccctttcggcgcagcctcggccttctgccctcagccgcggcgtcgtcgcccgcggggggcggcgccgaggcgcttggagctgctggagcactgcggcgtgtgcagagagcgcctgtcgaccgagagggagccccgcctgctgccctgttttgcactcggcctgtagtgcctgcttaggggccccgctgtgccccgccggccgccaacagctcgggggacgtgggggcggcgggcgacggcaccgttggtcggacttgtacccgttgtgcaagcaacagtgcttctccaaagacatcgttggagaaattatttcatgcgtgatagtggcagcaaggcctgcaccggacgcccagggatgcgaaccagtgcttgaactagctgtgaggatacatgcccaggcaacaggctacagtgtgaagtgctcggagcctctgagtgagacctgtgtaagaggcgcaccaagcagggtgacagtacaccaaggaccatacatgtgcgctctactgggagccaagcaagacctcggggattggtgaacgtactggcatattgcaacgtacaccaaggcatgaaccccag

SEQ ID NO: 653827 - DNA, 1315 bp, Homo sapiens
  misc_feature (272)..(272): n is a, c, g, or t
  misc_feature (463)..(463): n is a, c, g, or t
  misc_feature (552)..(552): n is a, c, g, or t
  misc_feature (576)..(576): n is a, c, g, or t
  misc_feature (579)..(579): n is a, c, g, or t
  misc_feature (626)..(626): n is a, c, g, or t
  misc_feature (724)..(725): n is a, c, g, or t
  misc_feature (731)..(731): n is a, c, g, or t
gagaacacaaagaaacgcactttcgtggcagccgatcgggagatcctatcaagtgccaatgctggcccgagctctccgtgtaccggtgtgggtctgacaagtgcccccaatgatttatggtacgaacttcattgaactgccctaccacggggaaagcaatcgagcaatgcttgattgcactgcgcgacgtgcagagctccattccggcttgtctgccatctatcccacacatcagcaccaaaagaccatagacatgctggtatgagctatcnatggtgcccgaaggagtggtgctaggtgtagatccatgccggcaagatgcacagctgttaggcacagaacaggactttgccaggagtccgctgaaagttctaggtcattactggacatgtaggatatcatcaaaggcaaattttgcaaaaataacaaggtcagaaaacctccatgtttctcatatcttgcnaaaagcaaaaattgaagtcagtgaagatggaaccaaagcttcagcagcaacaactgcaattctcatgcaagatcatcgcctccctggtntatagtagacagaccttttctgtnttncatccgacataatcctacaggtgctgtgttattcatggggcagatanaacaaaccctgaagagtatacaaaagaaaccatgcaaagcaacgactactttgctacgaagaaagactcctttcctgcatctttcatagttctgttanntatttngtacatcgcttctttttcaaaactagttcttaggaacagactcgatgcaagtgtttcctgttctgggaggtatgggagggaaaaaacaaagcaggatggctggaacactgtactgaggaatgaatagaaaggcttccagatgtctaaaagattctttaaactagtgaactgttacctaggttaacaaccctgttgagtattgctgttgtccagttcaggaaattggttggtttgtctatatgtgcggctttcagaagaaattaatcagggtgacagaaagaaaaaatgtttatgggtagcttaactttttagtgacacaaaattatttgcttttaattctttcccccatcccctccaaagtttgatagcaagcgtaattcggggtagaacgggaattccaagctctagggtgtagagtagtgtgcggggtatatatgtggttcctaaataattaggatctggttgtaaaggtgctgtggagggcttccacggtgagctggaaggttggttggaaggaaaagggggggaaaaagcttgtttggaggaaaacaaaaattgggggaaataaatgggaggagaaaata

SEQ ID NO: 653828 - DNA, 858 bp, Homo sapiens
caattattctaactttatctttaaatattgctagagcatctcataagctaaagtgctttaatatatatacatctgcatacatataaatatacatacatatacgtatgtaattactgctgaaaacaatcccaggagagagattttcacattatgtgtttctgggttacaaaagaaactggagcatggcaaggttaagtggttgtcaggtaatcgcaagcagagccacgaatcagatatggtgatgtaggcagaatttgttctgctcacttgtagaggttgtagactgtcctgggtttcagtctataaaagaagtcatgactttggaagtaggtataggtatcacaaaggatttgggtaggtgagagggtgtcacaggaaaaaatgcaggagtcagcctgtcagggtctcctctctctagcacagggtcccctctctctaggtcactgctccagcatctgtatttccaagccagcctcatgggctaatgaggttacctctggcttgttcctatccggtctcaggcagcagagactcagctgggagaaagttttaggtttctgctctaacacctgaaatgagttctgctcactgctcttcacccataccccattatcaagtcagttgaaaccatcaaatagaaaaagctgccattatcagggtttatgcttataaatacatgactttaaaaggaaaacacaaaagcatacacaaaaatggctgatagtatggtaaaagccggcagaataccaagagtaaaaaatgagggataataggccttcttctggctcctaatttcattaccagaaaaaagaaaaaaaaacaatatatgcgaggatgggacgagaagaattttaacaa

SEQ ID NO: 653829 - DNA, 226 bp, Homo sapiens
gcacacattgccttctttctcattgggtccagcaataaagataagtgtttgggtttttttttttccctccacaatttagcaatttctaaggaatacagtttatatctcctcctatgctctccagtaccactatttatgcggctactttgtccaggccacaaatcccgtgcagttactaactaaccccaaaaactccttaatacagtttgatttaaaattagatatt

SEQ ID NO: 653830 - DNA, 324 bp, Homo sapiens
  misc_feature (31)..(32): n is a, c, g, or t
  misc_feature (135)..(135): n is a, c, g, or t
  misc_feature (165)..(165): n is a, c, g, or t
  misc_feature (174)..(174): n is a, c, g, or t
  misc_feature (264)..(264): n is a, c, g, or t
ggcttagtgggaagactgagaatacaccggnnatatagagacccacaccggtaaaactgagaccacacccggcaagacagagacaacaccggcaagacagagacaacaccggcaagacagagacaacaccggcangacagagaccacaccggcaagacagagacnacaccggcnagacagagacaacaccggcaagacagagacaacaccggcaagacagagacaacaccggcaagacagagacaacaccggaaagacggaganaacaccgacaagacagagacaacaccggcaagacaaaaacgacaccggcaagactgaaaa

SEQ ID NO: 653831 - DNA, 226 bp, Homo sapiens
tttcagcttcacttcttcaagcaccaccactgagaccttcacacagtactcctggcttctcttcttcaatcgccacctccaagaccacctcaaccagtcctcccagattcaccttgtgatcgccaccaccaagaccacctcacacagtactcccaggtttacttctgtgattgccagcaccgagaccacctcacacagtactcccagttgggcacacattatggag

SEQ ID NO: 653832 - DNA, 99 bp, Homo sapiens
  misc_feature (60)..(60): n is a, c, g, or t
  misc_feature (70)..(70): n is a, c, g, or t
ggagcacacggaggagggcctccggagcgacttgccgacgccatggccgagtcacctagncgggacgtcntagcatccggaacagaactttagcgagag

SEQ ID NO: 653833 - DNA, 236 bp, Homo sapiens
tatgagccggaccagcggctgattagttcttgaaaagtgatgaagatatctacaattaggtataggtgatggtgcacaacgtcgtttaaatatactaaaaaaccactaaatcgtacattgaaagtattatttaaaagctggttttaaaaaaagtttgcattgatctaagaattgctcccataccttgtcaccttggtttctctgctcatatctttcctctacctgaaatgcacatc

SEQ ID NO: 653834 - DNA, 1216 bp, Homo sapiens
gctcgtgcctctctgtgacctagccctggctactcgttcatacatatgtactacgtgatactacagagacctcgcatgatgccacgacttccgagtgtatgtacgcggtagcactcgactgcgtagctggccactcaaagttcgccgatagtggcgattcgtcggtcaagaggctcgttactcaccttatccctatggtagtgcctcgaagacagaggaatatctcttgaaagcttcctgaaagcaggccaatgctaggaggcgaagaggtcgatcgagcgatctgagcgatcacacgcaatctgttccagagcacgttctttcgaagctcatgctcgcgcaagcccctatcgggcagcacgcaggaaccccgcggaggtattagccactcctcgatgctaaccccaaaaaggctaatacacgtacacaccggaagagcgccagagctactgtcacaattccaacgccccaggcgtggacccacctgtgccaagtccatcctttacattcattgggggccacccccactgtgggggcacgtatgcacgagggtgcatagtctatggccgaggccaacacgttaaactgtaaaatccccgaaagcggatgcgtggcccatcgacgatcaggtgggaaccaggccttctactttcgagaggtcccgttacacaccggaaagttggtcctcacccaagaatagcaaaagggcgcgaagttctgtgcagtgccaatccgtacggcgcccgggcaccgtgggagctgtcggatagcggcctaggctatggaatggcatgttcaaactcccagcgcccagtcggcaacggggaaaaccccgcgaaaggccccacgtgcaatggggccatgccccatggggcacccccgtaaagagcgccaccgcaagcgttccataaccccatggggcaggccagacacaactggctaagccaaaagtgacaccacttggaaattccgttggggaatcgcacccacttgggacccaggttaacaccctagaggcctaggcgaatcggaccccccttggaatgtggaagggacactggtggtccccccgcacacaggtagggccaattggccacattgcagaggttcgaagcgccgcaaagttgacccaacgtgagggaaagaggggggcttaccgaaagaagggaacggaccagagagaaccggggacacattggtgggcgaattcgaaaag

SEQ ID NO: 653835 - DNA, 952 bp, Homo sapiens
agcggagctggcagtgagccgagatcgtgccactgcactccagcctaggtgacggagactccgtctcaaaaaaaaaaaaaaaaaaaaaaaaaaaaatccccttttttgtttgaatattggaaaattgcccctttggttatttttaaggcacttgccgtgattttggctctggaaaaatggtggaagttgaaaacttatttaaaaccagtattttattacccagaggctctcattttctttccctggtccgcttacgtgcaaaggacaaaccccgcacaaagaaagacttcttcaggaaatttgctggcgtgaattgacagaatgtgaccttgtgattaaagtgaagactttcttctcaacattaccttgaatgtgccttagaaccattcttcttaaattattattcatgaaatattacaccgttgttgacccattgaacattcattctcatctcatttttcccattcaaacacttttttgaaaacattatccctgggattctcatttttattatagaagcctttaatattttctcccacattcttggcagtatcccctatagaaagtttctatcacaggataaatttaaccctttttatttcgcttagaatttggcggcagagaggagaccttttcgccctataaagggctctccctttattatttaacaactctcttttattctccagtagaacatcgcacatttttaaaacactatatctctcagggtaaagaaagaccttctctttataaaacactatttgcgcacgcgccatatagggctctatatttcgggacacagattggggatttttcccaataaatagcggcccagcgagacagcattcggcgatctatttctaacacatatctcttgcggccattcccgggtatctaacgacagcacggggggtttttttggggttaaccccctttattttaattaaaatgg

SEQ ID NO: 653836 - DNA, 320 bp, Homo sapiens
tcgtcttgtgtgtgtgtgtgtgtctttatgtcttgttgctatttcttgggccactcctgaggcaaatggagggtcccaggcgaggggttgaattggagctgtagccgctggcctaagccagagccacagcaacgtaggatctgagccatgtctgcaacctatactacagctcatgacaatgctggatccttaatccactgagtgaggtcagggatcgaacccacaacttcatggttcctagtcggattcgttaaccactgagccacgacaggaactcctgtttttggggttttttagggccgctgctccgcttttgtgtt

SEQ ID NO: 653837 - DNA, 160 bp, Homo sapiens
tgccccgcgcaccttggcaatcttctcactatttggctacatagacgaggtgtgctcttttagctagtttattaggtagctcgtctggttgcgggggtcttagctttggctctccttgcaaagttatttctagttgattcattatgcagaaggtataggg

SEQ ID NO: 653838 - DNA, 952 bp, Homo sapiens
tgttgtgcccctctgcttcttctattcgttgtactacggtcggtgcggtgactgttcatttccctcgttcgctggcttgtcgttatgttgactgttccacggggctctcgatgttggcctctccgctgtgcgtcacgtggccttttcctttcggctttggggtgctctcctgctcggtattccttgcggtctgcctctgtaacgtgcttttcaacgtgtctatcctgttcgggatctcgtttggtccttctaggtaagtgtcccccgtgagtgcgctctccctatgcttcgcttctatactacatgatcattggcttttactgctctcgcctatgatggctatggatcgactgttgtcttgggtcctctgacctctacctcgaatcctttttctagagtatacattatgatgatcatccgctcaccatgataccttagtgatttcatgtgttgtctggtttgagcttgccctctccgaatatcctaagcctagagtatgctactattccctcggtccagtctctagccttactagtaccataaagtgattctcttgagtgtgcctagggttaaaggcttccagttgctagcctctagttattttagacaatctcgcgatcgttaatttcttagcttcctgtgtctaatataattgctacggctgtacctttccgtgtcagaaataaactcaaggctctaatatagatgatgttcccttctgtaactccgctagagccatcaggttctcattccttttcacacagtatacttctcacaagtcagatttctatgagttgtgatcacctgatttttttaacaatatatttctaacgggaatgggtgggagtgtctggtgaaaagaggtgtaatgtgggttgtatgagccaatcatatttgtgaatttataaaaaaagtttaaataggaaatatctgttctgaaaccccacttaag

SEQ ID NO: 653839 - DNA, 827 bp, Homo sapiens
caatagatacttgccgcgaagtttgactcttaaaactaggcggcatatggtataatacgccgtcacactcattcttcaaccccgctgactaaaacacactagcctaccccttccttgtactatccctatgaggcatatattagtaacaagctccatctgacctacgacaaacaggacctaaaatcgtctcattgcatactcttcaatgcagccacatagaccctcgtagataacagtcatatgctcagtccaaagccccactgaaggcgtgtcaccggcgcagtcattctcataatcgcccacggacttacattcctcattactattctgctcaccataaacgcccgcttatctctccttgcaaaaaaaaggcttcaagggccttaaattttttctccacaaatatttgtgggggcagccgattagacttctctagcaacgtctcgaataaccgcgtctataacaccacaatataaacactagtgagaaaactacgggagaagaaacatctctgggtgcataggtaaccccaatgttcgtcggtgaaccagagaatatcacctctccagatcttaacgagaacataagaagggacgtacgaaacaatacgtagaacacgaagccataatatacccctctatagttgttttaccacacaacaaaggggggtcaacaaaacacacaccaatataataaacataaagccgtcataagaccgtgagacaaacgagaaaggtccctcatgctgtcattcactatccacatttcctactatcatcagccgacgtacttacgacgggttcctcctaaaacacaaaaaaaaaaaa

SEQ ID NO: 653840 - DNA, 1024 bp, Homo sapiens
cgaaagcgaagaaggaagctcctgccacctccgtaaaggctgaagccaaagcgaaggcttgagaggccaagaaggcagatgtgaaagggtgtccacagccacaacaaagaagaagatccgcacgtcaccgcagccttccggcggtccgaagactactgcgactccggagacagcccaaagtatcctcggaagagcgctcccaggagaaaacaagcgttgaccacgtatgctatctatcaatgtttccgctgacacactgagtctgccatgaagaagatagaagactaatcaatcacacttgtgttcattgtggatgttaaagccaacaagcaccagattagacaggctgtgaagaagctgtatgacattgatgtggccaaggtcaacaccctgattcggtgagttgggcctcaagggatggggagcaggctaggaccagatagtctggagccaaaataaaaagcttggattaccatgtaagcttttgactgttcatggtagtcctggtaatgcaggactacacgtgtagtccgagctatgcaggaggatctcgttgaggccaggatatcacccgaggattgccccgattgtactcctagcctgagcaaccggatgcaaggccctgtatgaaatagtaaaacgaataaaaaaattccttggactttacaaacagggggaaaaagggattgctttgactttagacactgggtagttaagtgtacacagtagttggtaatactcatagaaggaatgagaataacaaggatagcttgagaatattcagagaccgtagtggaggggaacccggaagctggcacatagagaaccgtgcgcacagcgggcaggacattgcacaccccctcacaataaaccaggggacccccctaaccacacacaataggcgaacacagagaacaacaaccaatggcaaaacccaagttgttacacaaatctcaccccggcgaaataacaccctcatcaacatcggttcacccttgaggggaggaacccccataaacaacaa

SEQ ID NO: 653841 - DNA, 749 bp, Homo sapiens
aagacactgtcttggctcacttatacagcaagtgacaaccaatttagttcagacctttcttgcttctagacctgcaccatccactcttatccacttctcattcttcctggaagctgccacggaacatgcagacccccgtatccactttgccagtagggacacccacttttgaaaagccacggacccctggcaacgcagctgcagacataccatttaactcaccctgcctggaaaaggaaagtaaatgttttcttcccaatttttgctagggaaatccaggcacatacatgtattcagtaactcaatgatataaatttcagggcttgtgtctgtgtgttattggaaaagcatttgaggctggctgtcatggttcatggctgcaatctcaacactttggaggctgaggcaggaggctcacttgaggccaggagttccagaccaggctggacaactctacctctacaaaaaaataaaataataagccccgcatggtggtgcacacctgtagttctagctactcaggaggctgaggtgggaggattgcttgagcccaggaattcaagctacgctgagctatgatcacaccactgggcctgggcaatggagtgagattctgtctctaaaaaaaaaatgctttgagaattttagcaaatctaagtacatttggagtctgctaatattactgtatatgggatctggtgggaccatccctaaggatttaataataaaatgtccctttatattgttga

SEQ ID NO: 653842 - DNA, 174 bp, Homo sapiens
ggagtagtcaagtctcgttggttcagatctcgtcgcgaccatgtcctggactcggtccatgagtctcccccagtgtcaagatggaatcaaatccatgtcgcgatcgaagagtacccccaagtctcctgaagatgaatgacggtgtctcttaagaaaatggtaatgtctgtgaat

SEQ ID NO: 653843 - DNA, 234 bp, Homo sapiens
actcttaggatcccccaattctggctctctgggccacaaataaacacagaaatagtccagaatgtcacaagtcccaggcagaagaccaacatgggcattttgtttattaaccaggggggtcttaaaagtgaaccgcgatcaaaaggccaagaaattctaaatccattgaaacaagctctaaacaatagcatgcagtcccaccacttgtaccaacattcccaaaaaacccgaatt

SEQ ID NO: 653844 - DNA, 136 bp, Homo sapiens
ttgaagttctcaatgtagtgtagagatctaaactcatacttaaagggggtcatactggtgattgtggacacagcctagaagagacaaagtataacgtcactggatagcgcaggtatagtctgcgcattggcagaag

SEQ ID NO: 653845 - DNA, 607 bp, Homo sapiens
gaatatcgacaggcttagtctccaccctcaggcatggaaccattcagggtgaagcctggtgatgtgggcacaggagactcaggctgatataacaataacaacatcagtaataagagaagaattataaaacctgttgcttgtctgaatagatttgagcaacagtcttgcttctgttagaatcctggagccgttatgtcctgaatattcttctggacatcattgctggctggagaagggagccccaggcccggctcggttgacatctgtcaggtatggaagtcctcatccagctgcctgtgcttccttgagagatccttaggggctgcttgggagcatgcctggggctggtgatctggggcgactcacagtttgggaattcatcccccaggggattggaacagctccctcgggtgtcttgtcgacttttggctggctcccccctgccggaagccgggaagcgatctcatcgaaggtccggcctttagactcaggaactttgaagtaggtgaaggatgaagaacagaatccaaggagcacaggtgaagatattacgatgtagggacacacagttgcctccaatagtggagcacatcccacaatgaatttg

SEQ ID NO: 653846 - DNA, 187 bp, Homo sapiens
ctgccctcaagggtgtgtatatggtataggggcaactgtatgaaaaattggggaggagggggccgggcgcggtggctcacgcctgtaatcccagcactttgggaggccgaggcgggtggatcacgaggtcaggagatcgagaccatcctggctaacatggtgaaaccccgtctctactaaaaataca

SEQ ID NO: 653847 - DNA, 445 bp, Homo sapiens
cacagggtgcagagatgatggatatctatgtgcaacagaatgaagttgaactccttgcacaccatatgcaagaagattaactcacaatgtaccaaagacttagctgtaagaactataagcatgttactcctataagacaacagaggagtaaatctttctaatcttggattaaatcatggtttcttagatataacactgattagtcagggttctccaaagaaaaaaaccaaataaaatacatacagacatatcagaggagatctactatgggaatcggctcactcaattatgaagactgagaagtctcacaatatgctgtgtgcgatctggagacctaggaaagctggtggtgtatttcagttccagtctgaaaacccgagaaccaggggagtcacaggtgtggcttctagtccaagccctaaagcctgagccctgtggacgagta

SEQ ID NO: 653848 - DNA, 549 bp, Homo sapiens
gttacaagatatactcatgcaggctagaattagaaatcaaagactgaaagatctttcaggcacctgcagcaagagaggagtcaaaacctatgtactgatctcaactagtaaaattttctccttggccaggaatcatgctgagttgagggacagaaatgcaccgtgcagcctgggaaagtgttcaacacacaaaaatagaaccacctgtatgtagtcttttggaaagcacaaaataaagagcagtcctacagggttcactgctatgtcctgaatgttgatgtcccttccaaaattcatatgttggaacctaatgtcaatgtaatagtattaagaggtggggcttttgggaagcaatggagtcatgagggcttcaccctcatgagtaggataagtacccttacaaaagaggctcagggaggcgctcttgcctcttccaccatgtaaaggacacgtagcaggcacccatttctgaagaatgggccctccccagactccatatctgctggtgccttgaatctaggacttagactctaggactgtgcgtgacat

SEQ ID NO: 653849 - DNA, 114 bp, Homo sapiens
  misc_feature (1)..(1): n is a, c, g, or t
ntgtctacttactacgaaccctgacactactttaacgtactgggacgactttttgcctgactacttcttcacgtcttgtcactcacctacctgattaacgctttgtaactctac

SEQ ID NO: 653850 - DNA, 521 bp, Homo sapiens
ggcggggcgcggtggctcacgcctgtaatcccagctctcagggaggctaagaggcgggaggatagcttgagcccaggagttcgagacctgcctgggaataataggcgagaaccccgttctccagaaaaggaacaaaacaaaacaccaaagggacaaaaaaaaaacaaaaacaaaaaaaaaaaaaaaatttgttttggggcgcgccttgcgggccctgaaaaaaagtttttataaaacaccactttgtggtgggggggcgccgcgggccccccgaaagggggaaccgggcgagcacttggggccaaaaccggggtggacccaaaaagaaggatccgtggggcacaaacggctaagtggcgtgggttcttcccaacccaaataaaaaaaaagggcgcggggggacaaccggggtgctgttggaagcaaatccccagagagggtcgcggggggcacaaagcgggctgcaacaacaaacggggccaccagagaaggctcgagaaaaattagcccgaggcgggtgg

SEQ ID NO: 653851 - DNA, 503 bp, Homo sapiens
gctagagggtccgagatcgctaacattaggggaactatggtgtcttcacatcatccatttagcactatttataataagcacaccaagttatatgactaagtataagttgaaaattttttatagctgaggggttggtgataactctagaggatgtaatgttagagatacgtatctctaacattcagtacagatgaaataacgaatagccgaggtcccactggccgtgatccaaaatgcagtggtctggttccactaggaagtaaactacattgtcctaataaaatgtatttcttttcccgttgaactgggtgatttccttgtaaatgatcaataccatctcaaagaagtatatttacagttaaagtggctaatgactcatacttggtttttgagaatggttcctttaccatcttttcatggtctctcaactttctatcatctactttaagaatttccagtgcctcacatctttattaacaaagtattacaatccaggaatgaaa

SEQ ID NO: 653852 - DNA, 132 bp, Homo sapiens
gaaacttagtactcatatacataactaatacgaacttaaaattcatcatacatttacttcatttttatagcttgaccttctagtaaatcttaagcttcatatgatttatggctagctatatacaggagatcc

SEQ ID NO: 653853 - DNA, 222 bp, Homo sapiens
accaccctatttcacaacatccatggatattgtgcaagtcagaatgtcgcaagacttagtgataacagtgggcctgtagctcaagagaagagttgacctctgagacatatctagaaattgtctatcgtgctgttctagcactatatgtgggtgcctgtgcagtcctttcactaccgctatgaagaagcgcaacaagaaactcaatgcacaacagagtgattt

SEQ ID NO: 653854 - DNA, 192 bp, Homo sapiens
ccctggatttaaccaagaaggtctgtggcgatatctgtgcatactaaccattctaaagccttatggcaacagggatttcgcaacgtttcagatcctccagagagcatttgccgtgactccagagccacaaccgacattccccatccgactttcactcacttcctatgctccatccatgggcatcgtccaaca

SEQ ID NO: 653855 - DNA, 582 bp, Homo sapiens
attggacaatgtccctgaccccatgagttcaatactgaaggtgtcaaagtggtctatttgcccccagacataacatctctaaatcatcctctagatcagggagtcataaggaccattaaggctcattacacacagtactttatggaaaggattatctaacactatgcaagagaaccctgatagaacatcatgaaagtctggaaggatcacagcactgaagatgccatcgttacacaaaaagctgtgaaagcatcaagcccaacacaacacactcccctgctggaggaaactgtgtccagatgttgtgcatgacttgacaggatttacaatacagccaaccaaggtaatcacgaaagaaatcatgaacacggaaaaaagggtggtgagtgaaggctttcaagatatacaccttggagaaattcaagagctaatagataacacacttgaggaattaacacaagatgacgtgatggagacaagtgcttttgaaccagttccagacgataaggaagaccacccccaaggagtgccacaaaaacacctggcaaaaggttttaaatatttaaggctggatttgacttt

SEQ ID NO: 653856 - DNA, 251 bp, Homo sapiens
ttaagtactctggaaggagcgatgaaatcattaatttctatttacagccggagccgcgggcgcagcatcgttggattatagtactgaaaaatcatgatacaaaaataggaacctgtggatttcattgttggtacagggaacaaaattgtgttgatataggttatgatttgcaagaagcattttggggacagggaataatgtcagaagcgctgaaagctatcttgtcattttcctttaaaaatatgaaagtt

SEQ ID NO: 653857 - DNA, 936 bp, Homo sapiens
ggtttctcgctccttccgagttaccgccgccgtcgccgcgctcctcctctcccggtcctgggtttccttggccgctgcggccgccgtccctctgcgacctgtatgaggaggaggaggaggaggatgtgaagatggggagtgcaagatgttgtggaagaggaaaatcccgggggaccgccgggcctctttcgacagctacacaattttgaactgggtggcgattacgtgcggagcaacaatactataccagtcaagcaagataggctagaagagccctagaagaaaaccaaagagcgttaaccaagcacaatcctttagcactggtgttgccctatcgtgataacccacccttggcaaaccaattgtcctgcaacgattgttggataatccaggcatccccagctaccgacggatgcactctccaatcaattcaatattgccaccgaaggcggtgtgatattcaattaagcgcagaatgttggcacagaagagacaatggtatctgggactaccaataaaaaccaccttccagggaacacattaagattatgccccagcccaaacttggacacgaccagttctgtctttatgcaaaaacaaccctatggagctataccattctagatgatatgccatcggagaacggggacgacccagacaatgaaactgcgtgggttgctgggtacaccacctcaataagaagcccctagtcctcttttgcagggaacggacccttgggggcacccccttattcgacatggaggcgagggtctcagtggaccaatgtatgtcataccacacgtatatggtcctcggaaagacctggaagagttcggagacaaaaccacatcgcggcggattgcgccccaatgtgggccacacgacaggctggggcggcttgcgcacccccgtacacgaagaaagccgtcgaccagg

SEQ ID NO: 653858 - DNA, 400 bp, Homo sapiens
acatcagtggtctggacagagaaagccacatactgtatgattccacttttatatgaaatatacaaagtggacaaatgtagagaggcagaaagcaggttagtggttgctgggagttgggggaggaaacagggagtggccgcttaatgggtacaggggccttcttaggtgataaagctagttaaggaatataatactgaacaaggctaagtccaaatctaatatacaccaaatatacaagtaaacttggcatttatactagtgcagtacaaaagttcagttatatgtatcttacccttcaaggaggaaaaagataatctagaatgtaattgctaagcataggaggatattttacaaagggtaagaatttctttgttcactttctgacatttctggagtaact

SEQ ID NO: 653859 - DNA, 382 bp, Homo sapiens
  misc_feature (368)..(368): n is a, c, g, or t
tgctgggattataggtgtgagccacggcacccggcctggatgtcaagactttgaaaaacagtctatactgggaagattccacagttttctgtattccagggttaaattaaaactttgtctaacaaactgttaactcagtttaagtttttaattagttgtctgtggatataaagaatgggtcaacagagtattttccttggagcatttcacctcagcacatttattgagcacctttttagtgcaagcattgtgccaggagaacttaagaactatacagaggcccagcattagaggtggtttaatgtggtgaggaaaacaatttgatacatgtataattacttttaaaaagcaggggattgaaactgcanaccagaatcaggaa

SEQ ID NO: 653860 - DNA, 189 bp, Homo sapiens
tgatccccgacaccctaataacgcagattgagagaacatggacaactcaagtgatatcataaaactaaagaaatggaagacatgcatcctttgagtgcccagtcagggaagacccttagcagagcgtgggtgggggcagtacggcggaaggaatcggtgttgcttacagaagcctctaggcccgaattc

SEQ ID NO: 653861 - DNA, 316 bp, Homo sapiens
  misc_feature (263)..(263): n is a, c, g, or t
tcggctcggcccccaatatttgcaggaacataatatacatcgttttttttttaaaaaaggttaatttaggaatgatttcatcttcaaccacataaagtatctttttaagaccagtgaaacctctgtgtcatggcaagacttttcagttcatggtatctactttcccaagttttaacttcttaaagggaaaaaaaaaaaggatggaaaggggtttataatggtattccccatggagaaacctggtgggtagggatctaatccantaaccagggctggtctccccttccttttggtttcccgggactacccaggatca

SEQ ID NO: 653862 - DNA, 254 bp, Homo sapiens
ttttttcccggggtttttccccccggggcccggcgggggggtttttaaaacaatttttgggcctttttgcccaaccccgggggggcggttttcccggggcccctttttttggggtgaaaagggggacccaaaatttttttttgccccgtttttttttaaacccctttccctggggggggggggggggccccatgggtttttttttttccgccccccctgataaaaacccaatttgggggaataaaaatttttta

SEQ ID NO: 653863 - DNA, 438 bp, Homo sapiens
  misc_feature (89)..(89): n is a, c, g, or t
  misc_feature (108)..(108): n is a, c, g, or t
  misc_feature (117)..(117): n is a, c, g, or t
  misc_feature (132)..(132): n is a, c, g, or t
  misc_feature (146)..(147): n is a, c, g, or t
  misc_feature (182)..(182): n is a, c, g, or t
  misc_feature (199)..(199): n is a, c, g, or t
  misc_feature (226)..(226): n is a, c, g, or t
  misc_feature (347)..(347): n is a, c, g, or t
  misc_feature (422)..(422): n is a, c, g, or t
  misc_feature (424)..(424): n is a, c, g, or t
gcggccgcctactactactaaattcgcggccgcgtcgacattttattcaaattcctctgatagttctctagtagcaggttttaggatanctgttttgatccagatttnctgttaaangatttagatgagggnccaagcggggtggnnctcgcgcctgcagtccgagcacctttggagggtgngagggcgggcggatcancttgagggccgggagttccagacaagncctggccaacatggcgaagccccatctctactgaaggtgcaaaaattggctgggtgcggtggtgcttgcctgtggtcccagctgcacgggaggctgaggtatgagaactgcttgagcctgngaggtggaggttgcggtgagctgaagtcgagccactgcagtccagcctgggtgacggagtgagactctgtctcananaaaaaaagtcgacg

SEQ ID NO: 653864 - DNA, 355 bp, Homo sapiens
tttaacattaattccttttctttcttaacttataaaactggtagaaaaaaaatgcaaactagaccaggctcggtggcttacgtctgtaatcctagcacttcggtaggccgaggcggtggactgcctgagctcaggagttctgagagcagcctgggcaacacggtgaaaccccgtctctactaaaatacaaaaaattagctgggcatggcggcgtgcacctttagtcacagctacttgggaggctgaggcagaactgcttgaacccgggacgcagaggttgcagtgagccgagatcgcgccactgccctccagtctgggcaacaaagcgagacgccatctcaaaaaaaagtcgacg

SEQ ID NO: 653865 - DNA, 110 bp, Homo sapiens
atacacacatactccttacactattcctcatcacccaactaaaaatataaaacacaaactcacactaactccctcaccaaagcccataaaaataaccacattataacatc

SEQ ID NO: 653866 - DNA, 394 bp, Homo sapiens
ttcatggtggctcactcctttaatcccagcactttgggaggctgaggcaggtggattacctgaggtcaggagttcgagaccagcctggccaacatggtgacacctcatctctactatacataaattagctgggtgcggtggcatgtgcctgtaatcccagctacttgggaggctgaggcaggagaatctcttgaacccgctagggggaggtttcagtgagccgtgattgctccattgcactccagcctggctgacagagcacgactccatctcatcaaatacctctcaaagccacctaggcccagcaggatagctcaggcctgtcatcccagcactttgcaaggccacggtggccggctcacctgtggccaggcgtttcggaccagcctcgctc

SEQ ID NO: 653867 - DNA, 870 bp, Homo sapiens
  misc_feature (814)..(814): n is a, c, g, or t
gtgccattgagcggccctcaaggtaataggattgcaggaggcagagggtgtcctgctactgaaagcccaggcacctggcagctacctcatctccatcaagtacggtggcccctatgcacattgggggcagccccttcaaagggccaataggtcacaggcccccgtctcgtcagcaaacatcagcctccacgagacatcatcagtgtttgtagactctctgaccaaggccacctgtgccccccagcatggggccccgggtcctgggcctgctgacgccagcaaggtggtggccaagggcctggggctgagcaaggcctacgtaggccagaagagcagcttcacagtagactgcagcaaagcaggcaacaacatgctgctggtgggggttcatggcccaaggaccccctgcgaggagatcctggtgaagcacgtgggcagccggctttacagcgtgtcctacctgctcaaggacaagggggagtacacactggtggtcaaatggggggacgagcacatcccaggcagcccctaccgcgttgtggtgccctgagtttggggcccgtgccagccggcagcccccaagcctgccccgctacccaagcagccccgcccttttcccctcaaccccggcccctgggccgccctggccgcccgcctgtcactgcagccgcccctgccctgtgccgtgctgcgctcacctgcctccccagccagccgctgacctttcggctttcacttgggcaaagggagccatttggtggcgctgcttgtcttctttggttctgggaggggtgagggatgggggtcctgtacncaaccccccactagtttttttttccagccaagaggaataaagttttgcttccatta

SEQ ID NO: 653868 - DNA, 289 bp, Homo sapiens
acgtcgggcaagcctggcaagtgggaatggctgggaatcggcctgacctggcgtaccccttggtccggccagctcaccgtgggcgcggagaacgtgatcagccgcggcaagaatccgttctcgccgcgcaatgaaagcaatgacgacggcactgtgccgtatgtgcgttacgaacaggatctctgatcccaccgcgcggttcttcctgcagtgacttctcacgggcgccgaaaggcgcccgttgcgtatgcgtgatcgcgatacacgcatcgcgcttttcggcgggtcg

SEQ ID NO: 653869 - DNA, 1058 bp, Homo sapiens
  misc_feature (814)..(814): n is a, c, g, or t
gtgccattgagcggccctcaaggtaataggattgcaggaggcagagggtgtcctgctactgaaagcccaggcacctggcagctacctcatctccatcaagtacggtggcccctatgcacattgggggcagccccttcaaagggccaataggtcacaggcccccgtctcgtcagcaaacatcagcctccacgagacatcatcagtgtttgtagactctctgaccaaggccacctgtgccccccagcatggggccccgggtcctgggcctgctgacgccagcaaggtggtggccaagggcctggggctgagcaaggcctacgtaggccagaagagcagcttcacagtagactgcagcaaagcaggcaacaacatgctgctggtgggggttcatggcccaaggaccccctgcgaggagatcctggtgaagcacgtgggcagccggctttacagcgtgtcctacctgctcaaggacaagggggagtacacactggtggtcaaatggggggacgagcacatcccaggcagcccctaccgcgttgtggtgccctgagtttggggcccgtgccagccggcagcccccaagcctgccccgctacccaagcagccccgcccttttcccctcaaccccggcccctgggccgccctggccgcccgcctgtcactgcagccgcccctgccctgtgccgtgctgcgctcacctgcctccccagccagccgctgacctttcggctttcacttgggcaaagggagccatttggtggcgctgcttgtcttctttggttctgggaggggtgagggatgggggtcctgtacncaaccccccactagtttttttttccagccaagaggaataaagttttgcttccattaaaaaaaaaaacgaaaaaaaaaaaaaaaaaaaaaaaaaggaaaaaaaaaaaaaaggaagaaaaaaaagagagagagaaaaacagagaacgagggggggcacaggagggggggagcgcccgcggggggggggggggggggccaaaaagaaagggggggggagcagggaaagagagggagggaggggagag

SEQ ID NO: 653870 - DNA, 425 bp, Homo sapiens
gccgcggcctcaatcctagtagttcctctgggcgcttaaagatttcagctagcgtcaacgcatgatccagcccctgtagtgtataagcagcatgtccatccgtaggtatcaatatggctgggtgtgtatagggaacataaggctacatctctccgcttggtgaggttgctatagcatctcagactggtagatctacatcccgtccaggtggagctggtcgtctctcttgagcatcggagggagcctctacggtaatgtaaggtcacggctcggcactccggcctgtgtggcagaccaacatctctgtcggctaaagagcagacgactcgcatccgctcggctcacacagagtaatccgagcccagtgccagcgtcacatagcgcgctcacgtcagcccaggagattagatccggctgcggctcgc

SEQ ID NO: 653871 - DNA, 1190 bp, Homo sapiens
  misc_feature (946)..(946): n is a, c, g, or t
gtgccattgagcggccctcaaggtaataggattgcaggaggcagagggtgtcctgctactgaaagcccaggcacctggcagctacctcatctccatcaagtacggtggcccctatgcacattgggggcagccccttcaaagggccaataggtcacaggcccccgtctcgtcagcaaacatcagcctccacgagacatcatcagtgtttgtagactctctgaccaaggccacctgtgccccccagcatggggccccgggtcctgggcctgctgacgccagcaaggtggtggccaagggcctggggctgagcaaggcctacgtaggccagaagagcagcttcacagtagactgcagcaaagcaggcaacaacatgctgctggtgggggttcatggcccaaggaccccctgcgaggagatcctggtgaagcacgtgggcagccggctttacagcgtgtcctacctgctcaaggacaagggggagtacacactggtggtcaaatggggggacgagcacatcccaggcagcccctaccgcgttgtggtgccctgagtttggggcccgtgccagccggcagcccccaagcctgccccgctacccaagcagccccgcccttttcccctcaaccccggcccctgggccgccctggccgcccgcctgtcactgcagccgcccctgccctgtgccgtgctgcgctcacctgcctccccagctgtgccccgggcctgtgtcctgactgggactcttgggacgccagcaagcccgttaccaatgcgcgagaggccatgcagcaggcggatgactggctgggcatcccccaggtgatcacccccgaggagattgtgcagccgctgacctttcggctttcacttgggcaaagggagccatttggtggcgctgcttgtcttctttggttctgggaggggtgagggatgggggtcctgtacncaaccccccactagtttttttttccagccaagaggaataaagttttgcttccattaaaaaaaaaaacgaaaaaaaaaaaaaaaaaaaaaaaaaggaaaaaaaaaaaaaaggaagaaaaaaaagagagagagaaaaacagagaacgagggggggcacaggagggggggagcgcccgcggggggggggggggggggccaaaaagaaagggggggggagcagggaaagagagggagggaggggagag

SEQ ID NO: 653872 - DNA, 315 bp, Homo sapiens
  misc_feature (193)..(193): n is a, c, g, or t
cggggatctttgttttaatcttgcgatgtgccttgcttgttgctgggcggatgatgtttactaacccatgaattttacatcccaaggggataggcccttggacccccccctttccaaggccgggggggcggtttcccatgggatgtgaaaggctggcccttattaagtccctgtaactcaaaatgtcaacccnccccgaggcccccccccgtcccccagaattttggctgtttacaaatcacgggtccatcgagcacgtttgaaacccctgggagccccggcttttttttaattaaaataaggtaagcccctcca

SEQ ID NO: 653873 - DNA, 909 bp, Homo sapiens
  misc_feature (853)..(853): n is a, c, g, or t
gtgccattgagcggccctcaaggtaataggattgcaggaggcagagggtgtcctgctactgaaagcccaggcacctggcagctacctcatctccatcaagtacggtggcccctatgcacattgggggcagccccttcaaagggccaataggtcacaggcccccgtctcgtcagcaaacatcagcctccacgagacatcatcagtgtttgtagactctctgaccaaggccacctgtgccccccagcatggggccccgggtcctgggcctgctgacgccagcaaggtggtggccaagggcctggggctgagcaaggcctacgtaggccagaagagcagcttcacagtagactgcagcaaagcaggcaacaacatgctgctggtgggggttcatggcccaaggaccccctgcgaggagatcctggtgaagcacgtgggcagccggctttacagcgtgtcctacctgctcaaggacaagggggagtacacactggtggtcaaatggggggacgagcacatcccaggcagccccagactcagggcaccacaacgcggtaggggctgcctgggataccgcgttgtggtgccctgagtttggggcccgtgccagccggcagcccccaagcctgccccgctacccaagcagccccgcccttttcccctcaaccccggcccctgggccgccctggccgcccgcctgtcactgcagccgcccctgccctgtgccgtgctgcgctcacctgcctccccagccagccgctgacctttcggctttcacttgggcaaagggagccatttggtggcgctgcttgtcttctttggttctgggaggggtgagggatgggggtcctgtacncaaccccccactagtttttttttccagccaagaggaataaagttttgcttccatta

SEQ ID NO: 653874 - DNA, 358 bp, Homo sapiens
  misc_feature (21)..(21): n is a, c, g, or t
  misc_feature (23)..(23): n is a, c, g, or t
  misc_feature (26)..(27): n is a, c, g, or t
  misc_feature (32)..(32): n is a, c, g, or t
  misc_feature (35)..(35): n is a, c, g, or t
  misc_feature (114)..(114): n is a, c, g, or t
ccggacccccatttgcccacnanggnnactcnccntgtctgagcaggtaggacacgctgtagagccggctgcccacgtgcttcaccaggatctcctcgcagggggtcctgtacncaaccccccactagtttttttttccagccaagaggaataaagttttgcttccattaaaaaaaaaaacgaaaaaaaaaaaaaaaaaaaaaaaaaggaaaaaaaaaaaaaaggaagaaaaaaaagagagagagaaaaacagagaacgagggggggcacaggagggggggagcgcccgcggggggggggggggggggccaaaaagaaagggggggggagcagggaaagagagggagggaggggagag

SEQ ID NO: 653875 - DNA, 1096 bp, Homo sapiens
  misc_feature (852)..(852): n is a, c, g, or t
gtgccattgagcggccctcaaggtaataggattgcaggaggcagagggtgtcctgctactgaaagcccaggcacctggcagctacctcatctccatcaagtacggtggcccctatgcacattgggggcagccccttcaaagggccaataggtcacaggcccccgtctcgtcagcaaacatcagcctccacgagacatcatcagtgtttgtagactctctgaccaaggccacctgtgccccccagcatggggccccgggtcctgggcctgctgacgccagcaaggtggtggccaagggcctggggctgagcaaggcctacgtaggccagaagagcagcttcacagtagactgcagcaaagcaggcaacaacatgctgctggtgggggttcatggcccaaggaccccctgcgaggagatcctggtgaagcacgtgggcagccggctttacagcgtgtcctacctgctcaaggacaagggggagtacacactggtggtcaaatggggggacgagcacatcccaggcagcccctaccgcgttgtggtgccctgagtttggggcccgtgccagccggcagcccccaagcttggggggccgccccccccccggcggccttttaaaaacccccccccaaaaaagacaacccccgcccttttcccctcaaccccggcccctgggccgccctggccgcccgcctgtcactgcagccgcccctgccctgtgccgtgctgcgctcacctgcctccccagccagccgctgacctttcggctttcacttgggcaaagggagccatttggtggcgctgcttgtcttctttggttctgggaggggtgagggatgggggtcctgtacncaaccccccactagtttttttttccagccaagaggaataaagttttgcttccattaaaaaaaaaaacgaaaaaaaaaaaaaaaaaaaaaaaaaggaaaaaaaaaaaaaaggaagaaaaaaaagagagagagaaaaacagagaacgagggggggcacaggagggggggagcgcccgcggggggggggggggggggccaaaaagaaagggggggggagcagggaaagagagggagggaggggagag

SEQ ID NO: 653876 - DNA, 729 bp, Homo sapiens
aacaatgccgcgtgttgcgaggagatcgccattatccccagcgagaacagctccgcaagaagatagcaggttagtgtcacgcatctgtattgaagcgaattcagagatggcccagtagagaggtatctccatcaagctgcaggaggaggacgagagaaaggagagacacattatgtggcctgaggtctcagccttggatcaggagattacttgaacgtagatcctgacagctataggacaatgtctgaagcttgtcggacttcgtgcagttctgtccgaaccattcgagggtcagctcagccatagcgagttggcgcatgagagttctcagaagagcgccctcgtgggggagcctggtttgagagttcttggagcgtgatagatgcatggtgattattggtcaaataagaagtcgttggggaaacagaccaaggcgcgtctagacacagaaaacacacagaagataaacacagggtgggaacgcgaccatctgctatgatgtgactccgggggtgtgtgcgtggggtcaaaacgagcgagggggtcaagatgtgggagagatgtggggggcaacctatggtggggccccatttgaggacgactggtttccccctgtggtcaccccaggaggcctggtgcctgtgttggttcctacagagggggggacacaggaaactcttctgggcggggggcgtccaccgcgcggactatcggtcgtggaggattccg

SEQ ID NO: 653877 - DNA, 984 bp, Homo sapiens
  misc_feature (3)..(3): n is a, c, g, or t
  misc_feature (68)..(68): n is a, c, g, or t
  misc_feature (71)..(71): n is a, c, g, or t
  misc_feature (75)..(75): n is a, c, g, or t
  misc_feature (78)..(78): n is a, c, g, or t
  misc_feature (90)..(90): n is a, c, g, or t
  misc_feature (92)..(92): n is a, c, g, or t
  misc_feature (104)..(104): n is a, c, g, or t
  misc_feature (108)..(108): n is a, c, g, or t
  misc_feature (116)..(116): n is a, c, g, or t
  misc_feature (121)..(121): n is a, c, g, or t
  misc_feature (137)..(137): n is a, c, g, or t
  misc_feature (140)..(140): n is a, c, g, or t
  misc_feature (156)..(156): n is a, c, g, or t
  misc_feature (168)..(168): n is a, c, g, or t
  misc_feature (170)..(170): n is a, c, g, or t
  misc_feature (172)..(172): n is a, c, g, or t
  misc_feature (191)..(191): n is a, c, g, or t
  misc_feature (214)..(214): n is a, c, g, or t
  misc_feature (236)..(236): n is a, c, g, or t
  misc_feature (264)..(264): n is a, c, g, or t
  misc_feature (278)..(278): n is a, c, g, or t
  misc_feature (288)..(288): n is a, c, g, or t
  misc_feature (307)..(307): n is a, c, g, or t
  misc_feature (315)..(315): n is a, c, g, or t
  misc_feature (317)..(317): n is a, c, g, or t
  misc_feature (329)..(329): n is a, c, g, or t
  misc_feature (386)..(386): n is a, c, g, or t
  misc_feature (393)..(393): n is a, c, g, or t
  misc_feature (401)..(401): n is a, c, g, or t
  misc_feature (413)..(413): n is a, c, g, or t
  misc_feature (420)..(421): n is a, c, g, or t
  misc_feature (427)..(429): n is a, c, g, or t
  misc_feature (435)..(435): n is a, c, g, or t
  misc_feature (442)..(442): n is a, c, g, or t
  misc_feature (445)..(445): n is a, c, g, or t
  misc_feature (450)..(450): n is a, c, g, or t
  misc_feature (458)..(458): n is a, c, g, or t
  misc_feature (466)..(466): n is a, c, g, or t
  misc_feature (469)..(469): n is a, c, g, or t
  misc_feature (494)..(494): n is a, c, g, or t
  misc_feature (517)..(517): n is a, c, g, or t
  misc_feature (573)..(573): n is a, c, g, or t
  misc_feature (726)..(726): n is a, c, g, or t
  misc_feature (729)..(729): n is a, c, g, or t
  misc_feature (735)..(735): n is a, c, g, or t
  misc_feature (752)..(752): n is a, c, g, or t
  misc_feature (756)..(756): n is a, c, g, or t
  misc_feature (776)..(776): n is a, c, g, or t
  misc_feature (781)..(781): n is a, c, g, or t
  misc_feature (802)..(802): n is a, c, g, or t
  misc_feature (816)..(816): n is a, c, g, or t
  misc_feature (827)..(827): n is a, c, g, or t
  misc_feature (876)..(876): n is a, c, g, or t
  misc_feature (909)..(909): n is a, c, g, or t
  misc_feature (921)..(921): n is a, c, g, or t
  misc_feature (970)..(970): n is a, c, g, or t
canctggaatgctccacaagagccagccccacccttagaaaaaatgttttccatgaggaacgtctgcntgntccnaantgtggtgggcanancaaggactgcanaaantggtgaangtgantttctagctgaaggangangcgtgcgtggcccaanggttgtggaaananancaatctgcctgcaaaaaancaaaaaggcccttctgctctgangaaaacaggaaaaaaaaaagcncttctggctgcaggaagaaaaggttgantgaagaagtcaaanaaaaattaanaaaaaaaaaaaaaaagcanaaaaaaananaaatagaaaaanaaaaaaaaaaaaaagaatcacaatcgttgaccacaaaaaaaaaggaaaaattaaaangcgaatnatcctcanccaaaaaccganaaaaaannaaaaannnaatgtnaaaggancanaaaancaaaaatnaaatccanaancgcaaagacaaaaaaaaaaaaaaanaaaaccagcttcagcaaaaaaangtaaaagcacaataggatgaaatgaaacgactggaggaggacaatgaaattaaganccgaacatgacagaaggtcatgcagtagggctttagctcgtgaagtagatctgaaggactatgaagatcagcagaagcaacttgaacaggtcattgccaaagacttacttccctctagagataggcaacacttaccactgataaaaatgaaancanttccanacttggttcccgggaantttnagagccagcttcagaaggtnccccngagtggaaggcattaacaganatgccgcagatganaatggagttanagagacctggtggaaatgagattactcgaggaggctccactcttatggnaccggatcagagacggaaagcccaggaacctancagtgctggaantggaactctggagctctggactggaagtctggaaacgaaacctgggagnctgggactgaggac

SEQ ID NO: 653878 - DNA, 337 bp, Homo sapiens
  misc_feature (30)..(30): n is a, c, g, or t
  misc_feature (38)..(38): n is a, c, g, or t
  misc_feature (185)..(185): n is a, c, g, or t
agggaaactggcacagagatccctgtgtgnaaccacgncaagagagtctgccagttagaatactggggcttgtgccaggagagaagaattcagaaagtccaaaggctggaatgtaggtgaaagagactatgggactctgcccttccatgtccatccagaaagtgcccctgcacacctgtcctgtncctaggtcctgtagggatgtgatataacaagccatggagctgtaccttagtgtctgtgttcccagaactttgttggctcccgaagcacctttccctcctcccaagaggaataagccaaatgtaaataaatggtgcccaggcatttggctcac

SEQ ID NO: 653879 - DNA, 265 bp, Homo sapiens
  misc_feature (14)..(14): n is a, c, g, or t
  misc_feature (92)..(92): n is a, c, g, or t
ggggccttaccccncccctgggggtaagggggttttggcaaatgggggggtttggcccccaaaacccccctgggcccgtttccctggggggngggggcccccaaggaaattacccaaaaggggaggccccggaggaagggttttttggggcttttgggggggaaaaaaggaaaagggtttccaaaaactccccggcaaaacccccctggggaaatttttttggggggaaaaggaggaaattttaaaaaaaaaacaacaaagttca

SEQ ID NO: 653880 - DNA, 980 bp, Homo sapiens
  misc_feature (286)..(286): n is a, c, g, or t
atatatcgttcgtctctttctttcgtgcttgtctgcgcaatttgatctatctgctactgttcatacgatagagtatacttattacatgagtctaaaaagaaactcgcttgcttcgtttatactaatctccaccttgtacctctagttgcatggaactgcacaccttcggtagtccggaaatctttttcccccaacactcgctctctggaagccatctttgttccgggtgacgcacaattattgtttcttattattcatctcatccttgtcgtcgcggcagataatntgccctgtaacacacaaaattctcagttcactgggttcccccacaaaccgtttgtgtcgctcgtcaatgaactcgattccgtgatttttagccacgacctcaagccagatatttgtttagtataggccccacactacatgggcggccgaatccctcgcccaaattcgtcaaatattgcagagcgggtagcagatgtaattctgaataaaaaagagatgtgggtctcacgaacaccttctcatcacaggcaccctctccaccagagtgcaataccactactactgcggcatctggcgggtgaatagtgtccccgaggctcttccgcctctctatgttgtgcgcgagcacaagatgtgctcgctcccggtcctgtacatcaggcctgcgactgcaggtggcggcgatgctcgggctcgcctccctagtgtggtgcctgcccaggttccgtgctgagttctgcgcttgcggccagaactcttgtgttgactgggatacacacggcgcttatcggccccagcctgggctaaatatgtctgctgtacatttcagtagagaataggggttttctccatccgatcggaccagtacttggtctcccacgctggagtgatcatacaagtggtcgggctcacggtggtcctccccttgtcccccccctgcgggccggagcccaacacccctcccccacatagac

SEQ ID NO: 653881 - DNA, 358 bp, Homo sapiens
cagtggggatggaaatggacgcagaaggggtttggggggtgatattaaagatgacaaccgcaaacgtaaagggcctatgaactcctaggtcatgccagaacgcagctctttgtttagtcggccaggcagattaagttgggtcttatatgaaaagcctctcggggtctggccctagtagccctggctcgaacgaaagaagtctgtattgaagttctctttctgccacttcctagagctttctgatctctgacaatgtactcaaccttgccgaacttaagtcttctcacctgtaaaatgggaataagaatgatacacacttcaaaggaatgttgagaggataatatgagatgacgtacat

SEQ ID NO: 653882 - DNA, 117 bp, Homo sapiens
ttctgtatgaggttcgtcctactactcaacttaaactccagcaccactgaccctactactatctcgcacctgaaacaatgctaacatgactaacacccttaattccatccaccctcc

SEQ ID NO: 653883 - DNA, 950 bp, Homo sapiens
acggggaaaaaaaagcacgcctgggcaaggaacaccaagtccacagggtaagggcggaaaaacaggctagccccccgcccgcagcccgattgtcagggataaaccacaaagcggccggtacatacgacgggaaaaacatgcatcgttgtggaaagtcaagaaaagaaaaagtgttcgcaaggaggggcccctcagacccagagcgcagtggggtaaacgcctccattgtataaaggaagctctagtgggcttatggtcgcgaactgcgcacggaaagtgctcgcgcgctgtagaagcgcctagtgtccaagaagaagtatgcttaactcgtgggagtacaattccattgggtggaacaaaacagctggttatttcctacaataggaacccttcctcgaggttattagcagcaccagatataactagtgacaagcatagtttgtatctgggccaacacaaataagcagagccgctccttttcgtttatgcggccatttctaaaaaagcagtatctcgcctttaggaacgacactctctcaactggcgtcccaccagataacttggcgcccttagttaccacaaagttccggaccacaagggggagtattttattgaaccaaattattgagaagaatacaaggaaaaatccttagatgtgtcttacgcataaaaacgccttccacttcaggggagatcccccaacaacatagttggcgctgtacatagaagaatagaataattttaccactttagatggtcaagaagaaggcgcccctactaaagtctcttggggccgaccactgcaccgagggcgggggcgctaacacactcaaactcatgttacagaagcagccgggctcagaggaagaacactcttgccgcgccatagcgtaggctacggccccccccgggaaaaaatggaaacaaataggctgggcaaaaaaaacaaa

SEQ ID NO: 653884 - DNA, 2709 bp, Homo sapiens
agcgggggggctctgggcagcctgggaactgccattgggattagtccgctccactcactgtcagcattaagtgggggtgcccaagacggggtggatggggggcgccctccagacctctgaccacggcctcaccgccactcgacccaactatgaagagcgcccccagctgcacgccaggacacgacctttccttcccctagaaaccagtaaaggccgctgccctattcaagatgaaatgtgtggaccgcccccagcccagttgaaatttcccgtgaaagtctctcgccccttccccacagctccacttcagtggactggagggcgcaggcctttgttctgactgcttctgtctgcctgcctcccacccgacgacactcacatggtagcgctgagcttcaacaccctgtatcatagaaggacggggtttggctccacacctgccactgctattgaaatagtttagtcttgccccagttcactgatgaggaaactgaggccctaacggcaggtggagccgggtccccgacccccgagatcggcagggcgctgaagacgtcccttccaccctccagcctctggtgcacatggcttcctccccggcggtggacgtgtcctgcaggcggcgggagaagcggcggcagctggacgcgcgccgcagcaagtgccgcatccgcctgggcggccacatggagcagtggtgcctcctcaaggagcggctgggcttctccctgcactcgcagctcgccaagttcctgttggaccggttaggggccgggagaagggcttgggggagggtacccaggcagcagcccctagcctcctctccagggcctgtcctgctgctcttttccaccctcaggtttctcactttaccaggacggcctgtgtgacttgtggcctccgagggtcctgctcccctcctcatggtctcagcgaatagcggcccttagggctggccccttacatgtgtgagtgcccagggctgagggtggctggccacctgagtcctgacctgcctcttctcctgctggcaggtacacttcttcaggctgtgtcctctgtgcaggtaggtaggggatggcagggggtgagagccagagggaagagggaccacagggtgacccagaaacaccctcctttcaaagggagcccaggtcctgagcctttgcctccaaaaggtctgcagtatctggtgctcttgtctcatgcccacagccgagagtgcagcctggtgcccgggcttcgggggcctggcggccaagatggggggcttgtgtgggagtgctcagcaggccataccttctcctggggaccctctttgagccctacaccttcagaggcacccaagccagcctcccttccacatactactcggagaagttggtgttccgaggccacgagtgggcaggagcttgcagatttggaatctgagcatgatgagaggactcaagaggccaggttgcccaggagggtgggacccccaccagagaccttcccacctccaggagaggaagagggtgaggaagaagaggacaatgatgaggatgaagaggagatgctcagtgatgccagcttatggacctacagctcctccccagatgatagtgagcctgatgcccccagactactgccttcccctgtcacctgcacacctaaagagggggagacaccaccagcccctgcagcactctccagtcctcttgctgtgccggccttgtcagcatcctcattgagttccagagctcctccacctgcagaagtcagggtgcagccacagctcagcaggacccctcaagcggcccagcagactgaggccctggccagcactgggagtcaggcccagtctgctccaaccccggcctgggatgaggacactgcacaaattggccccaagagaattaggaaagctgccaaaagagagctgatgccttgtgacttccctggctgtggaaggatcttctccaaccggcagtatttgaatcaccacaaaaagtaccagcacatccaccagaagtctttctcctgcccagagccagcctgtgggaagtctttcaactttaagaaacacctgaaggagcacatgaagctgcacagtgacacccgggactacatctgtgagttctgcgcccggtctttccgcactagcagcaaccttgtcatccacagacgtatccacactggagaaaaacccctgcagtgtgagatatgcgggtttacctgccgccagaaggcttccctgaactggcaccagcgcaagcatgcagagacggtggctgccttgcgcttcccctgtgaattctgcggcaagcgctttgagaagccagacagtgttgcagcccaccgtagcaaaagtcacccagccctgcttctagcccctcaagagtcacccagtggtcccctagagccctgtcccagcatctctgcccctgggcctctgggatccagcgaggggtccaggccctctgcatctcctcaggctccaaccctgcttcctcagcaatgagctctcctccagctttggctttgggaagccagactccagggactgaaaaggagcaacaaggagagggtctgcttgagaaatgccagatgcttggtccccaggaactaaggcgacagagtgcagggtgggggcaagactgggctgtaggggagctggactactttagtcttcctaaaggacaaaataaacagtattttatgcaggca

SEQ ID NO: 653885 - DNA, 2046 bp, Homo sapiens
  misc_feature (15)..(15): n is a, c, g, or t
  misc_feature (20)..(21): n is a, c, g, or t
  misc_feature (23)..(23): n is a, c, g, or t
tggctaagtgaggcngtggnntnaagttccgggctacagcagccgacgccgagaggcaccgtttcttcttaaaagagaaacgctgcgcgcgcgaggtgggcccctgtcttccagcagctccgggcctgctcgctaggcccgggaggcgcaggcgcaggcgcagtgggggtgagggcgcgtgggggcgcacagcctctggtgcacatggcttcctccccggcggtggacgtgtcctgcaggcggcgggagaagcggcggcagctggacgcgcgccgcagcaagtgccgcatccgcctgggcggccacatggagcagtggtgcctcctcaaggagcggctgggcttctccctgcactcgcagctcgccaagttcctgttggaccggtggacggcctgtgtgacttgtggcctccgagggtcctgctcccctcctcatggtctcagcgaatagcggcccttagggctggccccttacatgtgtgagtgcccagggctgagggtggctggccacctgagtcctgacctgcctcttctcctgctggcaggtacacttcttcaggctgtgtcctctgtgcaggtcctgagcctttgcctccaaaaggtctgcagtatctggtgctcttgtctcatgcccacagccgagagtgcagcctggtgcccgggcttcgggggcctggcggccaagatggggggcttgtgtgggagtgctcagcaggccataccttctcctggggaccctctttgagccctacaccttcagaggcacccaagccagcctcccttccacatactactcggagaagttggtgttccgaggccacgagtgggcaggagcttgcagatttggaatctgagcatgatgagaggactcaagaggccaggttgcccaggagggtgggacccccaccagagaccttcccacctccaggagaggaagaggtagtgagcctgatgcccccagactactgccttcccctgtcacctgcacacctaaagagggggagacaccaccagcccctgcagcactctccagtcctcttgctgtgccggccttgtcagcatcctcattgagttccagagctcctccacctgcagaagtcagggtgcagccacagctcagcaggacccctcaagcggcccagcagactgaggccctggccagcactgggagtcaggcccagtctgctccaaccccggcctgggatgaggacactgcacaaattggccccaagagaattaggaaagctgccaaaagagagctgatgccttgtgacttccctggctgtggaaggatcttctccaaccggcagtatttgaatcaccacaaaaagtaccagcacatccaccagaagtctttctcctgcccagagccagcctgtgggaagtctttcaactttaagaaacacctgaaggagcacatgaagctgcacagtgacacccgggactacatctgtgagttctgcgcccggtctttccgcactagcagcaaccttgtcatccacagacgtatccacactggagaaaaacccctgcagtgtgagatatgcgggtttacctgccgccagaaggcttccctgaactggcaccagcgcaagcatgcagagacggtggctgccttgcgcttcccctgtgaattctgcggcaagcgctttgagaagccagacagtgttgcagcccaccgtagcaaaagtcacccagccctgcttctagcccctcaagagtcacccagtggtcccctagagccctgtcccagcatctctgcccctgggcctctgggatccagcgaggggtccaggccctctgcatctcctcaggctccaaccctgcttcctcagcaatgagctctcctccagctttggctttgggaagccagactccagggactgaaaaggagcaacaaggagagggtctgcttgagaaatgccagatgcttggtccccaggaactaaggcgacagagtgcagggtgggggcaagactgggctgtaggggagctggactactttagtcttcctaaaggacaaaataaacagtattttatgcaggca

SEQ ID NO: 653886 - DNA, 2055 bp, Homo sapiens
  misc_feature (15)..(15): n is a, c, g, or t
  misc_feature (20)..(21): n is a, c, g, or t
  misc_feature (23)..(23): n is a, c, g, or t
tggctaagtgaggcngtggnntnaagttccgggctacagcagccgacgccgagaggcaccgtttcttcttaaaagagaaacgctgcgcgcgcgaggtgggcccctgtcttccagcagctccgggcctgctcgctaggcccgggaggcgcaggcgcaggcgcagtgggggtgagggcgcgtgggggcgcacagcctctggtgcacatggcttcctccccggcggtggacgtgtcctgcaggcggcgggagaagcggcggcagctggacgcgcgccgcagcaagtgccgcatccgcctgggcggccacatggagcagtggtgcctcctcaaggagcggctgggcttctccctgcactcgcagctcgccaagttcctgttggaccggtacacttcttcaggctgtgtcctctgtgcaggtcctgagcctttgcctccaaaaggtctgcagtatctggtgctcttgtctcatgcccacagccgagagtgcagcctggtgcccgggcttcgggggcctggcggccaagatggggggcttgtgtgggagtgctcagcaggccataccttctcctggggaccctctttgagccctacaccttcagaggcacccaagccagcctcccttccacatactactcggagaagttggtgttccgaggccacgagtgggcaggagcttgcagatttggaatctgagcatgatgagaggactcaagaggccaggttgcccaggagggtgggacccccaccagagaccttcccacctccaggagaggaagagggtgaggaagaagaggacaatgatgaggatgaagaggagatgctcagtgatgccagcttatggacctacagctcctccccagatgatagtgagcctgatgcccccagactactgccttcccctgtcacctgcacacctaaagagggggagacaccaccagcccctgcagcactctccagtcctcttgctgtgccggccttgtcagcatcctcattgagttccagagctcctccacctgcagaagtcagggtgcagccacagctcagcaggacccctcaagcggcccagcagactgaggccctggccagcactgggagtcaggcccagtctgctccaaccccggcctgggatgaggacactgcacaaattggccccaagagaattaggaaagctgccaaaagagagctgatgccttgtgacttccctggctgtggaaggatcttctccaaccggcagtatttgaatcaccacaaaaagtaccagcacatccaccagaagtctttctcctgcccagagccagcctgtgggaagtctttcaactttaagaaacacctgaaggagcacatgaagctgcacagtggtaagggaggtccagacgggctccatgatttggataacaactaattagaacctgagcctcctgacctccaatacggtgcactctgacacccgggactacatctgtgagttctgcgcccggtctttccgcactagcagcaaccttgtcatccacagacgtatccacactggagaaaaacccctgcagtgtgagatatgcgggtttacctgccgccagaaggcttccctgaactggcaccagcgcaagcatgcagagacggtggctgccttgcgcttcccctgtgaattctgcggcaagcgctttgagaagccagacagtgttgcagcccaccgtagcaaaagtcacccagccctgcttctagcccctcaagagtcacccagtggtcccctagagccctgtcccagcatctctgcccctgggcctctgggatccagcgaggggtccaggccctctgcatctcctcaggctccaaccctgcttcctcagcaatgagctctcctccagctttggctttgggaagccagactccagggactgaaaaggagcaacaaggagagggtctgcttgagaaatgccagatgcttggtccccaggaactaaggcgacagagtgcagggtgggggcaagactgggctgtaggggagctggactactttagtcttcctaaaggacaaaataaacagtattttatgcaggca

SEQ ID NO: 653887 - DNA, 325 bp, Homo sapiens
tggttccccttcctccttgttgtttctctccctcgtggcatgtgctgcgtttcttcctgggccgcgtcggcctcagcagttttggggtcattgcttcccgcagcggtgcgggggcctctttctcctgctcgtgcgcattcgtggtttcagccttggcctttgctgcgccctccgtcttcttcggtccgctttcgtggcctcctcttttgcagccgccgcgtccttctcgccttccttctcttcgccttcccttggcgtccttgtcgggcttctcctttgttctccttggcctcggcggtctgcggcccaagcttattccctttag

SEQ ID NO: 653888 - DNA, 1913 bp, Homo sapiens
  misc_feature (15)..(15): n is a, c, g, or t
  misc_feature (20)..(21): n is a, c, g, or t
  misc_feature (23)..(23): n is a, c, g, or t
tggctaagtgaggcngtggnntnaagttccgggctacagcagccgacgccgagaggcaccgtttcttcttaaaagagaaacgctgcgcgcgcgaggtgggcccctgtcttccagcagctccgggcctgctcgctaggcccgggaggcgcaggcgcaggcgcagtgggggtgagggcgcgtgggggcgcacagcctctggtgcacatggcttcctccccggcggtggacgtgtcctgcaggcggcgggagaagcggcggcagctggacgcgcgccgcagcaagtgccgcatccgcctgggcggccacatggagcagtggtgcctcctcaaggagcggctgggcttctccctgcactcgcagctcgccaagttcctgttggaccggtacacttcttcaggctgtgtcctctgtgcagccgagagtgcagcctggtgcccgggcttcgggggcctggcggccaagatggggggcttgtgtgggagtgctcagcaggccataccttctcctggggaccctctttgagccctacaccttcagaggcacccaagccagcctcccttccacatactactcggagaagttggtgttccgaggccacgagtgggcaggagcttgcagatttggaatctgagcatgatgagaggactcaagaggccaggttgcccaggagggtgggacccccaccagagaccttcccacctccaggagaggaagaggtagtgagcctgatgcccccagactactgccttcccctgtcacctgcacacctaaagagggggagacaccaccagcccctgcagcactctccagtcctcttgctgtgccggccttgtcagcatcctcattgagttccagagctcctccacctgcagaagtcagggtgcagccacagctcagcaggacccctcaagcggcccagcagactgaggccctggccaggtaacctgatggctgagacagaaagggcaggggcgtcctgggatgtggccctccctcgaggccctctgctccctctttgctgcccgtagcactgggagtcaggcccagtctgctccaaccccggcctgggatgaggacactgcacaaattggccccaagagaattaggaaagctgccaaaagagagctgatgccttgtgacttccctggctgtggaaggatcttctccaaccggcagtatttgaatcaccacaaaaagtaccagcacatccaccagaagtctttctcctgcccagagccagcctgtgggaagtctttcaactttaagaaacacctgaaggagcacatgaagctgcacagtgacacccgggactacatctgtgagttctgcgcccggtctttccgcactagcagcaaccttgtcatccacagacgtatccacactggagaaaaacccctgcagtgtgagatatgcgggtttacctgccgccagaaggcttccctgaactggcaccagcgcaagcatgcagagacggtggctgccttgcgcttcccctgtgaattctgcggcaagcgctttgagaagccagacagtgttgcagcccaccgtagcaaaagtcacccagccctgcttctagcccctcaagagtcacccagtggtcccctagagccctgtcccagcatctctgcccctgggcctctgggatccagcgaggggtccaggccctctgcatctcctcaggctccaaccctgcttcctcagcaatgagctctcctccagctttggctttgggaagccagactccagggactgaaaaggagcaacaaggagagggtctgcttgagaaatgccagatgcttggtccccaggaactaaggcgacagagtgcagggtgggggcaagactgggctgtaggggagctggactactttagtcttcctaaaggacaaaataaacagtattttatgcaggca

SEQ ID NO: 653889 - DNA, 330 bp, Homo sapiens
atacgtgttgcacatctggtccagttatcatgtgtgggtatgcaggaggagggggtaatctagaagccccacatctagtgggcttctatggaccccagatatgtccccttagggcagctcacatgcaaagcaaagcagatgagtcagcctggcttgggttgagggctcagtgcctcttagccttgcctggggttcttgacccttccggaaactgagccacatcagctcacgttactagcataaggtggtgatacaaacaatgctgaaatccattaagagcacgaaaggaaccagggatcccaggcccaggtagcacagaaacccaggcga

SEQ ID NO: 653890 - DNA, 872 bp, Homo sapiens
cgcagtggtcacacctgtaatcccagcactttgggaggcccaggcaggcagattacttgaagccaggagtcgagaccagccttgcaaatgggaaatgtgtctctaccaaaaatacaaaaattagcggggtgttatgacacacgcctgtaatcacagctactcgggaggctgagacacaagaaccccctggccgagtgcagtgctcatgcctataatccccagcacttgtgggacgacaaaggcagggtggatcatcaaggtcggaagtttgagaccagcctggccaaaatggggaaaacccatctcgtgaaaaaacacaaaaattagccagcgccatggtggttgcattgccttgtaatccccagttactgtgggcagacctgacggcaggagagtcgcttgaagccttgagaggcacaaggtgtgcaggtgaggccaaagaatccaacaaggtgactccagcctgggcgaccacaggagttaagactcttgtcttaacaaaaagacaaaacaaagacgtcactgtgaaccctgggcagacggaggttgggcaggtgagcccaaggaatcaattgcaccgcatccaagctggatgacaggagtgagaactcggtctcaacaaaacacaaaacagaccaaaaaaacacttggggcgccccagagaaagcttacaacccaacttggtgcgccgcgcggcccgatgaaaggtaacgagcctagcaggctcacgacacgcgccgagcagggggatcaccaaaaaacggcgaccggggctgcaacccagggcggggcacggggccaaagggcggccaataccccgcgcggccaacacggcgcacccacagacccaccacagaacgacacaaccaaac

SEQ ID NO: 653891 - DNA, 3040 bp, Homo sapiens
agcgggggggctctgggcagcctgggaactgccattgggattagtccgctccactcactgtcagcattaagtgggggtgcccaagacggggtggatggggggcgccctccagacctctgaccacggcctcaccgccactcgacccaactatgaagagcgcccccagctgcacgccaggacacgacctttccttcccctagaaaccagtaaaggccgctgccctattcaagatgaaatgtgtggaccgcccccagcccagttgaaatttcccgtgaaagtctctcgccccttccccacagctccacttcagtggactggagggcgcaggcctttgttctgactgcttctgtctgcctgcctcccacccgacgacactcacatggtagcgctgagcttcaacaccctgtatcatagaaggacggggtttggctccacacctgccactgctattgaaatagtttagtcttgccccagttcactgatgaggaaactgaggccctaacggcaggtggagccgggtccccgacccccgagatcggcagggcgctgaagacgtcccttccaccctccagcctctggtgcacatggcttcctccccggcggtggacgtgtcctgcaggcggcgggagaagcggcggcagctggacgcgcgccgcagcaagtgccgcatccgcctgggcggccacatggagcagtggtgcctcctcaaggagcggctgggcttctccctgcactcgcagctcgccaagttcctgttggaccggttaggggccgggagaagggcttgggggagggtacccaggcagcagcccctagcctcctctccagggcctgtcctgctgctcttttccaccctcaggtttctcactttaccaggacggcctgtgtgacttgtggcctccgagggtcctgctcccctcctcatggtctcagcgaatagcggcccttagggctggccccttacatgtgtgagtgcccagggctgagggtggctggccacctgagtcctgacctgcctcttctcctgctggcaggtacacttcttcaggctgtgtcctctgtgcaggtaggtaggggatggcagggggtgagagccagagggaagagggaccacagggtgacccagaaacaccctcctttcaaagggagccctgagtaagtttgggaagggtggggtgagttggggagcacagggtagtttgatggaggcaacctctgggtggggaagggagcaatgtctcaggatctagtgtgtctaggttctgaagaatgataaattggactggggctgaggttgccctggggtttgagggaacagggctccctgggtatggctctccagggtaagaggaggagacttcccagttcagcctgactgcttcccccacccctccaggtcctgagcctttgcctccaaaaggtctgcagtatctggtgctcttgtctcatgcccacagccgagagtgcagcctggtgcccgggcttcgggggcctggcggccaagatggggggcttgtgtgggagtgctcagcaggccataccttctcctggggaccctctttgagccctacaccttcagaggcacccaagccagcctcccttccacatactactcggagaagttggtgttccgaggccacgagtgggcaggagcttgcagatttggaatctgagcatgatgagaggactcaagaggccaggttgcccaggagggtgggacccccaccagagaccttcccacctccaggagaggaagaggtagtgagcctgatgcccccagactactgccttcccctgtcacctgcacacctaaagagggggagacaccaccagcccctgcagcactctccagtcctcttgctgtgccggccttgtcagcatcctcattgagttccagagctcctccacctgcagaagtcagggtgcagccacagctcagcaggacccctcaagcggcccagcagactgaggccctggccaggtaacctgatggctgagacagaaagggcaggggcgtcctgggatgtggccctccctcgaggccctctgctccctctttgctgcccgtagcactgggagtcaggcccagtctgctccaaccccggcctgggatgaggacactgcacaaattggccccaagagaattaggaaagctgccaaaagagagctgatgccttgtgacttccctggctgtggaaggatcttctccaaccggcagtatttgaatcaccacaaaaagtaccagcacatccaccagaagtctttctcctgcccagagccagcctgtgggaagtctttcaactttaagaaacacctgaaggagcacatgaagctgcacagtggtaagggaggtccagacgggctccatgatttggataacaactaattagaacctgagcctcctgacctccaatacggtgcactctgacacccgggactacatctgtgagttctgcgcccggtctttccgcactagcagcaaccttgtcatccacagacgtatccacactggagaaaaacccctgcagtgtgagatatgcgggtttacctgccgccagaaggcttccctgaactggcaccagcgcaagcatgcagagacggtggctgccttgcgcttcccctgtgaattctgcggcaagcgctttgagaagccagacagtgttgcagcccaccgtagcaaaagtcacccagccctgcttctagcccctcaagagtcacccagtggtcccctagagccctgtcccagcatctctgcccctgggcctctgggatccagcgaggggtccaggccctctgcatctcctcaggctccaaccctgcttcctcagcaatgagctctcctccagctttggctttgggaagccagactccagggactgaaaaggagcaacaaggagagggtctgcttgagaaatgccagatgcttggtccccaggaactaaggcgacagagtgcagggtgggggcaagactgggctgtaggggagctggactactttagtcttcctaaaggacaaaataaacagtattttatgcaggca

SEQ ID NO: 653892 - DNA, 1076 bp, Homo sapiens
ccagcactgagagcctaagctcctcgacctgcagatgcaaacaggcagccttagctaagcgggacaccctgaagctgcccagaagactgaggctgtggccaggtaacctgatggctgagacagaaagggcaggggcgtcctgggatgtggccctccctcgaggccctctgctccctctttgctgcccgtagcactgggagtcaggcccagtctgctccaaccccggcctgggatgaggacactgcacaaattggccccaagagaattaggaaagctgccaaaagagagctgatgccttgtgacttccctggctgtggaaggatcttctccaaccggcagtatttgaatcaccacaaaaagtaccagcacatccaccagaagtctttctcctgcccagagccagcctgtgggaagtctttcaactttaagaaacacctgaaggagcacatgaagctgcacagtgacacccgggactacatctgtgagttctgcgcccggtctttccgcactagcagcaaccttgtcatccacagacgtatccacactggagaaaaacccctgcagtgtgagatatgcgggtttacctgccgccagaaggcttccctgaactggcaccagcgcaagcatgcagagacggtggctgccttgcgcttcccctgtgaattctgcggcaagcgctttgagaagccagacagtgttgcagcccaccgtagcaaaagtcacccagccctgcttctagcccctcaagagtcacccagtggtcccctagagccctgtcccagcatctctgcccctgggcctctgggatccagcgaggggtccaggccctctgcatctcctcaggctccaaccctgcttcctcagcaatgagctctcctccagctttggctttgggaagccagactccagggactgaaaaggagcaacaaggagagggtctgcttgagaaatgccagatgcttggtccccaggaactaaggcgacagagtgcagggtgggggcaagactgggctgtaggggagctggactactttagtcttcctaaaggacaaaataaacagtattttatgcaggca

SEQ ID NO: 653893 - DNA, 426 bp, Homo sapiens
  misc_feature (127)..(128): n is a, c, g, or t
  misc_feature (145)..(146): n is a, c, g, or t
  misc_feature (159)..(159): n is a, c, g, or t
  misc_feature (164)..(165): n is a, c, g, or t
  misc_feature (286)..(287): n is a, c, g, or t
tggatttccctctcttggagagtaacccctgtctgtccagcctcctcccaacgaggaaccagaggaagcatatgtttgagagtgctttgtcaaactatcccaaagggttcagaatatgacgtcttcnnttcaaatgactaatctnntctgggtggttcntggcnnctctcatgtacttttcctgatgcagctttgtgttggagcccctgtacttggacgagctcacacaccttttttccaaatgccaaacccttctgccatgcctttcctgccccacaactggtanngtggtgaccctccaaggagggtggcaggcaggcagtgtgctaaaggccctgggacttgattcccaatccattttccatgtggctttgctctccttactgttctctaggcctctgtttccccatttataagtcaaggagg

SEQ ID NO: 653894 - DNA, 1654 bp, Homo sapiens
  misc_feature (246)..(246): n is a, c, g, or t
  misc_feature (260)..(260): n is a, c, g, or t
  misc_feature (285)..(285): n is a, c, g, or t
  misc_feature (290)..(290): n is a, c, g, or t
  misc_feature (293)..(293): n is a, c, g, or t
  misc_feature (437)..(437): n is a, c, g, or t
  misc_feature (770)..(770): n is a, c, g, or t
atcgcctctgaagaatacacccccagaaagaagtgactgcatggggttgggtgggaattccagggccctctgagcccggcttccccttgctgccagcaaggcagaccctctcccacagaagatgacagagaggaatcaagtgaaaagggaaaatgacccgggatgacagggaagctctaggctgagaagagcattcggcagggcatgtcagacattctggagtctgctgtggagaagatcaaagcngcccctggaagttnaactgtggaaaaatgggattctaangaagnggncagcccatgcaatttagtgagccaggatgccaacttaggtcagtgaaaagagaaatactttgatatttaggagttaaggttgaagagcctgttcccttaatagtgttctaggttgagagtgtgtgtgtgtgtgtttccaaagcngatttagaagaaaatcatatatatacccatggtgaactattaaaaagcaagcagttggggagatactgttgtacgtgaatactgacatcaagtaggatgatcatacttacccaaactgtttcccctctgcagcagatagtgcattcatgattaggtgaaccagggtgtcaccagagtgatactttgtacagggaacattgcaggacattgcagggtgagagtgtgaaaggaggtgagataatggaagtaaagcacagaattgggtgacaggagagttgagtggtcaggatgggatgggtgtggtactcatggtgtaggtgaggactgagcctnaaggaaacgagcaggccatgacagggagaactgctggggcacacgggccaggaagcggacagaggagcatgcctgccgggtcagctcagttcatctctccgtggaaggtggctatccttttgctcttctctccctaccacccacttccttctctagcaccacaaaaagtaccagcacatccaccagaagtctttctcctgcccagagccagcctgtgggaagtctttcaactttaagaaacacctgaaggagcacatgaagctgcacagtgacacccgggactacatctgtgagttctgcgcccggtctttccgcactagcagcaaccttgtcatccacagacgtatccacactggagaaaaacccctgcagtgtgagatatgcgggtttacctgccgccagaaggcttccctgaactggcaccagcgcaagcatgcagagacggtggctgccttgcgcttcccctgtgaattctgcggcaagcgctttgagaagccagacagtgttgcagcccaccgtagcaaaagtcacccagccctgcttctagcccctcaagagtcacccagtggtcccctagagccctgtcccagcatctctgcccctgggcctctgggatccagcgaggggtccaggccctctgcatctcctcaggctccaaccctgcttcctcagcaatgagctctcctccagctttggctttgggaagccagactccagggactgaaaaggagcaacaaggagagggtctgcttgagaaatgccagatgcttggtccccaggaactaaggcgacagagtgcagggtgggggcaagactgggctgtaggggagctggactactttagtcttcctaaaggacaaaataaacagtattttatgcaggca

SEQ ID NO: 653895 - DNA, 1718 bp, Homo sapiens
  misc_feature (310)..(310): n is a, c, g, or t
  misc_feature (324)..(324): n is a, c, g, or t
  misc_feature (349)..(349): n is a, c, g, or t
  misc_feature (354)..(354): n is a, c, g, or t
  misc_feature (357)..(357): n is a, c, g, or t
  misc_feature (501)..(501): n is a, c, g, or t
  misc_feature (834)..(834): n is a, c, g, or t
ggctgggggatgtttctgtccccaatctcattgcctgagaaatttgaggcacagaaggcaaggggtccaatccctacagtcaaccagagcacttggcacagcaggtaccaaggctggggagggccacagacactgggatggtgaggtgagggtagacagacaggggagaatgccgcccacagaagatgacagagaggaatcaagtgaaaagggaaaatgacccgggatgacagggaagctctaggctgagaagagcattcggcagggcatgtcagacattctggagtctgctgtggagaagatcaaagcngcccctggaagttnaactgtggaaaaatgggattctaangaagnggncagcccatgcaatttagtgagccaggatgccaacttaggtcagtgaaaagagaaatactttgatatttaggagttaaggttgaagagcctgttcccttaatagtgttctaggttgagagtgtgtgtgtgtgtgtttccaaagcngatttagaagaaaatcatatatatacccatggtgaactattaaaaagcaagcagttggggagatactgttgtacgtgaatactgacatcaagtaggatgatcatacttacccaaactgtttcccctctgcagcagatagtgcattcatgattaggtgaaccagggtgtcaccagagtgatactttgtacagggaacattgcaggacattgcagggtgagagtgtgaaaggaggtgagataatggaagtaaagcacagaattgggtgacaggagagttgagtggtcaggatgggatgggtgtggtactcatggtgtaggtgaggactgagcctnaaggaaacgagcaggccatgacagggagaactgctggggcacacgggccaggaagcggacagaggagcatgcctgccgggtcagctcagttcatctctccgtggaaggtggctatccttttgctcttctctccctaccacccacttccttctctagcaccacaaaaagtaccagcacatccaccagaagtctttctcctgcccagagccagcctgtgggaagtctttcaactttaagaaacacctgaaggagcacatgaagctgcacagtgacacccgggactacatctgtgagttctgcgcccggtctttccgcactagcagcaaccttgtcatccacagacgtatccacactggagaaaaacccctgcagtgtgagatatgcgggtttacctgccgccagaaggcttccctgaactggcaccagcgcaagcatgcagagacggtggctgccttgcgcttcccctgtgaattctgcggcaagcgctttgagaagccagacagtgttgcagcccaccgtagcaaaagtcacccagccctgcttctagcccctcaagagtcacccagtggtcccctagagccctgtcccagcatctctgcccctgggcctctgggatccagcgaggggtccaggccctctgcatctcctcaggctccaaccctgcttcctcagcaatgagctctcctccagctttggctttgggaagccagactccagggactgaaaaggagcaacaaggagagggtctgcttgagaaatgccagatgcttggtccccaggaactaaggcgacagagtgcagggtgggggcaagactgggctgtaggggagctggactactttagtcttcctaaaggacaaaataaacagtattttatgcaggca

SEQ ID NO: 653896 - DNA, 633 bp, Homo sapiens
  misc_feature (590)..(590): n is a, c, g, or t
gggacctgtgaattcagcattccgggccttcagaaagggaaaaattaaaggcaaaaagaattttttttttccccatttttttgaaactttcccccctaaaattccaaaattggccccctttttaaaaaaagggcccttaacccccaaaaaaaaatttttttttggccccccccgggggggaaaaaacaaaaaaaaaccagcgggggaaaaacaccacccccctcttttttagaggaggggggggttgaaaaaaataaaaaaaaaaaaatttttcccccctcttggggggaggggttcccccacaaaaaaaaaaaaaggggggggtgttttttttgggaggggcttaaaaaaccccccccaaaaattttttttttttataaaaaaaaaaaaaaaatggggggggggggggcgagacaacaaaaaactaggagggggggggtgttttttttttgttttttttggtttggggccgcccccccccctttttctttattattaaaaaaaaagattttttttttttttttttttccgaaaaaaaaagagcgccccatattttttttttttttttttaaagaaaaaaaaaaaagggncaccccgaaaaaaaaaaattttttttttttttccccccccctt

SEQ ID NO: 653897 - DNA, 2140 bp, Homo sapiens
  misc_feature (15)..(15): n is a, c, g, or t
  misc_feature (20)..(21): n is a, c, g, or t
  misc_feature (23)..(23): n is a, c, g, or t
tggctaagtgaggcngtggnntnaagttccgggctacagcagccgacgccgagaggcaccgtttcttcttaaaagagaaacgctgcgcgcgcgaggtgggcccctgtcttccagcagctccgggcctgctcgctaggcccgggaggcgcaggcgcaggcgcagtgggggtgagggcgcgtgggggcgcacagcctctggtgcacatggcttcctccccggcggtggacgtgtcctgcaggcggcgggagaagcggcggcagctggacgcgcgccgcagcaagtgccgcatccgcctgggcggccacatggagcagtggtgcctcctcaaggagcggctgggcttctccctgcactcgcagctcgccaagttcctgttggaccggtacacttcttcaggctgtgtcctctgtgcaggtcctgagcctttgcctccaaaaggtctgcagtatctggtgctcttgtctcatgcccacagccgagagtgcagcctggtgcccgggcttcgggggcctggcggccaagatggggggcttgtgtgggagtgctcagcaggccataccttctcctggggaccctctttgagccctacaccttcagaggcacccaagccagcctcccttccacatactactcggagaagttggtgttccgaggccacgagtgggcaggagcttgcagatttggaatctgagcatgatgagaggactcaagaggccaggttgcccaggagggtgggacccccaccagagaccttcccacctccaggagaggaagagggtgaggaagaagaggacaatgatgaggatgaagaggagatgctcagtgatgccagcttatggacctacagctcctccccagatgatagtgagcctgatgcccccagactactgccttcccctgtcacctgcacacctaaagagggggagacaccaccagcccctgcagcactctccagtcctcttgctgtgccggccttgtcagcatcctcattgagttccagagctcctccacctgcagaagtcagggtgcagccacagctcagcaggacccctcaagcggcccagcagactgaggccctggccagcactgggagtcaggcccagtctgctccaaccccggcctgggatgaggacactgcacaaattggccccaagagaattaggaaagctgccaaaagagagctgatgccttgtgacttccctggctgtggaaggatcttctccaaccggcagtatttgaatcaccacaaaaagtaccagcacatccaccagaagtctttctcctgcccagagccagcctgtgggaagtctttcaactttaagaaacacctgaaggagcacatgaagctgcacagtgacacccgggactacatctgtgagttctgcgcccggtctttccgcactagcagcaaccttgtcatccacagacgtatccacactggagaaaaacccctgcagtgtgagatatgcgggtttacctgccgccagaaggcttccctgaactggcaccagcgcaagcatgcagagacggtggctgccttgcgcttcccctgtgaattctgcggcaagcgctttgagaagccagacagtgttgcagcccaccgtagcaaaagtcacccagccctgcttctagcccctcaagagtcacccagtggtcccctagagccctgtcccagcatctctgcccctgggcctctgggatccagcgaggggtccaggccctctgcatctcctcaggctccaaccctgcttcctcagcaatgagctctcctccagctttggctttgggaagccagactccagggactgaaaaggagcaacaaggagagggtctgcttgagaaatgccagatgcttggtccccaggaactaaggcgacagagtgcagggtgggggcaagactgggctgtaggggagctggactactttagtcttcctaaaggacaaaataaacagtattttatgcaggcaaaaaaaacacaaaactgacagcacaaacaccagcacagaccaccacccggcaccacacaccaccacgacccaccaagacactcaagacagaccgaaacacgcaacgacacagacaacagttacagtcgagaaacaaacacagagagcacaacaacaaacgagagcataga

SEQ ID NO: 653898 - DNA, 830 bp, Homo sapiens
  misc_feature (18)..(18): n is a, c, g, or t
  misc_feature (99)..(99): n is a, c, g, or t
  misc_feature (147)..(147): n is a, c, g, or t
  misc_feature (155)..(155): n is a, c, g, or t
  misc_feature (268)..(268): n is a, c, g, or t
  misc_feature (354)..(354): n is a, c, g, or t
ttgggggttcccctgggnaaggaagattctggtccctggcctttaaaccccaccagggtaagcattcaatgaactgccctgcaagggaaaaatatccanttgaagaccagcagaggactattattcccagccccagaaactttccantgtgcaanttggccaaaggagacaccaaatcagaatggcttgttcagcagtaccatgctgtaggaggtacatttcccaggtcctgtaggcacaaacccctacttagcctgccttcccacantgccagtgtaatccatttgggacattcagcgctccaaacatttactagagctgaggcaaacctgggcttatggcgccacctagagntgaaaaggaggtagcgacctagcagtgaagatttgttgagcaaatatatgcaataaaaaccaaaacaagctggacagagaaaactggaataaataactaattcttccagtgcaaagacataggaaagacccacaagaaacaacagcaaacagggaatcatgaccttctcaaaaggacaaagcaaaaatcctggccgggcactgtggctcaagcctgtaatcccagcactttaggaggctgaggtgggcagactacctgaggtcaggagttcaagagcagcctggccagcctggcgaaaccctgtctctactgaaaatacaaaaaaaattagccaggcatggtggtgcatgcctataatcccagctacttgggaggctgaggcaggagaatcgcttgaacctgggaggcggagagtgcagtgagccgagatctccccactgcactctccagcctgggtaacagtgagacttccatca

SEQ ID NO: 653899 - DNA, 1936 bp, Homo sapiens
  misc_feature (15)..(15): n is a, c, g, or t
  misc_feature (20)..(21): n is a, c, g, or t
  misc_feature (23)..(23): n is a, c, g, or t
tggctaagtgaggcngtggnntnaagttccgggctacagcagccgacgccgagaggcaccgtttcttcttaaaagagaaacgctgcgcgcgcgaggtgggcccctgtcttccagcagctccgggcctgctcgctaggcccgggaggcgcaggcgcaggcgcagtgggggtgagggcgcgtgggggcgcacagcctctggtgcacatggcttcctccccggcggtggacgtgtcctgcaggcggcgggagaagcggcggcagctggacgcgcgccgcagcaagtgccgcatccgcctgggcggccacatggagcagtggtgcctcctcaaggagcggctgggcttctccctgcactcgcagctcgccaagttcctgttggaccggtacacttcttcaggctgtgtcctctgtgcaggtcctgagcctttgcctccaaaaggtctgcagtatctggtgctcttgtctcatgcccacagccgagagtgcagcctggtgcccgggcttcgggggcctggcggccaagatggggggcttgtgtgggagtgctcagcaggccataccttctcctggggaccctctttgagccctacaccttcagaggcacccaagccagcctcccttccacatactactcggagaagttggtgttccgaggccacgagtgggcaggagcttgcagatttggaatctgagcatgatgagaggactcaagaggccaggttgcccaggagggtgggacccccaccagagaccttcccacctccaggagaggaagagggtgaggaagaagaggacaatgatgaggatgaagaggagatgctcagtgatgccagcttatggacctacagctcctccccagatgatagtgagcctgatgcccccagactactgccttcccctgtcacctgcacacctaaagagggggagacaccaccagcccctgcagcactctccagtcctcttgctgtgccggccttgtcagcatcctcattgagttccagagctcctccacctgcagaagtcagggtgcagccacagctcagcaggacccctcaagcggcccagcagactgaggccctggccagcactgggagtcaggcccagtctgctccaaccccggcctgggatgaggacactgcacaaattggccccaagagaattaggaaagctgccaaaagagagctgatgccttgtgacttccctggctgtggaaggatcttctccaaccggcagtatttgaatcaccacaaaaagtaccagcacatccaccagaagtctttctcctgcccagagccagcctgtgggaagtctttcaactttaagaaacacctgaaggagcacatgaagctgcacagtgacacccgggactacatctgtgagttctgcgcccggtctttccgcactagcagcaaccttgtcatccacagacgtatccacactggagaaaaacccctgcagtgtgagatatgcgggtttacctgccgccagaaggcttccctgaactggcaccagcgcaagcatgcagagacggtggctgccttgcgcttcccctgtgaattctgcggcaagcgctttgagaagccagacagtgttgcagcccaccgtagcaaaagtcacccagccctgcttctagcccctcaagagtcacccagtggtcccctctgggatccagcgaggggtccaggccctctgcatctcctcaggctccaaccctgcttcctcagcaatgagctctcctccagctttggctttgggaagccagactccagggactgaaaaggagcaacaaggagagggtctgcttgagaaatgccagatgcttggtccccaggaactaaggcgacagagtgcagggtgggggcaagactgggctgtaggggagctggactactttagtcttcctaaaggacaaaataaacagtattttatgcaggca

SEQ ID NO: 653900 - DNA, 518 bp, Homo sapiens
ggcatccacacattgctggtgcatgggctggttatttcagcattgggtccaaagaagcggtgactggaaactgctggctgtctgggccgcacactagcaaggactctgagcagtgggcaggaggactccatgtggaacatgtgtgagcgcctagctgtatcagtgagagatggccttcttgcctggcatgagctctgctcacactcatggtaggtcttgtctgctggctcagcagtgaaatacgccagtggaacagagaaggcaaaattagggagctgggacaggtaccgatgagcctcccactcctggaagaggcggatcaggtactcgtagttccgggcccgcaagtccaggtgatcgatgagcagcagcatgcagagggggtcctcatccggctcgagactcaggttgagcttgaagtactccagtgccgtgcgctggcggcctcgctttctccaggaagctcatctgcttgtagagggcaggtagaagctctgtcctcgggtctgcggtcatcc

SEQ ID NO: 653901 - DNA, 1643 bp, Homo sapiens
  misc_feature (952)..(952): n is a, c, g, or t
  misc_feature (955)..(955): n is a, c, g, or t
  misc_feature (1343)..(1343): n is a, c, g, or t
  misc_feature (1643)..(1643): n is a, c, g, or t
taaggtttgagggggaatgctgggaaatggtaatggggtatggagacaatttcatataagtaatggctagggtgaggtggtaggaagttttttctcataggagggtgtattgagttgggctcgatagcggaactcgggggtagtgcgtggttcgaatttcataagaaacgaggggaggttagaaagttagggctctggggtgacaaacatagtggtgtggtggtagaagtgtctcagggggagagaggtggctgctcaatatgtgtgtgtggtctccatagagaagaattgggtaggtgggtggacggggtggttatattatatataatataagtggtgtgggtggtattcgcgggctatgtgaagaacaatagggcgcgagaaggtgggccttgtgcggagcggatattctccagaatgtgttagaaacgcccttggagagacatatggtctcgcgagactctcccccttatcaggcgaaatgtgctccacgaatgtggggtgtcctcgcggatggggagctccctcttgtggcatagcgtgtgtgggacgacaataaaatctccaatacttatagtgtgcgcccagaggtgtctcccagtgagagtgggccacgagcgagatgataaactccacgagagcggtgtgtcccctgggtgtgtggcgcgaacatacaagggggggcgacgccagggtgtatacacggcgtgaaagcgcccaccttttatatctagcctcacacgctggtgcgaacataagcgtaacacagtgtacgtggggccatagggggggtgacacactcccacatatgtgacagaccactgtgggtgaagagaggggaccataacgtgggctctccgccagtgtgggggcccgaaaatcaaggggggcggtaacgttcttgacgagcgttttcttgaggagtagtggtgtccccaacacccccttgtgnagntcccaacgaagggagcattctgacgacgtcgtcacaaacccccggcgtcatcaacaggggcataaagaaggggtgggggcgattacaaaacaaaatcacaacttttatcggggaaggggggcccaatggggttcgtcagccggttgttgtagcacccccacaggggcggcggtctgcggcgcaccacaagggggaggcggaaacgacaggcgcgacgggttccacccaacacacagcctcccacacacacacacaagaccgccgccacacatcgggcggctgcgacgaaacaagcccccccaaccaaggaggaccccgaccgagcgcgcaccgagcgtcgaagcttatccgggtaaccaacacagcgcgccatgcagacgacctggangcgcgacacaactcgacttgcacggcgggagggagaccaacagagccggagcggccacccatactggcgggtagtaaaacacgacacgtctgcaaatcagtcgccggcggtacaacggcagacaacagcgggagtggactcagccgacagacaccccccccgcgagaccgtacggccgaccacaacgacaagcgtcgtgggccccctagcgaggccgcgaccaacactctcgcgcgcaccacaggcagctgttaaacaccccccccaacaacataactcgcaccaaaaccaccacacagn

SEQ ID NO: 653902 - DNA, 411 bp, Homo sapiens
agctcctggtctgcggcaccaggagagcaagctgatcatcctggcaatggtgtggccatggcctcgtgcagatcatgcgtaactacatgttatgaaaatgctgctctggaccacagtctgtgtgctcataggtgctatcctgtgtgtcccacgcaataatgcctgccatttgtggaggcttggtgggatgcatgtgcctggtgtaaagcaccgtgaccagacaacagccccctgcttgatgcagaactgcacttgtggacccttgcgcaaccatctcagatgtggccaccaagcaggagggcctggagagtgtgctgaaggattctggtgaatcagctgagtgtggatgagcgtccacgaattcaactgtgccacgggcaaactctccaagctgacatgcagacacagctt

SEQ ID NO: 653903 - DNA, 631 bp, Homo sapiens
  misc_feature (564)..(564): n is a, c, g, or t
cctcacattgccttaaaattgctcttgttgaacatcgatgcaaaaatcctcaataaaatactagcaaaccgaatccagcagcacatcaaaaagcttatccaccacgatcaagtcggcttcaaccctgggatgcaaggctggttcaacataagcaaatcaataaatgtaatccatcacataagcagaaccaatgacaaaaaccacatgattatctcaatagatacagaaaagaactttgacaaaattcaacagcccttcacgctaaaaactctcaataaactaggtattgacggaacgtatctcaaaataataagagctgtttatgacaaacccacagccagtatcatactgaatgggcaaaaactggaaacattcccgttgaaaactggcaagacagggatgccctctctcaccactcctattcaacatagtgacgaaagttctggccagggcaatcaggcaagagaaataaataaagggtattcaagtaggaaaagaggaagtcaaattgtccctgtttgcagatgacatgatgtatatttagaaaaccccattgtctcagcnccaaatctccttaagctgataagcaacttcagcaagtctcaggatacaaatgaatggtgaaatcaca

SEQ ID NO: 653904 - DNA, 433 bp, Homo sapiens
aattaatagatctgcctatatgcggtcagttaaataggtatcatgagcagccactcctaagttcccagtcgtctttcagtgggcaccgttcgtcttatcaagtcagcaatcatttggctgtgacccttacccaaggctaagccaagtcccagctgtcagaccccgtaaagacatgatccttgcctttcaggagcccacaatgtgagctggctggtgaaatttggacacgaacacatggctgacaatgtaatgagcaactacgaagctacacatgaaagcatctccctatttgacaagtcagaagttattcgacgtgatatttaatccagtgcctcatgagtcatatatacttcataccacatagcgatcaaggtacggagagtagtactactcatcacccgcatgctgacgtgggtctgtaaggaccctcggg

SEQ ID NO: 653905 - DNA, 272 bp, Homo sapiens
ggagcttctgggagccccctttcagccttacctgggcccctcctctagagaagagctcaactctctcaccaacctctccatggaaagggaattattatgtatggcgctgaggctatgaggccctacctcatgcctaacaaagggttcaaggctgggtctagagaggatgcttaaggaagggaggtatgagtccgtaggtcaaaagccccatcctcggactgttgtccctaggagcttaagaaatttgataccattaaatggtaaagtcttga

SEQ ID NO: 653906 - DNA, 169 bp, Homo sapiens
ttccccgtctctctctgctgcggagtgggtcctgaagtgacggctgccagcttggggaattagagggctcagacagtctgctgtggatcgtgtgggggcagtggacgccctgacatctgcaggccggttcttctcaatcacctctcgcagccctttggccaagtggaga

SEQ ID NO: 653907 - DNA, 588 bp, Homo sapiens
  misc_feature (154)..(154): n is a, c, g, or t
ccaagttatcccggaacgctttgccctgccccggagaaagcgccctttttctttttcatttatgaggtggagccctcgcgcaccaagccttttccccgtaagaagcttggggaccggaaggcgcaaagaccaatgctggagtttttaacccagntggatggcttccagcccaacccccaagttaaggtaattgcacccccaaacagggtggacttcttggacccccccctcctccgttggggcccccttgcccgcaaaataaagttcccgatgcccaatgaggaggcccgggccaaattcatgcagttcccctcccgaaaaatgaatgtcagtcctgacgttaattaagaggggggggccccctgcccaaataatttcaatggggcccagtccaaggctgtgtgtttggaggcgggcattttccccctgcgcaggggtcccccggggttccccccccagggataacatggaaggcttcttggaggtgcaggccaaaaaaaaaccccccctccaatattacccctagggcccccaggcccccccccttttcccggttgaagggcccaataaaaaatggtttagggtcca

SEQ ID NO: 653908 - DNA, 343 bp, Homo sapiens
  misc_feature (53)..(53): n is a, c, g, or t
  misc_feature (101)..(101): n is a, c, g, or t
taagacttttccttttggtcatggtgggagggctggttgctgaaaacaaatanccagagcccattgtggaggtcagctgacaaggccgcatgaccttggcnaatggactacctggtcatctgggactgcttaggactgtgcaatggaacttgggggcaaaactgatggagacagccaatggcctttaaacccagcagccaaaaacatattaattttttagtgggcgaaccccagggcttatcaaagtgtggttcttggaccacgtgcatcagtatcagctgtaagtatttggcaaaatgcagattcccgggccctgcaccaacagattgactttgaatctctg

SEQ ID NO: 653909 - DNA, 246 bp, Homo sapiens
ggcagagggtcagacacttccattagcttgtggtcatcttcactctcacatggtacacacattctttcttctgctcctgggggacgacttcatttgaagaattatctttatttttaccttctagagatttttcacctaaatactcagtcctacttatttcattgtctgttgtggcggatatattcctttcctcttcagtatcattttaactgaccttaacccctactctgaacttcctggagagac

SEQ ID NO: 653910 - DNA, 490 bp, Homo sapiens
ctgtacacatcagacatcatcaagcaagctctcatgttttatccatttacaagatgaacctcagagaggggaagtcacttgtcagtgtgactcaaggcaaatctgaggctaagtccagaagtttcctacctccctccagccacttccctgattgcctggaactaatccagagtttccttgggttaatttctgattctgctcttctcaaggtatctgaggctgggtcttaggacatgaaaccaagccccagccatcagacagactgggtatcaacaggtttctctctgactgcctgggacctgccctgcatttgtggaggttcacatctgcttggtgcactgggctgggctctcagtagaccagggttcaaatcctgcgtctgcaaactgcttgctatgtggcgttaagcaaaacaaaacaaaacacctcctggtactccttttctgatagaggttttgtaacagggagagagtaaagagatgagaccaca

SEQ ID NO: 653911 - DNA, 415 bp, Homo sapiens
ctcagaggatcaggagccagccctgaagtccagaaattttgactaagcctctgtcattagggtctcccagctcatccataggctaatgccaaactttcacaacagctagtggttctcatgacacctcctcctggtagaaaggaaagaataagtcaaaaggacctgggccacagattctgtcctcttgagtcattgattttgcctccctaaactatatcttaagatagattactctgtgaaagctggatgaccattgccagacaatttaaaaagtatatatatcaatatgaaatggattgatgataatattgcatattatagtttatagcacatggatggtattgcttttatccattttctttattttttgaaaattgaatttgtgattttaaacattaaagataatagaaaaatt

SEQ ID NO: 653912 - DNA, 208 bp, Homo sapiens
  misc_feature (4)..(4): n is a, c, g, or t
  misc_feature (26)..(26): n is a, c, g, or t
  misc_feature (30)..(30): n is a, c, g, or t
  misc_feature (55)..(55): n is a, c, g, or t
  misc_feature (91)..(91): n is a, c, g, or t
  misc_feature (93)..(93): n is a, c, g, or t
  misc_feature (129)..(129): n is a, c, g, or t
  misc_feature (144)..(144): n is a, c, g, or t
  misc_feature (156)..(156): n is a, c, g, or t
  misc_feature (171)..(171): n is a, c, g, or t
tgtnttcacacagtttcatagagagngtgngtgtgtgcgtgcatttgtgatgacntgagagcaatagagagagagcctagtctagagacanangatgctagatgtgcatatgtgttcctatgcaatagntgttttcccagttantcaaagcagctntctatatgtagagancaaattattaagtgttccaatcaataaataaagcact

SEQ ID NO: 653913 - DNA, 390 bp, Homo sapiens
ttccaaataaataaataaccaaccaaccaaccaaataaaccaaaaaaaaaagggaaagggttagggaaaaaaaaaaagaccatttttaatagtttttaaaaaaaaaaaagttgggggtagtggctccccccgtaatcccagccctttgggaggttgaggcaggaggttctttggagcccaggagttcaagccctgcttaggcaacatggcaaaaccctgttttttttaaaaatccaaaaaaagtagctggacgtggtggtgtgcctgtagtcccaccccctcgggaggttaaggcaggaaaattgtttgaacttgggaggtaaaggttccagtgacccaagttcgcccccctttattccagcttgggcaacaaagcaagactccttttca

SEQ ID NO: 653914 - DNA, 384 bp, Homo sapiens
acagcattcccagtggcaaacatctacttgaggcaaaatgtcccccgtgtattgagtgccactatcgccacgacaagtgactggtatctattgtgtggcaccctactttggtgtgtccttggcgaagtgtgggtacacaaatggttgttgcttgtgagcccactggaaagctacactgtgtcctggtagtctgggcatctggggcccattcacttagcacgacggcatctcatcttctccatgtcatagtgagaaaccatccaggaggttctgcacagacaccaactcctggccaggcgtggtggttcaactccagcactttgggaggccaaggtgggtggatcacttgattgcccggagtcatgaccaacctggccaaccaca

SEQ ID NO: 653915 - DNA, 204 bp, Homo sapiens
  misc_feature (21)..(21): n is a, c, g, or t
  misc_feature (53)..(53): n is a, c, g, or t
  misc_feature (63)..(63): n is a, c, g, or t
  misc_feature (178)..(178): n is a, c, g, or t
tttcattatctataaaattangaaagcaactacctcctaggatggttgtgaangttaaattangtaatatatacgaactcctaatacagagcatgacacttagtaaatcagaaatgttagtagcattgttatttaaataaaacaataaaaaaccctgagtaattaactataaaaatcnactgtaaaaaaattagctgacagata

SEQ ID NO: 653916 - DNA, 275 bp, Homo sapiens
  misc_feature (115)..(115): n is a, c, g, or t
  misc_feature (126)..(127): n is a, c, g, or t
  misc_feature (259)..(259): n is a, c, g, or t
  misc_feature (268)..(268): n is a, c, g, or t
gcgagaaggactgcgggcaggaccggcgggctcctggggttcagccgtgccgcctcgttacgatgaccagtgtggttaagacagtgtatagcctgcagcccccctctgcgctganggcctgccacnnctaggacacacaaactcgggccacttctaagagtctcttacctgttaggtccaaagaagtcgatgtttccaaacagcttcattcaggaggtccagagaatgatgttacaaaaatcaccaaacttgagacgangagaattgnggcaaat

SEQ ID NO: 653917 - DNA, 305 bp, Homo sapiens
cgaggaagtaaatgtccccacttgggaatggggaaattgtccccactcggggctgggcaagatggaactgcagagccagcatcactaggaaagctccaggttcacatctcattgtcaggagcccgcttaaaaaaataaattacaaaatggttatttggggaagagacagataaactgctttttccccttcaggtgcagcaggaattgggcagactacagatcagtccgtgcgctggctgccttgggggcgtatttaggcatcagttcatttatcttccggatatagtcagacttttctgcacagc

SEQ ID NO: 653918 - DNA, 936 bp, Homo sapiens
  misc_feature (7)..(7): n is a, c, g, or t
  misc_feature (271)..(271): n is a, c, g, or t
  misc_feature (583)..(583): n is a, c, g, or t
cccccancccgccctccagctcccagcatggttactacggaaaaactttgcctagagaagtcacactccccaaatccaggatgtccccaaagaagatatgcaaaggccccaggaaggagtcccagctctcactgggtggccagagctgtgcaggagagccagatgaggaactggttgtgccttccctatttttgtccggaatgccatcctaggccagaaacagcccaagaggcccaggtcagagtcctcttgcagcaaagatgtggtaagnacaggcttcgatgggctcggtggccggacaaaattcatccagcctactgacacagtcatgatccgcccattgcctgttaagcccaagaccaaggttaagcagagggtgagggtgaagacagtgccttctctcttccaggccaagctggacaccttcctgtggtcgtgagaacagtgagtctgaccaatggccagacacatgcctgcaacttgtaggtcaaggactgtccaggcaggggttttgtggacagagccccactttcgggaccagcctgaggtgtaagggcagacaaacaggtgagggtgagtgtgncacccagagactgctcttcctgccctcaccctgccccactcctacgactgggagctgacatgaccagcccactgatcctgtcagcaggtcctgctcctgttgccaggctcctgtttatagccatgatcagatgtggtcagactctttctgggcctggagaccacggtcacttgttgactgtctctgtggaccagagtgcttgaggcatctcaggcagcctcagcccaagcttctacctgcctttgacttgcttctaggcatagcctgggccaagcagggtggggaatggaggatagcatgggatgtatggagaggatggaagattttcatgtaaaataaaattaaaaaaaaaa

SEQ ID NO: 653919 - DNA, 245 bp, Homo sapiens
tgctcttttgacagagtccagcgagaaactaggtcttcgcatctgtgatagaggaagcctcacaagccgaaacttcttcctatgtggcaagcagctcaaccaccattgtggggttacacattgctgctgcactaagaccgactcaaatacagaaggctccatgacgtgactgggtccgtattccccagacctacctcccgtggcagcaggggacctgacagcgtttcacagacacaaccgggggg

SEQ ID NO: 653920 - DNA, 1174 bp, Homo sapiens
  misc_feature (7)..(7): n is a, c, g, or t
  misc_feature (271)..(271): n is a, c, g, or t
  misc_feature (323)..(323): n is a, c, g, or t
  misc_feature (332)..(332): n is a, c, g, or t
  misc_feature (363)..(363): n is a, c, g, or t
  misc_feature (422)..(422): n is a, c, g, or t
  misc_feature (445)..(445): n is a, c, g, or t
  misc_feature (487)..(487): n is a, c, g, or t
  misc_feature (490)..(490): n is a, c, g, or t
  misc_feature (492)..(492): n is a, c, g, or t
  misc_feature (544)..(544): n is a, c, g, or t
  misc_feature (821)..(821): n is a, c, g, or t
cccccancccgccctccagctcccagcatggttactacggaaaaactttgcctagagaagtcacactccccaaatccaggatgtccccaaagaagatatgcaaaggccccaggaaggagtcccagctctcactgggtggccagagctgtgcaggagagccagatgaggaactggttgtgccttccctatttttgtccggaatgccatcctaggccagaaacagcccaagaggcccaggtcagagtcctcttgcagcaaagatgtggtaagnacaggcttcgatgggctcggtggccggacaaaattcatccagcctactgacntatcctttncctgtgatgttgagctgggctgaactgtggngcccatactatgcctcacctatacccccagcctgccagtgccaacagcctcaggtgtgnagtgctgggcctcattctgtgtntcagcgccgcccacccccggctctgagcctttcttgccctgnatngnagtcctttctcgccctgcatggcagtcctttctccatgcctcttccttaacngctcctccaaactaaaacagtcatgatccgcccattgcctgttaagcccaagaccaaggttaagcagagggtgagggtgaagacagtgccttctctcttccaggccaagctggacaccttcctgtggtcgtgagaacagtgagtctgaccaatggccagacacatgcctgcaacttgtaggtcaaggactgtccaggcaggggttttgtggacagagccccactttcgggaccagcctgaggtgtaagggcagacaaacaggtgagggtgagtgtgncacccagagactgctcttcctgccctcaccctgccccactcctacgactgggagctgacatgaccagcccactgatcctgtcagcaggtcctgctcctgttgccaggctcctgtttatagccatgatcagatgtggtcagactctttctgggcctggagaccacggtcacttgttgactgtctctgtggaccagagtgcttgaggcatctcaggcagcctcagcccaagcttctacctgcctttgacttgcttctaggcatagcctgggccaagcagggtggggaatggaggatagcatgggatgtatggagaggatggaagattttcatgtaaaataaaattaaaaaaaaaa

SEQ ID NO: 653921 - DNA, 1081 bp, Homo sapiens
  misc_feature (7)..(7): n is a, c, g, or t
  misc_feature (271)..(271): n is a, c, g, or t
  misc_feature (323)..(323): n is a, c, g, or t
  misc_feature (332)..(332): n is a, c, g, or t
  misc_feature (363)..(363): n is a, c, g, or t
  misc_feature (422)..(422): n is a, c, g, or t
  misc_feature (445)..(445): n is a, c, g, or t
  misc_feature (487)..(487): n is a, c, g, or t
  misc_feature (490)..(490): n is a, c, g, or t
  misc_feature (492)..(492): n is a, c, g, or t
  misc_feature (544)..(544): n is a, c, g, or t
cccccancccgccctccagctcccagcatggttactacggaaaaactttgcctagagaagtcacactccccaaatccaggatgtccccaaagaagatatgcaaaggccccaggaaggagtcccagctctcactgggtggccagagctgtgcaggagagccagatgaggaactggttgtgccttccctatttttgtccggaatgccatcctaggccagaaacagcccaagaggcccaggtcagagtcctcttgcagcaaagatgtggtaagnacaggcttcgatgggctcggtggccggacaaaattcatccagcctactgacntatcctttncctgtgatgttgagctgggctgaactgtggngcccatactatgcctcacctatacccccagcctgccagtgccaacagcctcaggtgtgnagtgctgggcctcattctgtgtntcagcgccgcccacccccggctctgagcctttcttgccctgnatngnagtcctttctcgccctgcatggcagtcctttctccatgcctcttccttaacngctcctccaaactaaaacagtcatgatccgcccattgcctgttaagcccaagaccaaggttaagcagagggtgagggtgaagacagtgccttctctcttccaggccaagctggacaccttcctgtggtcgtgagaacagtgagtctgaccaatggccagacacatgcctgcaacttgtaggtcaaggactgtccaggcaggggttttgtggacagagccccactcctacgactgggagctgacatgaccagcccactgatcctgtcagcaggtcctgctcctgttgccaggctcctgtttatagccatgatcagatgtggtcagactctttctgggcctggagaccacggtcacttgttgactgtctctgtggaccagagtgcttgaggcatctcaggcagcctcagcccaagcttctacctgcctttgacttgcttctaggcatagcctgggccaagcagggtggggaatggaggatagcatgggatgtatggagaggatggaagattttcatgtaaaataaaattaaaaaaaaaa

SEQ ID NO: 653922 - DNA, 151 bp, Homo sapiens
  misc_feature (116)..(116): n is a, c, g, or t
tattctgtgtgcgcgtgtttcatttcagttcagaagatcatttgttatctggagtctctatgctgagcatctcttcacttcagactgagatccgctgtcactctaagatgagcacntttgcctcggagtgttctagcagcggagcatggta

SEQ ID NO: 653923 - DNA, 115 bp, Homo sapiens
accgtcatcgaaaccctatatagtcaatcacactagtacaccattaattgaaataaaactattaataccactgtctatagggtttgatgaccagcgtttgtgacagaggtttgat

SEQ ID NO: 653924 - DNA, 759 bp, Homo sapiens
gctgatgtacgaggacggcccgggtgtgtacttcatcacgggctggggtgttgctatcttgtgcttggtcgtgcctcaaattcctggactcaagcaatcctcctgtctcagccttgagccaccctgcctggcccctaaggcacagttttaaaaataagtaaatagcgaggcgcggtggctcacacctgtaattccagcactttgggaggccgagctgggcagatcacttgaggccagtaattcgagaccagcctggccaacatggcaaaacctcgtccctactaaaaatacaaaaaaattagctaggcatgctggtggcgcaggcttgtagtcccagctactcaggagactgaggcatgagaattgttagaacccagaaagtggagactctgtctcacaaaaaaaattaaaaataaatagctgggtgcggtggctcaagccagtaatcccagcactttgggaggctgaggcgggcagatcacaggtcaggagatcgagaccatcctgggctaacacggtgaaaccctgtctctactaaaaatacaaaaactagctgggtgtggtggcgggcgcctgtggtcccggctgctcaggaggctgaggcacggagacatgacgtgagcctgggaggcggagattgcagggagccgagatcatgccactgcactccagcctgggcaaccagagcaggttcatctcaaaaaaaaccacaacaaacaaaaaaaaatttttttttttttttgggaaaaaaaaaaccgg

SEQ ID NO: 653925 - DNA, 312 bp, Homo sapiens
ctcacctaataaatataataataaataaataaataaataaataataaaaacaaagttgattaagaaaggaagtataggctaggcacagtggctcacacctgtaatccttgcattttggaaggctgaggcaggaggatcactttaggcctggtgtgttcaagaccagcctggtcaacatagtgagacactgtctctaccaaaaaaaggaaggaagggacacatatcaaactgaagagaactcacaagagaagattcatttagaaaaataagtgggatgggggtagagggagaggaaactgccctttctggtgg

SEQ ID NO: 653926 - DNA, 337 bp, Homo sapiens
tatagaggcggctcattaaccaaggcctgtttgttcagattcttttctatgtccctgtgtttcagagataagggcattcctttcatccaggtatagggtagatacttctggtaatgaaggttgttgttgttgttgttgtttttgagatggagtttcgctcttcttgcccaggctggagcagtggcacaatctcagctcaccacaacctctgcctcccgagtagctgagattacaggtgcctgccaccatgcccggctaattttttgtatttttggttgagacagagtttcactatgttggccagactggtctcgagctcctgacctcaggtgatctg

SEQ ID NO: 653927 - DNA, 249 bp, Homo sapiens
gtcgaccagcatctgtgtgtctgtgtgtgtgttcagcatctgtgtgtctgtgtgtgtgttcagcatctgtgtgtctgtgtgtgtgttcagcatctgtgtgtctgtgtgtgtgttcagcatctgtgtgtctgtgtgtgtgttcagcatctgtgagtctgttgttttaacctgtagccatcttgtatttgtgtatatctcggccgcttatgtacagtgtgcgtgtttgacctgtgtgactttacgtcgacg

SEQ ID NO: 653928 - DNA, 489 bp, Homo sapiens
  misc_feature (149)..(149): n is a, c, g, or t
gaacggagccgccttggcctcggggtctccgtacaccaacggtccggtccaaaatgcattgcggtcttcacaagagtcagtgagccaaggatacaatttccagcttccaggatcctaccctcatccaataccagcaaagactttgaatncagtctctggacagtctaactatggtggttctcagggatctgggcagactcttaatagaccacctgtggcctctaatccagtgacaccttcgcttcatagtggtcctgctccccgaatgccattacctgcttctcagaacccagctactacaccaatgccttctagtagctttcttcctgaagccaacctgccaccacctttgaattggcaatataactatccatccacagcctcacaaacaaaccattgtcctcgtgcatcatcccaaccaactgtatctggaaatacaagtttaaccacaaatcatcaatatgtttcttctggatatccttcacttca

SEQ ID NO: 653929 - DNA, 407 bp, Homo sapiens
gtgggagcagatgctctcatcctcatgtcgggctgtgcagtgagccatgatcaccagcattgttgatgatgacagctaggctgtcagactgtcgcaatggacttcatctcccttcttgagaaagacaagaggttgcctgagtacaccgacatgctgggggggtcccaggttaggatgacttcccctgagcttgaaggtatgaaagtgggagaccgggcgtatcaggtcctctgtctgtgaatagcatccgctggggtgtgctgctctggacgtcttccccattcactcggcagcagatctttaagttgtgtggatctgctacactgtccttggtcaccaaggcagggcccagagggcagaaggtgtcgaaggtttttcccagcagccactgtttcccagtgcttcag

SEQ ID NO: 653930 - DNA, 180 bp, Homo sapiens
cctgtgcaatggcttagaagcaggcactccccagcctgctgcagcactcactgtgctcaagcctgcagtgctcatcatggtagctgggagctgtggactgggagtcaccagtgtgtgtggtgtgccaatgccagtgtactcatagactttttgccgcctcccattcatgagcctgtgtca

SEQ ID NO: 653931 - DNA, 3214 bp, Homo sapiens
  misc_feature (2302)..(2302): n is a, c, g, or t
  misc_feature (2305)..(2305): n is a, c, g, or t
  misc_feature (2311)..(2311): n is a, c, g, or t
  misc_feature (2318)..(2318): n is a, c, g, or t
  misc_feature (2344)..(2344): n is a, c, g, or t
  misc_feature (2347)..(2347): n is a, c, g, or t
  misc_feature (2349)..(2349): n is a, c, g, or t
  misc_feature (2353)..(2353): n is a, c, g, or t
  misc_feature (2357)..(2357): n is a, c, g, or t
  misc_feature (2379)..(2379): n is a, c, g, or t
  misc_feature (2382)..(2382): n is a, c, g, or t
  misc_feature (2384)..(2384): n is a, c, g, or t
  misc_feature (2386)..(2386): n is a, c, g, or t
  misc_feature (2388)..(2388): n is a, c, g, or t
  misc_feature (2390)..(2391): n is a, c, g, or t
  misc_feature (2393)..(2393): n is a, c, g, or t
  misc_feature (2401)..(2401): n is a, c, g, or t
  misc_feature (2412)..(2413): n is a, c, g, or t
  misc_feature (2416)..(2416): n is a, c, g, or t
  misc_feature (2422)..(2422): n is a, c, g, or t
  misc_feature (2438)..(2438): n is a, c, g, or t
  misc_feature (2451)..(2451): n is a, c, g, or t
  misc_feature (2460)..(2460): n is a, c, g, or t
  misc_feature (2465)..(2465): n is a, c, g, or t
  misc_feature (2468)..(2468): n is a, c, g, or t
  misc_feature (2471)..(2471): n is a, c, g, or t
  misc_feature (2475)..(2475): n is a, c, g, or t
  misc_feature (2477)..(2477): n is a, c, g, or t
  misc_feature (2488)..(2488): n is a, c, g, or t
  misc_feature (2494)..(2494): n is a, c, g, or t
  misc_feature (2505)..(2505): n is a, c, g, or t
  misc_feature (2507)..(2507): n is a, c, g, or t
  misc_feature (2513)..(2513): n is a, c, g, or t
  misc_feature (2522)..(2522): n is a, c, g, or t
  misc_feature (2531)..(2531): n is a, c, g, or t
  misc_feature (2537)..(2537): n is a, c, g, or t
  misc_feature (2550)..(2550): n is a, c, g, or t
  misc_feature (2556)..(2556): n is a, c, g, or t
  misc_feature (2593)..(2593): n is a, c, g, or t
  misc_feature (2609)..(2609): n is a, c, g, or t
  misc_feature (2612)..(2612): n is a, c, g, or t
  misc_feature (2620)..(2620): n is a, c, g, or t
  misc_feature (2626)..(2626): n is a, c, g, or t
  misc_feature (2630)..(2630): n is a, c, g, or t
  misc_feature (2659)..(2659): n is a, c, g, or t
  misc_feature (2673)..(2673): n is a, c, g, or t
  misc_feature (2730)..(2730): n is a, c, g, or t
  misc_feature (2756)..(2756): n is a, c, g, or t
  misc_feature (2785)..(2785): n is a, c, g, or t
  misc_feature (2787)..(2787): n is a, c, g, or t
  misc_feature (2804)..(2804): n is a, c, g, or t
  misc_feature (2813)..(2813): n is a, c, g, or t
  misc_feature (2830)..(2830): n is a, c, g, or t
  misc_feature (2834)..(2834): n is a, c, g, or t
  misc_feature (2838)..(2838): n is a, c, g, or t
  misc_feature (2847)..(2847): n is a, c, g, or t
  misc_feature (2851)..(2851): n is a, c, g, or t
  misc_feature (2858)..(2858): n is a, c, g, or t
  misc_feature (2865)..(2865): n is a, c, g, or t
agcgggggggctctgggcagcctgggaactgccattgggattagtccgctccactcactgtcagcattaagtgggggtgcccaagacggggtggatggggggcgccctccagacctctgaccacggcctcaccgccactcgacccaactatgaagagcgcccccagctgcacgccaggacacgacctttccttcccctagaaaccagtaaaggccgctgccctattcaagatgaaatgtgtggaccgcccccagcccagttgaaatttcccgtgaaagtctctcgccccttccccacagctccacttcagtggactggagggcgcaggcctttgttctgactgcttctgtctgcctgcctcccacccgacgacactcacatggtagcgctgagcttcaacaccctgtatcatagaaggacggggtttggctccacacctgccactgctattgaaatagtttagtcttgccccagttcactgatgaggaaactgaggccctaacggcaggtggagccgggtccccgacccccgagatcggcagggcgctgaagacgtcccttccaccctccagcctctggtgcacatggcttcctccccggcggtggacgtgtcctgcaggcggcgggagaagcggcggcagctggacgcgcgccgcagcaagtgccgcatccgcctgggcggccacatggagcagtggtgcctcctcaaggagcggctgggcttctccctgcactcgcagctcgccaagttcctgttggaccggttaggggccgggagaagggcttgggggagggtacccaggcagcagcccctagcctcctctccagggcctgtcctgctgctcttttccaccctcaggtttctcactttaccaggacggcctgtgtgacttgtggcctccgagggtcctgctcccctcctcatggtctcagcgaatagcggcccttagggctggccccttacatgtgtgagtgcccagggctgagggtggctggccacctgagtcctgacctgcctcttctcctgctggcaggtacacttcttcaggctgtgtcctctgtgcaggtaggtaggggatggcagggggtgagagccagagggaagagggaccacagggtgacccagaaacaccctcctttcaaagggagccctgagtaagtttgggaagggtggggtgagttggggagcacagggtagtttgatggaggcaacctctgggtggggaagggagcaatgtctcaggatctagtgtgtctaggttctgaagaatgataaattggactggggctgaggttgccctggggtttgagggaacagggctccctgggtatggctctccagggtaagaggaggagacttcccagttcagcctgactgcttcccccacccctccaggtcctgagcctttgcctccaaaaggtctgcagtatctggtgctcttgtctcatgcccacagccgagagtgcagcctggtgcccgggcttcgggggcctggcggccaagatggggggcttgtgtgggagtgctcagcaggccataccttctcctggggaccctctttgagccctacaccttcagaggcacccaagccagcctcccttccacatactactcggagaagttggtgttccgaggccacgagtgggcaggagcttgcagatttggaatctgagcatgatgagaggactcaagaggccaggttgcccaggagggtgggacccccaccagagaccttcccacctccaggagaggaagagggtgaggaagaagaggacaatgatgaggatgaagaggagatgctcagtgatgccagcttatggacctacagctcctccccagatgatagtgagcctgatgcccccagactactgccttcccctgtcacctgcacacctaaagagggggagacaccaccagcccctgcagcactctccagtcctcttgctgtgccggccttgtcagcatcctcattgagttccagagctcctccacctgcagaagtcagggtgcagccacagctcagcaggacccctcaagcggcccagcagactgaggccctggccaggtaacctgatggctgagacagaaagggcaggggcgtcctgggatgtggccctccctcgaggccctctgctccctctttgctgcccgtagcactgggagtcaggcccagtctgctccaaccccggcctgggatgaggacactgcacaaattggccccaagagaattttggaaatgcttgccaaaatgatgatgcttgattgcctttgttgtatctttcctcttgtgtcttgttgtgntgngaatcnttcctcncaatcacgggcaaggtatttttgaangtnanccancaanaaaatgtacccagcaacaagcncancntnangnngntttttttntccttgccccnngangcgcangcccttgttggggaangttctttttcaanctttttaangaaancanccnttgnangggaggcacanttgaangtttgcaacangntgacanccccggggnacatacaantcttgntgaggttcttgcngccccngggtccttttcccgcaacttagcaagcaaaccctttngtcaattccaacaagnacngtattccnacaacntggnaggaaaaaaaccccccttgcaaggttgtngaggattattagcnggggttttacacttgtccggccaaggaaagggctttccccttgaaacttgggcaacncaggcgcaaagcaatagcaagaagancaggtagagcatgcactatagcagcttcncnatgtgaaattcatgcangcaaagcancatttgaaaaaccaaanagtnttgnagcccaccntagnaaaaatnacaccanccctgcttctagcccctcaagagtcacccagtggtcccctagagccctgtcccagcatctctgcccctgggcctctgggatccagcgaggggtccaggccctctgcatctcctcaggctccaaccctgcttcctcagcaatgagctctcctccagctttggctttgggaagccagactccagggactgaaaaggagcaacaaggagagggtctgcttgagaaatgccagatgcttggtccccaggaactaaggcgacagagtgcagggtgggggcaagactgggctgtaggggagctggactactttagtcttcctaaaggacaaaataaacagtattttatgcaggca

SEQ ID NO: 653932 - DNA, 531 bp, Homo sapiens
ttctagagtagttttgaatgggttgatttcccccactcccacaaactctgaagccagtgtctagcttactaaagctgctgtaaagtgctctttaagtcttttttttttttaatccccttctaatgaatgaaactaggggaatttcaggggacagagatgggatttgttgtatgataaactgcatgcagtttttagactttctgctttgagaagcacaggtttgcgcatttttaagacgggtggctactcttggtttccctcatcgcaattaccttcgtcataacttcagaaccattgtccttcgcccctacccgccccgctccccattacttcgtgcaatctatacggccttctgctaagctttactgttagatccaacaccccgtcctccctagcccatctaggcggggtccgtactgtggtttttattaggaaccaccctctgtcatctacagtaatccctccaatctccatctgcggcatacccgtctcatcattgttgtattagtgtggagaaatagcatagcaaat

SEQ ID NO: 653933 - DNA, 1824 bp, Homo sapiens
  misc_feature (246)..(246): n is a, c, g, or t
  misc_feature (260)..(260): n is a, c, g, or t
  misc_feature (285)..(285): n is a, c, g, or t
  misc_feature (290)..(290): n is a, c, g, or t
  misc_feature (293)..(293): n is a, c, g, or t
  misc_feature (437)..(437): n is a, c, g, or t
  misc_feature (770)..(770): n is a, c, g, or t
atcgcctctgaagaatacacccccagaaagaagtgactgcatggggttgggtgggaattccagggccctctgagcccggcttccccttgctgccagcaaggcagaccctctcccacagaagatgacagagaggaatcaagtgaaaagggaaaatgacccgggatgacagggaagctctaggctgagaagagcattcggcagggcatgtcagacattctggagtctgctgtggagaagatcaaagcngcccctggaagttnaactgtggaaaaatgggattctaangaagnggncagcccatgcaatttagtgagccaggatgccaacttaggtcagtgaaaagagaaatactttgatatttaggagttaaggttgaagagcctgttcccttaatagtgttctaggttgagagtgtgtgtgtgtgtgtttccaaagcngatttagaagaaaatcatatatatacccatggtgaactattaaaaagcaagcagttggggagatactgttgtacgtgaatactgacatcaagtaggatgatcatacttacccaaactgtttcccctctgcagcagatagtgcattcatgattaggtgaaccagggtgtcaccagagtgatactttgtacagggaacattgcaggacattgcagggtgagagtgtgaaaggaggtgagataatggaagtaaagcacagaattgggtgacaggagagttgagtggtcaggatgggatgggtgtggtactcatggtgtaggtgaggactgagcctnaaggaaacgagcaggccatgacagggagaactgctggggcacacgggccaggaagcggacagaggagcatgcctgccgggtcagctcagttcatctctccgtggaaggtggctatccttttgctcttctctccctaccacccacttccttctctagcaccacaaaaagtaccagcacatccaccagaagtctttctcctgcccagagccagcctgtgggaagtctttcaactttaagaaacacctgaaggagcacatgaagctgcacagtgacacccgggactacatctgtgagttctgcgcccggtctttccgcactagcagcaaccttgtcatccacagacgtatccacactggagaaaaacccctgcagtgtgagatatgcgggtttacctgccgccagaaggcttccctgaactggcaccagcgcaagcatgcagagacggtggctgccttgcgcttcccctgtgaattctgcggcaagcgctttgagaagccagacagtgttgcagcccaccgtagcaaaagtcacccagccctgcttctagcccctcaagagtcacccagtggtcccctagagccctgtcccagcatctctgcccctgggcctctgggatccagcgaggggtccaggccctctgcatctcctcaggctccaaccctgcttcctcagcaatgagctctcctccagctttggctttgggaagccagactccagggactgaaaaggagcaacaaggagagggtctgcttgagaaatgccagatgcttggtccccaggaactaaggcgacagagtgcagggtgggggcaagactgggctgtaggggagctggactactttagtcttcctaaaggacaaaataaacagtattttatgcaggcaaaaaaaacacaaaactgacagcacaaacaccagcacagaccaccacccggcaccacacaccaccacgacccaccaagacactcaagacagaccgaaacacgcaacgacacagacaacagttacagtcgagaaacaaacacagagagcacaacaacaaacgagagcataga

SEQ ID NO: 653934 - DNA, 731 bp, Homo sapiens
taacaaacccgggttctggggggggtgtgggtataatactaagttgagatgatatcatttacgggggaaggccgcttggtgaagtaggccttatttctctgtgtcctttcgtacagggaggaattggaagtagatagaacccgaccgtggattacctccggctctgaacttcagatcacgtaggactttaactcgttgaacaaacgaacctttaatagcggctgcaccatggggatgtcctgatccaacatcgaggctcgtaaaccctatggtgtgatatggacctctaaaataggattggcgctgtatatccctagggtaactggtcccgtagggtcaagttatgggatcaatggagtaatagtagtccgctttgactggggtgaagtcttagcatgtactggctcggaggttggggttctgccccgaggtcgccccaaccgaaattttaaatgcagtgttgggtagtttaggacctgtgggtttgtaaggtacgtgttggcattaataatttaaagctcccatagggtctaaccacgatactggctgtgtacatgcccgcctactatcacgggcaggtcaaattccactgtgttaacacgtacacgagacagcttgaaccctcgtgggaggccattcatacagggtcctaattagggaccaggtcgatatcgcaccttggcacggtcacggaccgggcgtaacatgtttctggaggcgggcctaaaatg

SEQ ID NO: 653935 - DNA, 1629 bp, Homo sapiens
agcgggggggctctgggcagcctgggaactgccattgggattagtccgctccactcactgtcagcattaagtgggggtgcccaagacggggtggatggggggcgccctccagacctctgaccacggcctcaccgccactcgacccaactatgaagagcgcccccagctgcacgccaggacacgacctttccttcccctagaaaccagtaaaggccgctgccctattcaagatgaaatgtgtggaccgcccccagcccagttgaaatttcccgtgaaagtctctcgccccttccccacagctccacttcagtggactggagggcgcaggcctttgttctgactgcttctgtctgcctgcctcccacccgacgacactcacatggtagcgctgagcttcaacaccctgtatcatagaaggacggggtttggctccacacctgccactgctattgaaatagtttagtcttgccccagttcactgatgaggaaactgaggccctaacggcaggtggagccgggtccccgacccccgagatcggcagggcgctgaagacgtcccttccaccctccagcctctggtgcacatggcttcctccccggcggtggacgtgtcctgcaggcggcgggagaagcggcggcagctggacgcgcgccgcagcaagtgccgcatccgcctgggcggccacatggagcagtggtgcctcctcaaggagcggctgggcttctccctgcactcgcagctcgccaagttcctgttggaccggttaggggccgggagaagggcttgggggagggtacccaggcagcagcccctagcctcctctccagggcctgtcctgctgctcttttccaccctcaggtttctcactttaccaggacggcctgtgtgacttgtggcctccgagggtcctgctcccctcctcatggtctcagcgaatagcggcccttagggctggccccttacatgtgtgagtgcccagggctgagggtggctggccacctgagtcctgacctgcctcttctcctgctggcaggtacacttcttcaggctgtgtcctctgtgcaggtaggtaggggatggcagggggtgagagccagagggaagagggaccacagggtgacccagaaacaccctcctttcaaagggagccctgagtaagtttgggaagggtggggtgagttggggagcacagggtagtttgatggaggcaacctctgggtggggaagggagcaatgtctcaggatctagtgtgtctaggttctgaagaatgataaattggactggggctgaggttgccctggggtttgagggaacagggctccctgggtatggctctccagggtaagaggaggagacttcccagttcagcctgactgcttcccccacccctccaggtcattgtgtgttcctgccctctgggcatggagctggggcccgagaaacacacctgccagatccagagctactgtgccaagcatctcaaatgcagccaaaaagtgcgaccagaacaagttcagcgtgaagtgctcctgctacgagggctgggtcctggaacctgacggcgagagcttgcgcagcctggagcccttcaagccgttcatcattttctccaaccggatcacccgtt

SEQ ID NO: 653936 - DNA, 487 bp, Homo sapiens
tgctggggctgccccaaagggcaaacaggtttattgggcacagctgggaaaatcacggtatgccgccaaacgcttccgcaaagctcggtcccattgtggacgcctcataactccgtgatgatgccggcgccaaaaggcagaagctcatgactgtgcgctctcgtcgacagcatgccttcgagatcatacaccctgctcacaggcgaaaaccctctgcaggtcctggtgaacgccatcatacacacagtggtccccgggaggacatccaccacgcattgggcgcgccgggactgtgagacgacaggctgtggatgttgtcccccctgggccgtgtgaaccaggccatctggctgcatgtgcacaggcggctacgtagaggctgccttccggaagcattaagacacattgctgagatgccttggcagatgaacatcaatcgattagctggcaagtggatccatcaaactcatagtgaccttaagagcaa

SEQ ID NO: 653937 - DNA, 849 bp, Homo sapiens
  misc_feature (15)..(15): n is a, c, g, or t
  misc_feature (20)..(21): n is a, c, g, or t
  misc_feature (23)..(23): n is a, c, g, or t
tggctaagtgaggcngtggnntnaagttccgggctacagcagccgacgccgagaggcaccgtttcttcttaaaagagaaacgctgcgcgcgcgaggtgggcccctgtcttccagcagctccgggcctgctcgctaggcccgggaggcgcaggcgcaggcgcagtgggggtgagggcgcgtgggggcgcacagcctctggtgcacatggcttcctccccggcggtggacgtgtcctgcaggcggcgggagaagcggcggcagctggacgcgcgccgcagcaagtgccgcatccgcctgggcggccacatggagcagtggtgcctcctcaaggagcggctgggcttctccctgcactcgcagctcgccaagttcctgttggaccggtacacttcttcaggctgtgtcctctgtgcaggtaggtaggggatggcagggggtgagagccagagggaagagggaccacagggtgacccagaaacaccctcctttcaaagggagccccctgcttctagcccctcaagagtcacccagtggtcccctagagccctgtcccagcatctctgcccctgggcctctgggatccagcgaggggtccaggccctctgcatctcctcaggctccaaccctgcttcctcagcaatgagctctcctccagctttggctttgggaagccagactccagggactgaaaaggagcaacaaggagagggtctgcttgagaaatgccagatgcttggtccccaggaactaaggcgacagagtgcagggtgggggcaagactgggctgtaggggagctggactactttagtcttcctaaaggacaaaataaacagtattttatgcaggca

SEQ ID NO: 653938 - DNA, 314 bp, Homo sapiens
caggtgttgcaggccagtgataatgccatagagtccttggaggggggtcaccaaactaccccggttgcaggagttgttattgtgcaacaaccgcctccagcagcctgaagtgttccagctttttgcttcttgccccagggtggtcctcctcaacctgcagggtaacccgttgtgccaagcggtgggcattttggagcaactggttgaactgttgccttcagttagaagggtcttcacttaaaaggccctgccccctacccttgccctttaatttattgggattgaataaagaatggaaaggccctttcaggtta

SEQ ID NO: 653939 - DNA, 1399 bp, Homo sapiens
agcgggggggctctgggcagcctgggaactgccattgggattagtccgctccactcactgtcagcattaagtgggggtgcccaagacggggtggatggggggcgccctccagacctctgaccacggcctcaccgccactcgacccaactatgaagagcgcccccagctgcacgccaggacacgacctttccttcccctagaaaccagtaaaggccgctgccctattcaagatgaaatgtgtggaccgcccccagcccagttgaaatttcccgtgaaagtctctcgccccttccccacagctccacttcagtggactggagggcgcaggcctttgttctgactgcttctgtctgcctgcctcccacccgacgacactcacatggtagcgctgagcttcaacaccctgtatcatagaaggacggggtttggctccacacctgccactgctattgaaatagtttagtcttgccccagttcactgatgaggaaactgaggccctaacggcaggtggagccgggtccccgacccccgagatcggcagggcgctgaagacgtcccttccaccctccagcctctggtgcacatggcttcctccccggcggtggacgtgtcctgcaggcggcgggagaagcggcggcagctggacgcgcgccgcagcaagtgccgcatccgcctgggcggccacatggagcagtggtgcctcctcaaggagcggctgggcttctccctgcactcgcagctcgccaagttcctgttggaccggtacacttcttcaggctgtgtcctctgtgcaggtaggtaggggatggcagggggtgagagccagagggaagagggaccacagggtgacccagaaacaccctcctttcaaagggagccccctgcttctagcccctcaagagtcacccagtggtcccctagagccctgtcccagcatctctgcccctgggcctctgggatccagcgaggggtccaggccctctgcatctcctcaggctccaaccctgcttcctcagcaatgagctctcctccagctttggctttgggaagccagactccagggactgaaaaggagcaacaaggagagggtctgcttgagaaatgccagatgcttggtccccaggaactaaggcgacagagtgcagggtgggggcaagactgggctgtaggggagctggactactttagtcttcctaaaggacaaaataaacagtattttatgcaggcaaaaaaaacacaaaactgacagcacaaacaccagcacagaccaccacccggcaccacacaccaccacgacccaccaagacactcaagacagaccgaaacacgcaacgacacagacaacagttacagtcgagaaacaaacacagagagcacaacaacaaacgagagcataga

SEQ ID NO: 653940 - DNA, 355 bp, Homo sapiens
  misc_feature (52)..(52): n is a, c, g, or t
  misc_feature (311)..(311): n is a, c, g, or t
  misc_feature (335)..(335): n is a, c, g, or t
cagtggctacgcctgtaatcccagcactttgggaggctaaggcaggcggatnacgaggtcagcagatcgagaccatcctgctcaacatagtgaaaccccatctctactaaagatgcaaaaattggctggacatggtggcgcacacccgtaatcccagctactcgggaggctgaggcacgagagtcgcttgaacccgggaggcagaggtttcagtgagccgagattacgcagctgcactccagcctaggcaacagagccagattctttttttttttttttttaaaaagtcttttaaaaaattcttttattgngctgattttattgtgtcatgaagngtaatatgcatgtaggtatg

SEQ ID NO: 653941 - DNA, 940 bp, Homo sapiens
  misc_feature (682)..(682): n is a, c, g, or t
ttattgtgtcataattgcggctgtataagtacctagaactataattgttgatggtctgaatttgctgttttgtgtgcaataactgcttagaatctgtctttcgggggaacaaaagtggtccacacaacaagatcaaccggttttgtacccgcgccccctcgatcttctgagttgattatacatccctcccccttttcttatagccatgtctcctctccacaagatagcccctctctgtgggcaacttcttgtttgagacacacacaacacaccaccgaggtgggtgcatattgtgcccccactacatacattgctaccctccccatcatgtcatcaccccaaggttgttttcaccctcatgaccctatcatctttctattgtttgtcttctagcgagacctgctagacataaaagataatagttttaacagacagccctccccacatatgtgctcctcctactacagaaaaatatccctctcttgtttaaagatctattcttcacacagatagaagagattctctgctaataccccaccgttgttgtgccagatttcttcaagacaccacccgcgtctccacatcttcttttatatagtgattaatacaccccccctcagtcacaccagcacgatttgacaacacgagataagtcctttttcattctaggagagcctcgcanctcccggatgatgagtctcgtaccacccacaaccaccgtgatggtgtctcttgtgactggtatatatatgcccccacgccgaccactccacccacggccggtggacacgaaccacgaacctccttttctcctcataccaaaaccagaaaaaatccatgcccacttgttgtgtataataccctgtatattcccccatcgtttctagcccgagccagtggggccagaataatccctgatgaaatcttcccccacataaca

SEQ ID NO: 653942 - DNA, 1679 bp, Homo sapiens
ttgccttttcgtcttgatatttcgtcgtctttgctcgtcgtctcgctttggttcgccacgcgtcttgcgtcatccgcagttcgtgtatttttctactctcctttcgtccgggtttgttcgcccgcttcatgttctcttcgcttttcttctcgctgattctgctcctgtgcttcaaccgcttgcgatgttagtgtgactgtgctatatgctggttccgtggggcgtgttgttccatctctgtttgtcctttttctctgctggtgtcatgtcccttttctatgctcctccattgttttggcgttccttgtgtctttcccgtccatttcctatccctgtgcttttacagctccgtgttctgtcgggctgccaggtcttgctcctttcctgttcctgttgtgatgtttggtccttgttcttggttatctgccatgacgtgtgctcgtcaggttcatgtgtcctcgtgtgtcgcaccagttattcgtggtgtggttcccacttattattggtttgctccacttctcttagcagtgtctatcgtgtgtggttgttcggtgtcgttgttcctcgcttgccttggtctggtgttgtgttttccgtgtattcctcgtgcttgctttccctggtgcttctgtcctgtcagtttttctgcggagggtctcctctgctttccttcatgtcccctccgggccataatgtctctgggtcgtgtcttaaatctctctcgtttttctgcctctcatcctgtgccactgctcgtcctcgttccccttgttggtcccctggtgatttgtatgttgtgatctgatgtctctggtttcccccctgctgtgctagttcttggtttttttctagccgcgtgtggtcagtccctgtggatgctttcccttggtatgctctgcatttgtctttggtttttttgtgtttctattgtttgtctcgcctcttgtgctctctcatgtgtgcatccttgtctgttgtactgcgttcttgtgtcccttgtcccttgtccctttgcgtcctctgttgcgtcccaggttatccaatgcatgtccgagtgtctctggtcatgggggcctgttccggtggcttactttccgccaccctgtgtgtgtccccttctgaccctcgtgtcgttgtgcagtttgccgggcccgtcgagttctagctagattggtccccctcgtgccgtttggtgtctgaatgattctgggtactgtatgtgattgagtattccgtatgctgtctggttgcttgtgctatgtgtacccatatctatggaatatccgtatgtatcatgtaatgaatgtattatatatcatatatgttgcacatgagtactctcgcccttccaatgtatctatagtagtgtgtatgtgtagtacctcaggtgtattgtgactaccaatcgtccctatacctccatgtggtacttctgtgtgcatatgggtgctcgtatagtattagtactattagtagtgctacactagtagacagtacctatactgtgctagtccaggcagccaccagtagtgagagtagactattcagacagtaggaaagtctccctgcccctcattccttccatagatgagtataacttgcctgccaccccccgacactgatgccagggaggtgggaggaagaagtgggaaatttcaatactcccagttaacccccaa

SEQ ID NO: 653943 - DNA, 143 bp, Homo sapiens
ttgaactcgtgacttgtgatctgccccctcgtgccccaaagtgctaggattacaggcgtgagccactgtgcctggccaaaagatagtgcttttaaaaagctaacatttattcagtgtcttgttttgagttgagacctgaattt

SEQ ID NO: 653944 - DNA, 192 bp, Homo sapiens
cgttccaggttgtaggtaagccatgagttgtgccagcgataaatcgagcctggtgacaaacacaaatagaaaaaaattaaaaaaggccggggtatggtggctcatgcctgtaaccccggcagttgggaagcactgcaggggggtggctcaccctacggtcgggagtacacgaccagccgggggaacctggga

SEQ ID NO: 653945 - DNA, 165 bp, Homo sapiens
cggaccatacttactgcaaatactaactccggttgatcaatccccaaacagttacattttttttacaaatccttgccctcccattagatatgaacaaactccggtttctcatgaacgtttgttcggttagctcttacaggaaacattggccatggaaggactaaa

SEQ ID NO: 653946 - DNA, 686 bp, Homo sapiens
  misc_feature (191)..(191): n is a, c, g, or t
  misc_feature (434)..(434): n is a, c, g, or t
atgtttgaagtgaggtggccagcgcgatgaatcgccgcaagtggatccagtgcttcaacgatgtgattgccatcatcttcgtggtggtcagcaagcagctaacaagatggtcatccgggaggacaatccagagccaatccgcgctgcaggagcgctctgaatgcctacttcaagagtcatctggaatgaancaaggatgggctgcgcagccaatctctggtgagtcctgtatcctcaatcaagcaatgatctgcgtcgctgagaaagtccttgctgggaaattcgaagattgatggactacctttcccatgaagtttgctcgtcgtacactactcgctgcaggatgcatacatcccgtaggcccggtagtaggacccagcgcgtgacccggtgccagagtacttcattcgagatgagtgatcgtgaggatcagntacctggccatgtggtaggatgggcgtcacgtactgctactgctcattttcacctctgcgtctgtgtgacactgagaactatccgccggtgttgttcaatcgactgccgtgacatcattcagggcatgcgccttcgtcagttacgagctgctctaagaagggaatcccgcaaatttaattaacagccttaacgcacgaatctacttaaaagtgcaccgtaacttgtacaagccagttgaatcacccatcata

SEQ ID NO: 653947 - DNA, 331 bp, Homo sapiens
agagtggtatccaggactttcaccattttttaactgggttatttgttgttgttgaccaataaaggttctttaaatattctgattcttaatcccttatcagatgtgtaatttacaaatattttctcccattctgtgggttgtccttttgcaagatagtgtcttttttcttttttcttttttttttttttccgactttatgggtgtttaatggacatacaataaacggcgcctatggaatgtgtaataagtaagtcctgactattgtttacacccatgcagctgtcacaaccatcagccactagacaaggggaaacacggggtcaccgagctc

SEQ ID NO: 653948 - DNA, 324 bp, Homo sapiens
  misc_feature (165)..(165): n is a, c, g, or t
acagtgcctggggtttcaaaggcactcgcattcgtgttggagctgtcagccccagcacaggacgacatcttgttgatgcggatgacgtgaaggggtggagccgcacccggatatggaagccatctttgccacaactttttaccatgtacttatttggcacaaatncggggcagccttccggggctttcagaaggacaagctggctcaaaatttcaatcttgacaaccaatgtgggccattaaagggggaaaactcaatccaatttttacctttctttccggccccagggtcaaaaaaatgggggggttaccgaggctcgaaatt

SEQ ID NO: 653949 - DNA, 113 bp, Homo sapiens
tggagaccaaataggcactactatttgggaaaaggatttcgaacttttttgtactggaaaaagtgctattttcccataggggtgggggagtgagcagaaggcagaaataataa

SEQ ID NO: 653950 - DNA, 827 bp, Homo sapiens
tatgtggaactagaagtgcacctgttgttaatgatgtggaatctgaaggggtgttctctttcccagctctcctgcctgtctgccatgttttcatgtgcctgggtctgggtgtgtgtcttcccccgtaatggaaatggcctgtgggatgctccagtgtgacccagtgctgcctgtctgcttctgtgtgtgagccgtggtgcttgaccatgccatgtgacatgctgtgtggtaaagccctgaagcaagttcttgctgctgagtgtagtggatgtgccatggctgtcctgggcagtaacttggctctccgtgtggtgaatgtcgtgcttggtgattggcctactgtggagcctggtgttttgtacttgctatttatttttttgttgaagagtgcaaatcattgcgcttttgcaattgaaaatctcgaagggtgacctcatgtccctgtgggacacaattgcccccaaaggacttgaaagagggagattgatattcgagctctccagggttcagtgatatcaaggtatgatgccccagctccttggatgatgattgattgctagactacgtacaacttggaaacccagggggaaatcagcgatggatcccatttcatttacttgaaggtggcctggacattcccctgttccctataagtgcggccgaggaattttccaggcttcactaaccttggcttggggttcttgccgagaaacacttaggttacggccactttccagaggtgggttgttacgggcacaaagcagcttcatctttgattagccccgttttgtgggattggcctaattgaagcatccaggcgcgcccgt

SEQ ID NO: 653951 - DNA, 89 bp, Homo sapiens
  misc_feature (28)..(28): n is a, c, g, or t
  misc_feature (38)..(38): n is a, c, g, or t
acttctagaaagggatccccaaaggctntgacggtacnggcggtgccatggcggacgctcgataggctcgttgtagtgagtgtgcaccc

SEQ ID NO: 653952 - DNA, 194 bp, Homo sapiens
ggatccggttgcagtgagccgagatcgagccattgcactccagcctgggcgacgagaaaaaaacttcgtctcaaataaataaataataatcaccaattagattccctcaaatctgcttgggtatttccagtcctagttaaggcttagggcacatatctcctctctgtactcggggggggggggggggggaattc

SEQ ID NO: 653953 - DNA, 290 bp, Homo sapiens
  misc_feature (30)..(30): n is a, c, g, or t
gtctgaggagaatctggtccaacagcttcnactttagcatactgcttgtgatagggaagcaatggaggagatgctccaccagttgttggctgcaatttagcaagggccacttggcacaaatttaatggctccatacaccctccagaggcgcctttttgtcccagattctattccaaggttcagtctgaagccctaaaagaaaatcagatctgagggatccagaggcagtcaacagtagaaggctagggcacagcccaggtgagcatgactatcccttctgtcgtcttctc

SEQ ID NO: 653954 - DNA, 444 bp, Homo sapiens
tgaaaacagattggccagtggaaactttaatgtgttcttgaacagtcaggaaaaacatgagggaggaaaattaatatcacagcagtaacggcaccctttacattatgtgcagtgattattttttaaagtcttctttcatgtaagtagcaaacagggctttactatcttttcatctcattaattcaattaaaaccattaccttaaaatgggtttctttcgaagtgtggtgtcttttatatttgaattagtaactgtatgaagtcatagataatagtacatgtcaccttaggtagtaggaagaattacaatttctttaaatcatttatctggatttttatgttttattagcattttcaagaagacggattatctagagaataatcatatatatgcatacgtaaaaatggaccacagtgacttatttgtagttgttagttgccctac

SEQ ID NO: 653955 - DNA, 125 bp, Homo sapiens
aaacctgaggtttacctagtgacaccaaattatcggtattttaactgaatttacccatagactaagggtgaaccggatttggtggtggattagggtctatcaaaactgacacaagtacacagtaa

SEQ ID NO: 653956 - DNA, 155 bp, Homo sapiens
gttatttcagtataattcctaacataaaatattttaaaatcaaaggttaaaatcaaggtctgatggtttacttgagggttgcattttagaggatatgttatataaacacacacagagaggttcacattaaaattagagctagagaggcacgatac

SEQ ID NO: 653957 - DNA, 780 bp, Homo sapiens
ctaagcttctaaagcaggtaaattgtcgggggagagagttagcatgtatgaatgtaaggatgagggaagcgaagcaacgaggaacctctcgccatgatcagacatacagctgcctacctaagtgaggacttcaagccccaccacatagcatgcttcctttctcgccatgatcagacatacagctgcctacctaatgaggacttcaagccccaccacatagcatgcttcctttctctcctggctcggggtaaaaagtggctgcggtgtttggcaatgctaattcaatgccgcaacatatagttgaggccgaggataaagaaaagacattttaagtttgtagtaaaagtggtctctgctggggaagggttttcttttctttttttctttaataacaaggagatttcttagttcatatatcaagaagtcttgaagttgggtgtttccagaattggtaaaaacagcagctcatagaattgtgagtattccatgagctgctcattacaagttctttcctctttctgctctgccatcttcaggatattggttcttcccctcatagtaataagatggctgtggcatttccaaacatccaaaaaaagggaaggattcaaggaggtgaagtcgggtcaaaaactacacctactatatacatctattacattgcttcagaaacgttaaacatattagagtcatatcccattccaacagagggactgttgggaaacaaactctgaacgcagaggagcgaataagaatgggaatgacactaaccgtcacaag

SEQ ID NO: 653958 - DNA, 320 bp, Homo sapiens
ttagagattgtacttggatccagcccaggagcctctgcttgggggtctgctatctatggctcctacatcctcctcctacgatccacatggacatggagatggatgtagtgcaggatcagggtccagatgaggcccaggatcagcttcaggttcccgtccacgatggccttgctgtcgatgagacaccagtttgatgctctcgcggtccaggaactcgagcgccaccgacacgttctcaagctgcattaggcggaaagtgggccgctggtagtgcttgcggagcatcttcttctggctgagcacctccaacaagcgcctgg

SEQ ID NO: 653959 - DNA, 101 bp, Homo sapiens
gtgtgcgttactcggagaagttcttagcctgatgaaataacttgcgggcgttgaagagctgtttaattttaaatgtgtctcagccgtgggtctccatgggt

SEQ ID NO: 653960 - DNA, 920 bp, Homo sapiens
gtctacccatgcgccagtggagcacactagtggcattcgaaataccagtgtgtgaagctgaaatgatggtcacttcattgcctgtcctgggatttggcacctatgcgcctggtaaggtcctaaaagtaaagctctagaggccgtctaattggcaccttagaagccgggtccaccatattgattctgctacatgtttacaatagtgaggagcaggtggtaactgtgcatcctatgcccagattgcgatggcagtgtgaagagagaagacatactctacacttcaaagctttggagcaattcccatcgaccagagttggtccgaccagccttggaaggtcactgaaaaatcttcaattgggactatgttgacctctatcttattcattttccagtgtctgtaaagggccatggagaagtgtaaagatgcaggattggccaagtccatcggggtgtccaacttcaaccacaggctgctggagaatgatcctcaacaagccaggctcaagtaccaagcctgttctgcaacccaggtggaatgtcatccttacttcaaccagagaaaaactgctggatttctgccaagtcaaaagacatgttctggttgcctatagtggcctggaatccccatcgaagaaagaaccatggttggacccgaactcccccggtgctctttgggagggccagtcctttgtgcctgtgaaaaagcacatggaacccaggccttattgccttgctacagctgcacgtggggttttggtccgtggccaagctcaaatgtgcagcgacaagacacagggcggtttggatcccacggtctcaggagaaaaccaatgtcacaaatgagttggccgttttgggccccacattgaaaaagagggcactcgccccccgttaaagctcttaccctcgagaaacaaaaa

SEQ ID NO: 653961 - DNA, 946 bp, Homo sapiens
ctgcgacgccgtccggatgatttggaccacgcacttgggtaatttcctggccaacgggtccagtcaggagttgctgcggggtgttctctgcgcaaatgttggggccacgcgaacgccgccgctgggccagctgggttctctcgtccccggtggttttcctttccctcttccccgcctttatgctcctcgtctctcccgttttggggggcccccccccggtccccttgccaagccgagctttctgtggcgtgtaggagaaaggctttgtcgcccggtgttgggtgtacaacctggtcgacgggggcccccatatttttttggagatcatgtggcggatgcgccccgctgttgttgagaagtggtggctcctgcgcccgccccccatgtgttgttttgatgagccgttttccagagctgcccccccccttgttgggtcggacctttcttcttgtgtgtctgtggataatggtgagcgccgccaccaccttctccgggtggggggtgttcctccacacacccagtggcgcccgaagacgggtcgtgtgggacgctgtgcgccagaggtctctcccaattcttcccccaaagatctcgacaagagcttaacggaatgattatctccctatactccttcgccccccccccactttaactcaccatggtcggagaaaccggtttccacgaacacgtttgttttctcattgcgccgcccttatccagaattttgatgatgaaaacctgtgggttttcatacaccaagccgatctgtgacaccccttctctgagagaagagaagaagttttttgcaacacaccttggtgttttttttttggcgggtggccctttttaattttttattttttaaacacccgggcttttttttgggaccccctggcccccaatttttccccggaatttgggacccccctcaaaaaatttaaagaga

SEQ ID NO: 653962 - DNA, 176 bp, Homo sapiens
  misc_feature (16)..(16): n is a, c, g, or t
  misc_feature (40)..(40): n is a, c, g, or t
  misc_feature (42)..(42): n is a, c, g, or t
  misc_feature (159)..(160): n is a, c, g, or t
actctacttagagttnggggtcgagtctcaaaaaagttanangaatgccttcgtcaaaacccactaacccaaatgcacagaatcaaactgcacgtgtcgatcccagttctggttgactccggtatagtataacgggagccagtgatcgacatggcgttnngaagctagggtaccga

SEQ ID NO: 653963 - DNA, 384 bp, Homo sapiens
  misc_feature (8)..(8): n is a, c, g, or t
  misc_feature (53)..(53): n is a, c, g, or t
  misc_feature (65)..(65): n is a, c, g, or t
  misc_feature (95)..(95): n is a, c, g, or t
  misc_feature (108)..(109): n is a, c, g, or t
  misc_feature (123)..(123): n is a, c, g, or t
  misc_feature (143)..(143): n is a, c, g, or t
  misc_feature (169)..(169): n is a, c, g, or t
  misc_feature (186)..(186): n is a, c, g, or t
  misc_feature (188)..(188): n is a, c, g, or t
  misc_feature (205)..(205): n is a, c, g, or t
  misc_feature (217)..(217): n is a, c, g, or t
  misc_feature (253)..(253): n is a, c, g, or t
  misc_feature (266)..(266): n is a, c, g, or t
  misc_feature (285)..(285): n is a, c, g, or t
  misc_feature (289)..(289): n is a, c, g, or t
  misc_feature (321)..(321): n is a, c, g, or t
tattggcnctttgcaccagagacatatcaatatttattgatgtgatacttatntgttatccaccntgtactagtaagttttagcactgaattccntcttcactgttgnntgtatttatgaaantctgaaaatatggggatcancgtaatgattaaggtattcatcaccnggctgtaagcaatatcntnagtttgtagcctagaantgggaggatacntaacatctggaagacaagttcatttcatcttgagancatggtgaaatantttggatatataaaatccntaanctattgtaaccatgttttattgcaaagatgtnaaatatgccagatgtgtgtgagttggaaatcaaaaaaaggaaaatcaaatatgcaaagaattc

SEQ ID NO: 653964 - DNA, 1359 bp, Homo sapiens
cggcgaatgcgtacgcgccgttcagtgaaatcctccttgtgctcggtggcgcgacagctcgtgtggacccaaggcaagtcagtgatggtagtgagactcattggcattgccttgagacaaggctgatccagagggaccccgacatctatcgctgatcctgcgtaccacgaatcggagcccatcgaatgccaccaacctgttagctgcaggtggtgctcggagatggcgcaccgaacgatcaaccatcaacgactacgaaccgcatatccgggtcatagggaaaaagcgtctgacgataagcagcgggagtgatgctccgacgattcatgccgcctggtctcgatgcgaagatgcagaagcgtctctcgtgtgaacataccgggtgcgcaccgagacagaggccacatggtggtgcgccggtgcgacaggtgggggcaagttgcatacgccacatcgtggtggttgcacacatgcggcgactcctgcaggcagcacaggtgcatggatggttggcgtcggggcgaggcgcgctcctctcgagagggccgatgtgcgcgattgcagatgggcgctcgcgatcacgtggcggcgggcagggttcaggacggagggaaggccacaaagctgtgggtcccccgcgagcacctcacttcgggaaggtaaaagtattcaattgtgaccgcaagaatgatcggagactgggttctttgcggaacggacttgacaccgtggacgccgccggttaatcggacacgttaacagaggggcagccaatttggaacagctgttcaaacacgccttggctttacggggggaacctggttcgggtgagagatagataggtatttgtggcatcacgtgtgaagaaagagctgagggaggcgaaaagatatttggccgtgcgcttgtggacgtgaaccgttacatttggatttgcagcgacttaggagccattatgggatccaacacgaaagaaatagcccagataacaggtggccaaagatatgaagcgacgaggaatagaggggtaaagggtggcacatacttagtggaggatcgccagggccccttggggggccccttggtgggtagggcccgaagttgggaatggggcgaagaaaagcaccgtagccatagagaggcacaccacccaagacaattcggcttagctatggcgacataggaagggtcgaaccagagggtggcagaagcgttcgcgcggacccgcaagtagggagaaagcaaagattcgataggacatccagaaccagacgaggataatctacaccagaagtataaaaccgactcgctgagcaaagccagcctcaagaaccacaacgagccgagaagcgagggaac

SEQ ID NO: 653965 - DNA, 285 bp, Homo sapiens
aaaaagtgagctgactgacggtatggctgtgctactgaaatacctgtcggcactggagttgtccccacaggtcgttctgatagtgaaggtccttatgatttcggaggtgtacttactaatagtaaccgggatattattaaatggagatgccatccacaaacgaagtccgtcgcacaaggacatgtgcggcctccatccctggggatctctatcctttcaccaggaagccactgtacctgattgtggattcgactaatagtgttgcgtataagaatttcacaaact

SEQ ID NO: 653966 - DNA, 124 bp, Homo sapiens
ggattgctgaggtactctacaggatcttatggagaccaggctgagccactgccgactcgctgcacgcaatagccactggagacggtggactgcactacagagatgtttgacttgtccaaacgcc

SEQ ID NO: 653967 - DNA, 132 bp, Homo sapiens
ctttcactttcagttgggcttccagctcttcacatcttctctttaattcactgcttttagaagtcccgtctcctgtctgttccgaacttttgactgtcagctcatatgttggggagaccggatatattgggg

SEQ ID NO: 653968 - DNA, 716 bp, Homo sapiens
taaataagactagacagagcctgctggttgaatcagcctgaggtcacgctggtagtaacaagcttggcatccagtgaggggaagtatatccctctgcctcaaagagtcctgggaaggtccccggaggaggagtctgatgcagcagctctcggggctggtcgtgcctgtgccttagctctttgccacctcgtgtgccctcaccatctggacaacagcagccctggaccaggtatctgaggcccgtggtatcaactggatggcccattccctgcatgtccccaaatggcacagctggcctctgagaggtgccaagactctgtcattcgcccagataataggccttcatggagaaacttcttgttccacctcctcctgcagatgggccggatagtatcccccgagttctcccaagtctgactgcccctgccccaatctcagctatcctgtcacagagcctcccatcggctacggcagtgccaacctacttcagcctccatccctgtgacctcatcagtctcagatcctggagtgggctccattaactccagctatctccaaagatctccctggcccccacatgatgtcaaagaactctctaccacggaacctgggagaactctggagccacagtgagctggctcggataggctgggacagtccctggtcttcagaactgaacatgaacggataccactggcaagaactgcgacaggttg

SEQ ID NO: 653969 - DNA, 165 bp, Homo sapiens
taggccaatctggagcagagctgctaacttcagcgctgttgacatttggggccagaaagttctttgttgtggggtctgtgctgtgcacggtgggatgtgtagcagcatccttgcctctgccattcattccagcccagcctgggtgacagagcgagactatgtctc

SEQ ID NO: 653970 - DNA, 235 bp, Homo sapiens
gatggcagtgtcgtggacttcgtactctaggatccgtagtcaccgacgagaccagagtggcatgataacagtataggacgctcatttgggcacagcctaaaggccaccctttggaggtgctttcatgcaaaggaatcgtctggaaaagtaggagttgaagccacagccattctccataggagtgtttagggtccagtgtcaggatggcagaaatcacagccttgacccatgacgg

SEQ ID NO: 653971 - DNA, 655 bp, Homo sapiens
cagacactgaccttcatcgcctcggctccagcgccatgtcgccctccaggaaggtcttcgctgatggaaactggaagatgaacgaccggcagcagaggctggaagagctcatcggcactctgaacgcgctcaagaagccggccagcaccgagatgaacagctttccccccaatgagctccatcgactaggacaggcggaagctagatcccacgattgctgaggatgcgcaaccctggtacaatgtgagacccgaggcttgaactggggaaagaaccactggcatgatcaacacctgccacaagatgcactggaaaccggggcactcagcgcgaatgcaaccgtctcgtgcgtcactgaaggcaccccgcccccaatgtgcccgccaatttctccggtttgccccgtatcaccatcgaacttagttcggctgatatcacgaaaggtacccccacctcacgggcacggtcccccccccccctccattgcgtaccctctctccggccccctctctcctataccctatccactctcgcccccccccccacccctactcctctcctcctcctccccccgccacccgcgcccgatccgctccatcgtgctcaccccctaccatcgcctctcgcccccctctccccgcgccccccccctcct

SEQ ID NO: 653972 - DNA, 555 bp, Homo sapiens
aaatgtcccttcaagccaagtcaaaggccactatcaccccatcagggagcgtgatttacaagtttaattctacgacttcctgtgccactcctcaggctttggactcctcctctgccgaggtcttcatatttgtgagcacagcagtagtagtgttggagatcttgaccatgacagtactggggcttgtcaagctctgctttcacgaaagcccctcttcccagccaaggaaggagtctatgggcccgccgggcctggagagtgatcctgagcccgctgatttgggctccagttctgcacattgcacataacaatggggtgatagtcggtgactgtgatctgggggacagagcaaaaggtgcccttgctggcggattccccttttggcttttatgatgccatggggaaaccggggaacaaggggcccctcctgtgaaacaggttttttcactttttgattgaaatcgggggaacccaaccagggaacctttactttttgttacatggaaaaattttcttgctagaaaattcccccccttgcctggttaaattcccctt

SEQ ID NO: 653973 - DNA, 108 bp, Homo sapiens
attgaaggctgaggccgcaggtctaagaccaaggaagcacgcaagcgcgtgaagagcgctccaggccagaaggaggagatcactcaagactttattccaagagaggaa

SEQ ID NO: 653974 - DNA, 626 bp, Homo sapiens
aatggcgatcattcaaaaaaataaaaataaacgacaagagtcggtgggtcacaattgctgtaatggttcctaggaaggccatataagagtttatgcaacatataatacacactcgataaaactgcctaacccacttactgaaaggcagcttatgacatgtaaaggttccaacatgcaagggttcaatgcatatatcgtgaaatattccagctctattgctcgattataaagaaagatgtgtgtagcagtcccatttcaaatagaaaggcgagcaatatcaaatagtcaatataaacttgcaagtgcatagtatcaatttcagcaagctaaaaagatgacggattgaggtacgcctcgagcgtaacttagaaggtacagaccatctggcaaattctttggacagcaataataatcttatccctcagaaacaccttgtaaacactggatactcaatgataggcgtcaaaagcacgcattattgagccggattttaatatgaacagaattcactacaactctttaacatatggagaacaaattaattcagatggtgtcatattcccatagaagcaactcaatctgaaagtcatagagtagtacatgaggatcttacatagtcagtgata

SEQ ID NO: 653975 - DNA, 87 bp, Homo sapiens
tggagcattcagccgggaggagcattcagcggggaggagcattcagccgggaggagcatccagccgggaggagcattcagccgggag

SEQ ID NO: 653976 - DNA, 286 bp, Homo sapiens
agaatttacatgttaaaacataattaccactgtaggaggcaggtcttttgagaagtgattagatcatgatggcagagacctcatgaatgaggttaatgcccttaccagagaggtcacagagagctgccttaccccttccaccatgtgaaaacaccgtcagaaggtcccacctacaaaccagagatctggtcttcatcagacactgactctgctggaggtttcatcttaggcttcctagcctccagaactgtgagaaataaatttgttttgtttataagccaaaaaa

SEQ ID NO: 653977 - DNA, 1181 bp, Homo sapiens
acgtgatctaactcttatcatacgtttgacttgaccacactcatcacagctgactcatgacttcgccacctagtaatattttttcatcactaggatttacatgaccttacaaataagatacatagtcttatgcttgtgtagttccacgataccttaacctaggcattaaaagtaagccccatactggtgtacttcagcatgcatagacgtgccccatacaattgtaggtaaccatctatcgacgatgcacatgccagaattccatacactcctttttcttaagataaaaactgtctcatctgtatcaaaacagattaatacatccatcgcggaacgaaaattgaaactcataaacctaaaatactataccaatgtctaataacaacatatcatttacataagtccattcattgtgcctactatcatttaaataataactattgaaatatccctcccatatgccatatttctgagtctctcccaaaagtgctgatccacacagtcaacaccacatctttaacaaatcctggcccgttgcatttctttcctcacgaatgaccaaaaatcaactaacactaccacctctctcatagtcatcatatccatagatatcatctcctcctcaacataacactgtagatagctctattatccatccaactctacgtcaactcatataatctaattctataagcataggaacagaatgagcgctgccaataaaatacaaaatctgccattcgtacctcccacaagatctctaacctcctatctccctcaactttaccccgcactattacgatttgaccatccctaaccctaacacaaccagtacatagcccttaatcaatacaactccattcttatatatcacctcattcatacttagatcctaatctacatacccgggatactctagctatctccgaccttaaacactctccccgcaccgctacccctaactactaatcttccagctgcaaaaaaggcttcctgactaaacaacccttaagtttccattccccctcctctcccctaaaaaggcctttacactcgccataaacccgcgttgtctaccccaacttgggcctctctccccacatttccacataacaagaacccttcataccccccactatatccatcacccccttaacctaaacaccacctaaaaaacccta

SEQ ID NO: 653978 - DNA, 353 bp, Homo sapiens
atctgacaaaggataaatcacaggacaattagatttactggagaagaataaaaacaacattgcaatgtatcaaaactatatgggctgcacgtaaaaacagtgctcagaggaaaattaatagcactaaactgttcatattaaacaagatgtgagagttgggcatgctggctcacgcctgtaatcccaggactttgggaggttgagacaagcagatcacttgaggtcaggagtttgagaccagcctggccaacatgatgaaaccttggctctactaaaaatacaaaaattagctcggtgtggtggtatgcgtgtgcctgtaatcccggctatttgggaggctgaggcaggagaat

SEQ ID NO: 653979 - DNA, 340 bp, Homo sapiens
  misc_feature (340)..(340): n is a, c, g, or t
tctctagctatatgtattgcagtctctttttctttaggtctaatgatatttgttttatatatctgggtgctccagtgttgggtgcacatatatttataattgctataaactcttgctgaattgacccctttatcattatacagtgaccttctttgtcttttgtagtttttgtcttaaaatctattttgtctgaggtaagtgttgctactcttcctctttattggtttccattggcatgaaatgtccttttctttattaatttatttttagtatatgagtgtttttataggtgaagtgtatttcttgtaggcaacatatttatgctgcttagattgatttn

SEQ ID NO: 653980 - DNA, 810 bp, Homo sapiens
  misc_feature (22)..(22): n is a, c, g, or t
  misc_feature (67)..(67): n is a, c, g, or t
  misc_feature (78)..(78): n is a, c, g, or t
  misc_feature (80)..(80): n is a, c, g, or t
  misc_feature (84)..(84): n is a, c, g, or t
  misc_feature (105)..(105): n is a, c, g, or t
  misc_feature (112)..(112): n is a, c, g, or t
  misc_feature (138)..(138): n is a, c, g, or t
  misc_feature (146)..(146): n is a, c, g, or t
  misc_feature (155)..(155): n is a, c, g, or t
  misc_feature (505)..(505): n is a, c, g, or t
tccatgtttaaaaaaagtgacntggcttaattactatgggcagggggggcctgcatgagggggtagngtgcccagggnangggngggctgtggaaatgatgacanaagaggntggaaggaaagggggggggttggaanggccaggnccaaggggntcctcaggtccgcttcggggaggggacagcctcgaggaaggagtcagggcaagccatagctaggccaccaatcagataaagaaattctggagaaatctagctgaccatcacggtgggtcgtccagttcttcatcatgcggtcaaggacaccagggtccttcgggtcctctggggaagggcagcaagtccggtatccaggaagctaaggaactcggtctgggagagacgggtagttataaccatcctttccagcatactctcgggaagacagccaactcagggactcgatgcaccgctcagcactcggaaggggcgggagatcatcggccaggtgggacctgaccagaggngcgaggaggctggggctgggaccggcgctaagagctcttgtgacgcgcggagaaggggtctggagcctcatcataaaccctacatgccagaatatcggacgacggaaaaccccaaatggggatgacgccggtgcagcggggggccccgaaggcctaggtggcctgggatgggaaccgcggggacacccggaggttacgcaagacatcgggccaggatcaaacggacagcgcggacaagcaaaaccgaggaagccagaagaagggtgccgcaccatggcgggcaagaacaaaacccgggaacacct

SEQ ID NO: 653981 - DNA, 264 bp, Homo sapiens
  misc_feature (42)..(42): n is a, c, g, or t
gcgtaagcttctcgtcatcaactccacccaggcccctttccnatgtggcctcttggtcacacaacgcctgcatgcccccctcagctctgccctccactctgccccacaggctgctggtaagtctcccctgcagcttctcacagctgggagccgcagtttttcatctctccaaactcctagcctggagccagacacagtcaccatcacaagggaaacggaggcagggccaggtgtagtggtgcacctctgtgatcccagcacttt

SEQ ID NO: 653982 - DNA, 512 bp, Homo sapiens
  misc_feature (1)..(1): n is a, c, g, or t
  misc_feature (15)..(15): n is a, c, g, or t
nttcggcacggccanctagctctagcccagcctggattccagggatcccacccctagccctgtccctattcagttggcacaggctgccctgaccctggggccttgatttgatctcaaataagccatagaggagagaggtcttgaggggtgggagcaggtgtgtactgacaattcccctcccacatgtcttgagctgggacctcgtcatctgagacttccccatgccccaacaaatgcaaatgcacacaaacccatgcatacacaagcacacacacacaggcatctccccgtctggttgggggagcatgggagggggcacttcacagggagaagataaatagttccacacctgaagaccctccaacagcttctgcctccctcctcatcacttcctctctccaccccctctccaacactggccccttcccctaattaattccctggtgaggacagccagaggagctgcgacttggtattttttggaataaatagacattttcctgaaaattatt

SEQ ID NO: 653983 - DNA, 502 bp, Homo sapiens
cttgtactacactgaattcacccccactgaagaagatgagtatgcctgccgtgtgaaccatgtgactgtggcacagcccaagatagttaatcgggatcgagacatgtacgcagcatcatggaggcttgaagatgccgcattaagatagcatgaattgcaaactcagctggctagcttcataatattgatatgcttatacgcttacacttaatgcaccaactgtacggatatagtaatgttaacatggacatgaacttatttgtaattgtactctgcgagctgacttcatgtgggatgtatctgagcaggttgctccacaggtagctctatcacggctggcaacttagaggtggggagcatagaattctcttatccaacatcaacatctgggtcagatctgaactcttcaatctcttgcactcggagctcgttaagatagcttagcctgcataagctaactaccaattcacatactctgcttagaatttgggggaaaatttag

SEQ ID NO: 653984 - DNA, 137 bp, Homo sapiens
cggatataagtcactcgggagcgtgactgcttggccctctcaatggctcccaagacctgctgctggtgctcttgggagaggtaggggtcctgaggcaagctatggggggcaggagaggctatgcctgcttcattatc

SEQ ID NO: 653985 - DNA, 144 bp, Homo sapiens
aatgctgcacggggactgccaggacctgcagaagcagcacagcgatccctgcgccctcaaccctgcgcatgaccatggttctccgaggagtgcgtgcgctgtgtcctgacgtccctgaaacttgagacatgggtacctgagctc

SEQ ID NO: 653986 - DNA, 1335 bp, Homo sapiens
  misc_feature (369)..(369): n is a, c, g, or t
ccggggatatgtgaggaagaactggaccctacttgattcatctttgtgagatgtatgcgggtctgtccctcttcacggcaggggagagaggtgggagatgcctttctgtaccccgtccgaggtcactccctgtactagggcacttacatatatttgctgcttgtcggaaaataatccactacactttaagaataattacctcccaatgttactcttttgtgacgaaaatgcaaaggagcccgaaaatgcacttgacaagctcttctcttcagaacagcaggcttccatcttgcatgtgttgaatacagcatctactaaagaacttgaagctttccgattgcttcgtgaagaaggtccatcaatatcgtngagcacagagaaaactttgggccatttcagaatttagagagtttaatgaatgtgcccttgtttaagtataaaagtacagttcaagtttgtaactccatactttgtccaaagactggacgggaaaaaagaaagtcaccggaaaaccggttcctgagaaagctcctcaaaccagacatagaaagagaaagacttaaggcagttaatagtatcatatctatcgtttttggtactcgaagaattgcctgggctcaccttgatcgtaagttgacagtgctggactggcagcaaagtgaccgttggagtttaatgagaggaatatactcatcatcagtctatttagaagagatttcctcgatcatttcaaagatgcctaaagcagatttctatgttctggaaaaaacaggactttccattcagaactcatctctgtttccaatactgttacattttcatatcatggaagccatgctgtatgccttattaaataaaacttttgcccaggatgggcagcatcaggtgctgagcatgaatcgaaatgcagtggggaagcattttgaactgatgattggtgactcccggactagtggaaaagagctagtgaagcagtttctcttcgattctatactgaaggcggatcctcgggtgttcttcccatcagataaaatagttcactacagacagatgtttttatctactgaactacaaagagtagaagagctttatgattcattattacaagctattgccttctatgaattagcagtgtttgactctcagccttagaattctgaggttaacgtgctaaagtataattattagctctaacgtaacaccaactgttgtgaacatccatgttattggaaaagaacacattttcagtgtattttagatgtttaaattctgacttttggctattaaatggtttacacaataagccaagaccaaatcaataaacattttatgaga

SEQ ID NO: 653987 - DNA, 1010 bp, Homo sapiens
  misc_feature (369)..(369): n is a, c, g, or t
ccggggatatgtgaggaagaactggaccctacttgattcatctttgtgagatgtatgcgggtctgtccctcttcacggcaggggagagaggtgggagatgcctttctgtaccccgtccgaggtcactccctgtactagggcacttacatatatttgctgcttgtcggaaaataatccactacactttaagaataattacctcccaatgttactcttttgtgacgaaaatgcaaaggagcccgaaaatgcacttgacaagctcttctcttcagaacagcaggcttccatcttgcatgtgttgaatacagcatctactaaagaacttgaagctttccgattgcttcgtgaagaaggtccatcaatatcgtngagcacagagaaaactttgggccatttcagaatttagagagtttaatgaatgtgcccttgtttaagtataaaagtacagttcaagtttgtaactccatactttgtccaaagactggacgggaaaaaagaaagtcaccggaaaaccggttcctgagaaagctcctcaaaccagacatagaaagagaaagacttaaggcagttaatagtatcatatctatcgtttttggtactcgaagaattgcctgggctcaccttgatcgtaagttgacagtgctggactggcagcaaagtgaccgttggagtttaatgagaggaatatactcatcatcagtctatttagaagaggtaaggcagttgcacctccagattcctacctgctagagctccttgtgtagtttaatcttctggtcccaaaaggaatgtaataaaatagtaaagatgggttttcttctggtacttgttactcacttattcctattatgttttccatcacctttgatttttaaaaattcaacctttagttagttcaagaaatgccttatgcatcgaaggcagatactgagaaaatcaatggtatttcattctaaatgttatagaacattatcactcttttatttataaagcttatttttcaaaatgcc

SEQ ID NO: 653988 - DNA, 699 bp, Homo sapiens
cagctccgtccagaaattgtgatttgtgacgaattaaattttcctgtaaaacctttccctttatcgccagctgaaatttcctcatcaaggtacaaagtgaattcccccgttgcgaccttctagagtattgatcctcaggctaagtattcggcacaggccattggctagctgcagtacaggtctggacagtttccctgtcgtgagtccaattgttcaatcaaagaatggctcgtcaaaaacagtttcgctcctctggctgcagaccggtccaccgacctctatgccatggtggtggttctctcgagggcctcatgattcttgagtgagggccccccctcggtccagcattactcaatggtctgtgaaacctggcgatttctgtcttcagctcggttcccaaagggcatggcctccttacagtatcacccctgtcagcaagagttcttccgcaacttctcaagcatctccaaggccttggtggaacgaggtggtgtggtcaccaccaacccccttggcgtctaaaaactcgcggccagggcctgtcccagttatgtgccttcccgcaagccaaagccaaatcccctttccttaaggccctggtttgtcccttaggggccttgtgttcccaacactgtgcccgctctctaaagcactaatgtcctcgcaaaaaattaaaagttctagccccgccaaaaaaaa

SEQ ID NO: 653989 - DNA, 1642 bp, Homo sapiens
  misc_feature (369)..(369): n is a, c, g, or t
  misc_feature (1573)..(1573): n is a, c, g, or t
  misc_feature (1604)..(1604): n is a, c, g, or t
  misc_feature (1629)..(1629): n is a, c, g, or t
  misc_feature (1634)..(1634): n is a, c, g, or t
ccggggatatgtgaggaagaactggaccctacttgattcatctttgtgagatgtatgcgggtctgtccctcttcacggcaggggagagaggtgggagatgcctttctgtaccccgtccgaggtcactccctgtactagggcacttacatatatttgctgcttgtcggaaaataatccactacactttaagaataattacctcccaatgttactcttttgtgacgaaaatgcaaaggagcccgaaaatgcacttgacaagctcttctcttcagaacagcaggcttccatcttgcatgtgttgaatacagcatctactaaagaacttgaagctttccgattgcttcgtgaagaaggtccatcaatatcgtngagcacagagaaaactttgggccatttcagaatttagagagtttaatgaatgtgcccttgtttaagtataaaagtacagttcaagtttgtaactccatactttgtccaaagactggacgggaaaaaagaaagtcaccggaaaaccggttcctgagaaagctcctcaaaccagacatagaaagagaaagacttaaggcagttaatagtatcatatctatcgtttttggtactcgaagaattgcctgggctcaccttgatcgtaagttgacagtgctggactggcagcaaagtgaccgttggagtttaatgagaggaatatactcatcatcagtctatttagaagagatttcctcgatcatttcaaagatgcctaaagcagatttctatgttctggaaaaaacaggactttccattcagaactcatctctgtttccaatactgttacattttcatatcatggaagccatgctgtatgccttattaaataaaacttttgcccaggatgggcagcatcaggtgctgagcatgaatcgaaatgcagtggggaagcattttgaactgatgattggtgactcccggactagtggaaaagagctagtgaagcagtttctcttcgattctatactgaaggcggatcctcgggtgttcttcccatcagataaaatagttcactacagacagatgtttttatctactgaactacaaagagtagaagagctttatgattcattattacaagctattgccttctatgaattagcagtgtttgactctcagccttagaattctgaggttaacgtgctaaagtataattattagctctaacgtaacaccaactgttgtgaacatccatgttattggaaaagaacacattttcagtgtattttagatgtttaaattctgacttttggctattaaatggtttacacaataagccaagaccaaatcaataaacattttatgagattctgtgcctctcaggttaacgtgttaaacagtaacatggggcttggtgcagtggcttatgccgataatcccaagtagctgggactacagacaggcatgcaccaccatgcccggctaatttttgtatttttagtagagacgggatttcattatattggccagggctagtctcgaactcctggaccttgtggatcctcctgcctcggcctcccaaagtgttggggtttacagggcatgngccaccgtggcccagcagggttcattttttnaactttggcaatatttttaacttgnacagnccatcgtt

SEQ ID NO: 653990 - DNA, 1509 bp, Homo sapiens
  misc_feature (369)..(369): n is a, c, g, or t
ccggggatatgtgaggaagaactggaccctacttgattcatctttgtgagatgtatgcgggtctgtccctcttcacggcaggggagagaggtgggagatgcctttctgtaccccgtccgaggtcactccctgtactagggcacttacatatatttgctgcttgtcggaaaataatccactacactttaagaataattacctcccaatgttactcttttgtgacgaaaatgcaaaggagcccgaaaatgcacttgacaagctcttctcttcagaacagcaggcttccatcttgcatgtgttgaatacagcatctactaaagaacttgaagctttccgattgcttcgtgaagaaggtccatcaatatcgtngagcacagagaaaactttgggccatttcagaatttagagagtttaatgaatgtgcccttgtttaagtataaaagtacagttcaagtttgtaactccatactttgtccaaagactggacgggaaaaaagaaagtcaccggaaaaccggttcctgagaaagctcctcaaaccagacatagaaagagaaagacttaaggcagttaatagtatcatatctatcgtttttggtactcgaagaattgcctgggctcaccttgatcgtaagttgacagtgctggactggcagcaaagtgaccgttggagtttaatgagaggaatatactcatcatcagtctatttagaagagatttcctcgatcatttcaaagatgcctaaagcagatttctatgttctggaaaaaacaggactttccattcagaactcatctctgtttccaatactgttacattttcatatcatggaagccatgctgtatgccttattaaataaaacttttgcccaggatgggcagcatcaggtgctgagcatgaatcgaaatgcagtggggaagcattttgaactgatgattggtgactcccggactagtggaaaagagctagtgaagcagtttctcttcgattctatactgaaggcggatcctcgggtgttcttcccatcagataaaatagttcactacagacagatgtttttatctactgaactacaaagagtagaagagctttatgattcattattacaagctattgccttctatgaattagcagtgtttgactctcagccttagaattctgaggttaacgtgctaaagtataattattagctctaacgtaacaccaactgttgtgaacatccatgttattggaaaagaacacattttcagtgtattttagatgtttaaattctgacttttggctattaaatggtttacacaataagccaagaccaaatcaataaacattttatgagattctgtgcctctcaggttaacgtgttaaacagtaacatggggcttggtgcagtggcttatgccgataatcccagcactgtgggaggctgaggcaggaggactgcttgtgcccaggagctcaagagcagcctgggcaacatagcaagaccacataatttttaaacatttttcatt

SEQ ID NO: 653991 - DNA, 1524 bp, Homo sapiens
  misc_feature (369)..(369): n is a, c, g, or t
ccggggatatgtgaggaagaactggaccctacttgattcatctttgtgagatgtatgcgggtctgtccctcttcacggcaggggagagaggtgggagatgcctttctgtaccccgtccgaggtcactccctgtactagggcacttacatatatttgctgcttgtcggaaaataatccactacactttaagaataattacctcccaatgttactcttttgtgacgaaaatgcaaaggagcccgaaaatgcacttgacaagctcttctcttcagaacagcaggcttccatcttgcatgtgttgaatacagcatctactaaagaacttgaagctttccgattgcttcgtgaagaaggtccatcaatatcgtngagcacagagaaaactttgggccatttcagaatttagagagtttaatgaatgtgcccttgtttaagtataaaagtacagttcaagtttgtaactccatactttgtccaaagactggacgggaaaaaagaaagtcaccggaaaaccggttcctgagaaagctcctcaaaccagacatagaaagagaaagacttaaggcagttaatagtatcatatctatcgtttttggtactcgaagaattgcctgggctcaccttgatcgtaagttgacagtgctggactggcagcaaagtgaccgttggagtttaatgagaggaatatactcatcatcagtctatttagaagagatttcctcgatcatttcaaagatgcctaaagcagatttctatgttctggaaaaaacaggactttccattcagaactcatctctgtttccaatactgttacattttcatatcatggaagccatgctgtatgccttattaaataaaacttttgcccaggatgggcagcatcaggtgctgagcatgaatcgaaatgcagtggggaagcattttgaactgatgattggtgactcccggactagtggaaaagagctagtgaagcagtttctcttcgattctatactgaaggcggatcctcgggtgttcttcccatcagataaaatagttcactacagacagatgtttttatctactgaactacaaagagtagaagagctttatgattcattattacaagctattgccttctatgaattagcagtgtttgactctcagccttagaattctgaggttaacgtgctaaagtataattattagctctaacgtaacaccaactgttgtgaacatccatgttattggaaaagaacacattttcagtgtattttagatgtttaaattctgacttttggctattaaatggtttacacaataagccaagaccaaatcaataaacattttatgagattctgtgcctctcaggttaacgtgttaaacagtaacatggggcttggtgcagtggcttatgccgataatcccagcactgtgggaggctgaggcaggagaatcgcttgaacctgggaggcgaaggttgtggtaggccgagagcacatcattacactccagcctggacaaccagagcgaaactctgtctca

SEQ ID NO: 653992 - DNA, 265 bp, Homo sapiens
atttctagatttgttggtatgttgaatgcataggtctaatgatattcaaaggggggcaagaagtagcagggtctgtaaaagagcctgagtctataatagctatggaatcaattcaatatggactggtgtgctctctttaaatcaagatcctttaattaagcactgaaaatatagtcagcgtcagatcatttaaatgggcaatatctcatacaactgagccggtctcatttcagattgccaagactgaaacaggcaagcaaggggt

SEQ ID NO: 653993 - DNA, 1328 bp, Homo sapiens
gggagaacaggagcatggagggcgggctggggcgatgctgtgtgcttgctgaccggggcctcccgcggcttcggcacggacgactggaccacgctcctggcactcgactgaatgtctgcccggacatccgttgcttgtcacattagcagccctgagcgagctccacacacggtcctaaggggcatgcagagagatgcatgattagtcacgcaacgcgggcttctgtggctactgaggtgaatcacagatcaagttgaacaactacatgggcacatgacacttgaccatgcatgcatcttgacatgacttcacagcagatactgaccagggccatatacacaggaccagatccattggccttcaaccagaacaccggcggggttaaaccatccatctgatacacatcatgatgcaccatgacaaccccatcttcacacacgaggctcgggacagcatgcgtacctacgatcgccagaggcacaaggaatgcatacgatgcactacatgcatgactagccaacgggatccacactgggacgacactagtggaagagcaacaacgaaacataggcaacgagcgatgccacgagcaaacccaatggaccaccccgacaggtaccactacatggagacaccacaggaagcacactagtgccacccacagaaccacaggctaacacacgagcgacgaaacaacacaccgaagcgagacaccacaaagacaaccagtcgagcagacacaaacacgggagagcatgaccacacgactgacgtgacaacagcgggcacaaccaacccgggagccaacgcccacaagagaacggagacatcaggccaacaaagaacgaaaacagacaccaaacgacaacacccttgcccatgcaacacacaaaaccataggcacaccaaccaggcacaggaaaacacaccaccagaatcactgaacaccaccaacaaaacgaacgaacactcacaaaacctgcacgcacaagaccaaaagacgcacaagcagcaacacacacgagacagaaacccacgcacaacgacgctaacaagagcacagcccaaagacacaaacagcaactaaaccgacgaaataaaaacccaacaaagaagacaacaccacaacaccaacacctgagccaaacagaaggaccaacgacgaagaaaaccataaacaaaacaaaacaaaaacagccagaacaacaaagagaagcacacagacacaaaaacaacacaaaacaagacaaaaggaagaacacacaaaaggcaacaacgagagcagacacccaaacggaaagagaaacacaccaagaaaacaaacaaga

SEQ ID NO: 653994 - DNA, 390 bp, Homo sapiens
taacaacacagcctggctttaaaaagcatctaattctcaaaagcaatctaattggagacctacgtaatggacaaatccagcagctcttctggaaggtttattacccaagaacatctgaaaacacttcagagacagatcttgccaacaaaacacgaatgagcagcagatcacggccctgatctcatgcaaataaagcaatcatttttaggcaaaacaaacgttggcatatcctttcttagatatactgaaaagtcttggggtcttagaaaatcctggattcccatggacattgtttaaaaattttttttcttctaaaaactaaatgtacaatcataattccaaatcagaggacccctgagatatcgagcagctgagctctaaggaagttca

SEQ ID NO: 653995 - DNA, 1343 bp, Homo sapiens
  misc_feature (911)..(911): n is a, c, g, or t
ttgttcttattctctctgtggttcggttccttcttgcgttcgcctctgcggtttttgctcgctccgtccgttctcgtttgtttctgcctgccttgcctgctctgcgcttgttttctggtcccggcgcgtccccggggtttgctcggtgtgttgtgtgttgtgtggtggtgtgcgttccgcctatgttgctcttctgcttgttgctctctctcttcgcttctctctcttcgttcctctttgctggcctctcctcctcccgtttcaccgtctctctcgtggtgcttcgcctctcttctcctcctgtgtgttttgttgccccttttgcaccaatgttccttccctgcggttttcccccgtagttctcggtggatttctccggttttttccccccctgtatcggcggtgttttatatctgttctcgggcccacgtttgattcctgggttatatccgtccgtctacctatttagggggcgctctatggcttctgcccgtcatgtctctgttacggttcccgatgtcgtctgcggaagtcaagttgtattcgtttgtatatcggtcgccgcattaactttccgtagtaagcgataacatgtactttcgatatgttattcatgtgctgatcgggtaccggggacattaatgtcccccgggggaaattcgggccattatcggtccgggggtatctcggttggtgggccatctgccgctagaccagaccttcgctcgttatctcggtgcgccctctgcttcgctttttcctccgcacacgcactgtcttgtagctaatcccgatttatggctgagattcgtagaaagttcggaataatgtcgagatatctgtatggatgatctagatgacgccacattatgaatttattccatctggcctttcccaataggtaatcgatnttgaaccctggatgtatggcaagtcaggcgaatcgtaatgaggcgctgcgccggccaattatgcacctgtaacatgtccacacaggcatttgccttcttattgttacttgcttttagctgtttaactctgtgtaagatggcaaagatggttggatcaagtttaaatgtactgtgtctgcccctttcacatctaagtgactatctgacaatcgaatggccgcgccttgcctttcccatctgtctatctatctggctggcacgggaatggaaagacttgcatgttggtgaaggaagaagtggggtggaagaagtggggtgggacgacagtgaaatctagagttataaccaagctggcccaaggttgttcctgcagggctgttaatatgcatgttttattcgtgtgtgccattttttttaaatgtcgcagatgaa

SEQ ID NO: 653996 - DNA, 326 bp, Homo sapiens
agaggtctgagtccaatcagagctacagctgctggcctacaccacagccacagcaacgcaggatccgagcctcatctgcgacccacactcactgctcatggcaatggcagatccttaacccactgagtgaggccagggatcgaacctgcaacctcatggttcctagttgaatttgtttccactgcgcctgcctctctcttatagggactctggtaatggcatttagggcccacttgggttgcccaggatgatccctgcatctcaagacccttaacttaatcacacacaccaagacccttttcccaaataaggtcacactcacaggc

SEQ ID NO: 653997 - DNA, 746 bp, Homo sapiens
gctgcccgagcatccccgacgagcaccaccccctgctccacggcgcccagtcccatcgaccacccaagggctgaggagtacgagcgcacggcgccggactggcaggcagctccacctgcagccccggtgcgggatccactaggtgaagccagttgggctcctgagtctggtggggacatagagagtctttatgtctagctcagggattgtaaatacaccaatcagcactctgtatctggctcaaggtttgtaaacacaccaatcagcaccctgtgtttagctcaaggtttatgagtgcaccaatcgacactctgtatctagctgctctggtggggccttggagaacctttatgtctagctcagggattgtaaaaacaccaatcggcactctgtatctagctcaaggtttgtaaacccaccaatcagcaccctgtgtttagctcaaggtttgtgagtgcaccaatagacattctatctagctgctctggtgaggccttggagaacctgtgtgtggaaactctgtatctaactaatctgatggggatgtggagaacttttgtatctagctcagggattgtaaacgcaccaatcacggccctgtcaaaacaggccgctgggctctaccaatcagcaggatgtgggtggggccagataagagaataacagcaggctgccccagccagcagcggcaacccgctccggtccccttccacagcgtgcgcagctcagtactatcgctctatagc

SEQ ID NO: 653998 - DNA, 1204 bp, Homo sapiens
gcggaggtcaaggatacgggggcggggccagcgcggagctgcgagcgggagccgggcactccaggtgccatggatgggctcggcgcgcctgaccttctgagccagcctgagactgaatgcgctggccatgagggagaccaccccatggacaatgcatggggaaagcttctaaatgtgacactcagaatagggcccagtgatgcagctcgtttgcaccaagctttagctggaggtggcagcacattctttgagataccttatccttgtgagttatctcgtcaagataccgcacaggcgttcacgagggagtgaatgagctgacgcctactaatccaccgctacccaatgttcccacatgtcgggaggagaccgtgccttccggtggctcatgcacgcgagcagacggcaggcagcgcgccctgtcctcaagagcttattcgcccgttgcttctcctgtcgtttcaccagcaactgagagacatgcagctggagccatcgaacatcacccgaagctagtcctcatggggcagacaccctgtcctccgtttcgcctccctgacaccaaatgctcggacctggcgacgcccccaaccgtactctggcgcgtacgtcgcacgtggccgccctttcactctgccccctgccccgagagcccctttgcgccccccttcggcccatttcgccccacaccgcctgctcctccttgccacctcaacttcccctggcctcgccgcactctccgcccgtgccgcttcgggggcgctagtggcatgtccggtcccaaactcgcaatcctcttggcggcattggaaccacgccttgtcgagtcggaacacggacgcacccccttgcgtggcagtgtgcttcccacatcttggggccgtttggatcccagttcgcttacaccccccaggaataattccgatcttggcgcacacaggaggttcgttccccacgaactcggatagagcggatcttcagctcacccccttcgttctggtcactatcgcaccactctccgtttggtcgcgcacaccacgcaccctcttggctacccacccatcttcttgttgtcactacgggcaacgcgctggtgtctaccatcatcgcacgcgtcagcaacgaccatccctcgccgcgcccactccttgtgagtcgcatctccccgctgcttctcccccacaccgtcggccaatccagccag

SEQ ID NO: 653999 - DNA, 370 bp, Homo sapiens
tagcgaattccagctcggttcccaggtaccatttgaactggctctttcttcataggagcgattttaggggctgctaagtcactcttctcccctagaaactcagtatctaggaggctgagttttttagcgccagaacgttttttacctttagcaattatgatcacttatgggtatgtgagccactcagcgcgtcaggttatgagtcagtaagaacgtaacagattcatgtacgtacatgcaggggatgcgctaacattttgggctttataaccgaacgctcggttccttcactaaggaagcgagcgcctgcttggaatctgatcatccatagctggcgctatgcagtccattccctgcaggtgaatgggaa

SEQ ID NO: 654000 - DNA, 573 bp, Homo sapiens
gctaccaatgtactttcttccccaagagtggacatagatgtccagagtgtggactgtcaaggcccagacgggcacctaaaagatgctcaacagtgaaaatgcccaagtgcagtcatgcctggcttcaagaggaggagggcccagatgtggatgtgagcctgcccaaggctgacattgatgtctcaggacccaaagtggacgttgatgttcctgatgtgaatatcgaaggtccagatgcgaaactaaagggccccaagttcaagatgcctgagatgagcatcaaagcccccaagatctccatgcctgatattgacttaaatctgaaaggacccaaagtgaagggcgatgtggatgttacccttcctaaagtggaaggtgacctcaagggcccagaagctgacatcaagggcccaaaagtggacatcaacagccctgatgtggatgttcatggcccagactggcacctgaagatgcccaaggtgaaaatgaccaaattcagcatgcctggcttcagaggagaaggtccagatgtggatgtgagcctgtccaaggacgatgtcgatgtctcgggac

SEQ ID NO: 654001 - DNA, 296 bp, Homo sapiens
  misc_feature (236)..(236): n is a, c, g, or t
  misc_feature (275)..(275): n is a, c, g, or t
  misc_feature (296)..(296): n is a, c, g, or t
cctgaccaacatggggaagctccgtctctattaaaaatacaaaaattagttggacatggtggcgggtgcctgtaattccagctactcgggaggctgaggcaggagaatcacttgaacacaggaggcagaggtttcagttagccgagatcacgccattgcacttcagccttggcaacacagagcccagactttctcaaacacacacacaacaacacagagtatgttacatataaccngagacgggagtgcacatcttagagtgtgaataatttagnggtccagcagagcagcatctn

SEQ ID NO: 654002 - DNA, 409 bp, Homo sapiens
ctgggatggagcggttggcccaggccgggtgtctgtaacaccttgtatgcgtctctgtgtcgtagggtaaccttccctgtgatccttacgccctacctgtgtagacctccactgctagagccagactcacggacctgggattctacatggaggatcgcatacacgcactgtgccatggtgacacaggccactgcagacattggacgtcccttctctgagggcccagagccctggtcttgagtttgtcagcatgggccgatgtcgatgaccgtagaagcctactatggctgcgaatgcgtctgagagcgccagtccctcagtgggccattcgttttctggcgctcgatctgtagaccaggattgcttccacagatgcctactgctcgcattctgagtgcgcacaggctct

SEQ ID NO: 654003 - DNA, 273 bp, Homo sapiens
agtactcactgagagcatatacctaagatatttaggtcttagcatatctcatgactgtttaggatggctgtttgcttcttgacacttcttctgggccggggggtataatcttttttcctacaagacagcttcctagggtagtgtttcagtcagcacatcctcagtaccatcttagttcctccctcccataaaaataatgcccccttgttttctgaaaactcaggcagtcagggccagtcagaaaccatacagaaatgatatcttggagatttc

SEQ ID NO: 654004 - DNA, 167 bp, Homo sapiens
  misc_feature (86)..(86): n is a, c, g, or t
  misc_feature (100)..(100): n is a, c, g, or t
  misc_feature (139)..(139): n is a, c, g, or t
ttttctccgtttcatgtaatttttctaaggtttttggcagcactctgtaccctgtaacagtactcagtaccttttgtttgatgttnctgacaaggcctgnaaaaaaatcccttaaaggggaaacccattaaagtgtagnaaaaccaaaagggggaaatcactagtgc

SEQ ID NO: 654005 - DNA, 719 bp, Homo sapiens
acaattgtcaattagccaggttatccctggtacccccaatttaacagggtctgcatggttcccacctattgacctggaccagatctgtcgccgggaatgaccagtgctccattgtcattagttaagggtgccacgtttaccgtagaagctcgcattaaggtggtctgagcagtatcctttaagcaatgacttcttcatcgcgaacatttcataagggctctagcattcataacgtactctctcacaatatgcatatttactcatctgtctcgacagtatattagcattttgtactgtgaccggattcgcgcaggaagtgtcagtggtcctgcatttgggaggggtggaccagcatcggtctacgcgtgagtcggcgttctcattgatttgaagtctgtatcctgtgttgcaaatagtttgcacagtatcaccttccatatgtgtttgtcctgaagattcggcatggtcgttttccacctaaggatagtcactcagtctgagtctctttggtgatggtgcccatccttcttctgtgcgtgttatccgagtccgcaatgattatgaaggacacacaaaatcatatgcacagcagtgatagaaaactgcccctgtagtaacctggagaagtggctgatattctttcttcctcatatacgctagcatggttatgcttggactctccccgcatgttacgtctcagacaacaccggatatcagag

SEQ ID NO: 654006 - DNA, 1044 bp, Homo sapiens
gctagtgccctgaccacaccagagatgcagaaagaaatccaggagttaaacgaaggaatgcgctgcgctacagagagagattgagagaacattaaagcagctaccaatcatgtgactccagcaagagaaagagcaggtgtacacgaggagaggcatcaagtactgtaaaggcagtggtaggagagaggaagaggatggctacagaactgtctgatgcaattacttgaaggataccccaagagcaagaagcagttcgtttgaggaagttgggatatgagacggatgaacgattacgacgtcacactcccagtacccctgaggggtgcacggtccaggactgtgtggggactgcagcgatgtcagaagagtgagatgtcttgcactggctagctggaatgggttggcctttgttgttgttcctgctactttcacctttaatgcaagagcaagtcagggacgacaatgacagtaaatacacgatgcagctgggtaggagatggatgagggctgggtggataggggagtagacacacaggccgtcttcatggtccgaaacttgcggtaggcttgaggttaactattcatgagttggaaggcaatgtctaaagggagcaggcgttcgggaatatatacttgtaatttcagttttgatataaaactatctaattgccccctggatagtaaaagcatgacagagtatcgaacctgcaagaaggctgccgtgacgtctggagaaactacgggtatagaagaagtcgctactaaagagatgacatgggaggggccacggttaactcgcgactggtggggtagtgttacccagagcgctttaagcttatcggtacgggttgggtcctaccacaagtctgggtgaaatgcgggaccctggaaatgcaatgcccattcgtgacgcaaggcgttgacgggcggtcattcacctgacctcccacgtcgtttgcaattccatgccgtgacaaacaactcgtattgggcgaaagtaagagaagtacctaaggagccatggtatacactacacaagcgtca

SEQ ID NO: 654007 - DNA, 116 bp, Homo sapiens
acttaactagcaacctaagcatgattttacagcttttgcccttagggtttaaattacaattccaaatgttagacatactgtattttttcgttcagttttgcttaattttccccctt

SEQ ID NO: 654008 - DNA, 612 bp, Homo sapiens
cagtatcaggagcccattccctgtgagcagctggtgacggctctgtgtgacattaaccaggcctacacacagtttggaggtaagaggcctttcggtgtgtctctgctgtatatgggatgggacaaacactacggtttccagctctatcagagcgaccctagcggaaactacggaggctggaaagccacgtgcatcggcaacaacagcgcagctgctgtgtcaatgctgaagcaggactataaagagggagagatgactctgtctgcggccctcgctctcgccgtcaaagtgctgaacaagactatggacgtcagcaagctctcggcagagaaagttgagatcgctacactgacacgagagaacggcaaggccaaaaatcaaagtccctcaagccaaaaagaaagtggaagagctcatcaagaaccccgaagcggaagaagccaaagctgagaaggccaagaaagagaaagaccagaaggagaaagacaaataaaacgcctgcacttgttttctactgaaatgcaaacgcccgctgggattcgtaaaaaagttcatattgctctgtctgtccatctgtcgatttttttattaaacccaaaacgaaaagggcca

SEQ ID NO: 654009 - DNA, 269 bp, Homo sapiens
cagtaagtgacaattgttgtactgaaccactagttacgatgactcgctgatcataaacactgtgtgtaatatgtttttcctaaaaaacgtagcacccttcagcaggaccctataaaactttcctccagcccttgcctctttgcaggtagccccttctctgctgagctgcccactgcaacatattttcacaatttctctaataaatctgcccttctttacctacaactatcttggtaaatggcttcaccacctgcaaaactgaccctagg

SEQ ID NO: 654010 - DNA, 198 bp, Homo sapiens
acatttgtttcttgtgctggacggaggcttgtttacaggggctgttggcgccagtgcagggagttgttcaagctgtcctcgtccgtcaatgccgttgtctgcgtcaaactgggtgttctccacgccgtgtgatgagcctctcgtactctgtcccgaactcccgggccatcacggtgggttcccccaccagtgcctcgg

SEQ ID NO: 654011 - DNA, 272 bp, Homo sapiens
gcgtgtcttgtcaaatgcttcgggtagaacctggaggaggaggccatcatcatgaaggtcgtgaccgactggaccggtgggggagtctgtgttccacacaacccgctgggtgccccccttgatcggggagctgtacgggctgcgcaccacagaggaggctctccatgccagccacggcttcatgtggtacacgtaggccctgtgccctccggccacctggatccctgcccctccccactgggacggaataaatgctctgcaaggaacccacg

SEQ ID NO: 654012 - DNA, 265 bp, Homo sapiens
agttggtgacgaccacttcctcgacgtggggcgggcggacgggaagcctggggtcgtggccaccgcctcgggagcttccctccctgccggcctcagggagcgaacgtggtatgaaaaccacagggattccggatgccagacccctttttatacttcacttttctgcccagtgttgttttgttgttgttggtttttattttttatactttggccatccctcagaggtatattgcccaggtgtgggctgaataaaacaaggtttttc

SEQ ID NO: 654013 - DNA, 798 bp, Homo sapiens
  misc_feature (7)..(7): n is a, c, g, or t
  misc_feature (159)..(159): n is a, c, g, or t
  misc_feature (190)..(190): n is a, c, g, or t
  misc_feature (198)..(198): n is a, c, g, or t
  misc_feature (264)..(264): n is a, c, g, or t
  misc_feature (267)..(267): n is a, c, g, or t
  misc_feature (386)..(386): n is a, c, g, or t
  misc_feature (389)..(389): n is a, c, g, or t
  misc_feature (412)..(412): n is a, c, g, or t
  misc_feature (415)..(415): n is a, c, g, or t
  misc_feature (451)..(451): n is a, c, g, or t
  misc_feature (489)..(489): n is a, c, g, or t
  misc_feature (510)..(510): n is a, c, g, or t
  misc_feature (521)..(521): n is a, c, g, or t
  misc_feature (538)..(538): n is a, c, g, or t
  misc_feature (549)..(549): n is a, c, g, or t
  misc_feature (554)..(554): n is a, c, g, or t
  misc_feature (668)..(668): n is a, c, g, or t
  misc_feature (686)..(686): n is a, c, g, or t
actttcnggggggccacatatcttcaatgtcttcacattgtatctgagaaatgtttctggggcactcaaacaccaagtctactcaaatacgcttcccaagcggcttttctgttcatctctgctgcttccaggcgatcagctgctgggattatgccacgncctacaatggtggtatcggcgcgctcgttgngcggattngcttcttgtgggcttttgtgctgttgggcagggttgtctcctcctgcttccaactgaactcctggngtnaagtgaagaaattctggtttcatgcttactcgggagccagaaataaaaccaacaacaaattcagagtgctcctcagccattctaaccgctgctctagtgtagtccccagtggccagggngcnggtggggctcatttccgcaatanggnggcacccccgatgcaaaggcaggcccacttcttgcnggcctttcacaactcctgagcctggcaccacgtgagcntttactagatctgcccaggangctattttaangatacctccttcatacngctttttcacngtgtntcctatatctgcaaacttccggtcttcaaatatcaagaactcatggcattttgccagagttatcaactccttcatcacatccagagtaaaacattcaaaatatctacatgagtnttcagcatgcagatactnggtcctaaagcatctgctagctgcaacagctctctggccagtgaaacatcagcagatagacacagataggtctccttctttagcataagcctgagaagcttcgatgcaactg

SEQ ID NO: 654014 - DNA, 313 bp, Homo sapiens
  misc_feature (69)..(69): n is a, c, g, or t
  misc_feature (183)..(183): n is a, c, g, or t
  misc_feature (201)..(201): n is a, c, g, or t
gattactgattcatagcagaatcctgactaatacactataccatacatacaagatcaaacacgtgtgtntcctatatctgcaaacttccggtcttcaaatatcaagaactcatggcattttgccagagttatcaactccttcatcacatccagagtaaaacattcaaaatatctacatgagtnttcagcatgcagatactnggtcctaaagcatctgctagctgcaacagctctctggccagtgaaacatcagcagatagacacagataggtctccttctttagcataagcctgagaagcttcgatgcaactg

SEQ ID NO: 654015 - DNA, 125 bp, Homo sapiens
aagtctaacaaatcaaagatagggcatgactatgaagtaattaaccaatcataccaaacttttatatactaatgttgcccattgtccttttggaatgctaaagagcaatgacatttgacattgtt

SEQ ID NO: 654016 - DNA, 167 bp, Homo sapiens
aatggctcccactgttggtggtggggcctggtgggaggtgtttggatcgtgggggtggattcctcacgtgtggcttagcacctttccctcagtgatgagtgagttcacgtaagatttggttgttggaaagagcgtggcacctctccctgccttgttcccacttttgc

SEQ ID NO: 654017 - DNA, 964 bp, Homo sapiens
ccataatggtatacatctgcatttgaactagactgggtgagattcttcgggtcgtatattcaaagtctgtggtccttagtctcaaggaacgtgtgcgtatgttgtatcaggatacgcgggtcctatgccccatgccctaatgggttctccaattttttccgagtaatccagccttatgacaggatcgactaaaagatgcactatttagcccacactttcagagggatgaaatgtatctgtgcacatgtcaccatatcttcatgagcatggtcacgtacagattatttggttaacatgaatttctgctctgcagttgtgtcctacagcccctgttttcacgaggtggctcagtgctccctttccctttttggtgcttacacatctcagacacctttagcgctaacccttgtcaggcgacagtatttgtaggttcatgagatctcacctgttacctctgctcctggagcctttgaataaaaatgcacgtagctgaggccggatgcggtggctacacgcctgataaatcccggcactattgggaggcctaggcgggcggtcaggggttcgagaccagtctggccaacagtagtgaaaccgagtctcgtactaacaaatgcaaaaaattagccgggcgtaggtggccgggcgcctgtaaatcccagactaccttgggaaactgaggcgggagaatcatgatgaacccgggacgcaggggttgcagtgagcggagatcgcatcattgcactccagcctgggccacagggcgagactccgtttcaaaaaaaaaaaaatgcacatagctatcgagtgtgctttagcttgaaaaggtgaccttgcaacttcatgtcaacttctggctcctcaaacagtaggttggcagtaaggcagggtcccatttctcactgagaagattgtgaacatttccagtatggattttcatgtattactcctgcttatataaccg

SEQ ID NO: 654018 - DNA, 795 bp, Homo sapiens
cgaggagagagagtcacaacacgaatgaatagtggaacgaagagtttgaaacacagatacaattactgagcatgccaagcccctctccagcctcactccactgattgctgcagctaaggaggcaacaaagaacaatcactaaaaccacactcaccccagactaattgagccaagccttctgtgagataaatgcacattacagaaagtccaactcctgatgccctcttcttattgccttgcttgtgcgatttcctgatctagcactcaacaatacactgaaccaagggaaccgtgcgggcagaattgaagagaactgaatttttttttttaaagagatgagggccatttctaaattagagtttggggggcccctcgatggataaggcggagactcacagataaaaaaaaatattaacgcgacatcgtaagccgcctgtgggattaaatctgttatttaactaaaaactccaaaagaatgatattatgtgaactgttatttagggaagagatataatcggtatggagcgagatagtgaagtgaagctgacaacatacatgaagcataaagacaaaaacgtcaagaattttagaatgggacgaaccgtaaatctcgcgtatgtgagaaacgacaaaagaaatgctgcagccctaaacttaaatcgtccattaccaaagtgggaggaaatgacgacaaaatgattggggtgtgagggttctcaaatcttactatggtcctcgataagtgatagtaggaacgtattataactgaactattcaaaatcaaagtgaatttgg

SEQ ID NO: 654019 - DNA, 1373 bp, Homo sapiens
ctcagtgtatggtgtgtgtgtctgtagtgtgttatatatttagctttttggtcgtgtgggggcgccggcgcacgctatcaatcatacgatgtgtgtgacggtgtaacataatgcagtcatagaggtatgagatcactattcaatgtagtgttgtggttttttgtgttgtatttttttggtctgtgtcttcgctgctgcagtctgtcttcttatcttggctcccctgcttcgacaccagctattgtgagttatatgcagtactctgctgatgtttatgtttatatgaataatcaacgaattaataattatccaactaatacttacatctaccaacaatctatatctaccatcctattcctatcttattatctctaacttctatcgcctccctgacaaaacttcagttcgtcattacttatcttctttctactctatctacttactacctccaatcaacaacttccaacctcctacttacttactcctccttcttccattctgttgttgttagtttacttcctatctatctatcctcctatctacctctgccttgctgcattgcgatttcgtctggtggtgggtatctgtgtgcgtacatcatcatgtcattacttaatgcatttgtttcttgcgtcatactccataccttcacccgacctaccactcaggtagtccggtcggtatgttagttgttggtgttggtttgtttttggtggggcgggcgacaatcagtgacaagtaaacatcattctgctccttctttccttccgttagtgtgtggtggtacgtgctacgacgtactgtagctgtcgttcagcttcaatcaccatcatcaccatctctttccgggacatcatatctatcttcaacctaactaatattaatatatatatttttttcctttgttgtcatagaacattatatctacaattacttatattgtgtaatattactacatcacaccaataccaccgcaatcgctgtcgtgtgttcttttctcattatgattcagatgtcactactatttattcttacatcccggccgcggcggtgttggagtatgttgtggttgttggttggttgttgtatggttccttcctcccatcagtccatcatcccgccatcccaccccgctgtggcgttgtcgttattactcatatgatgatgattatatgttcatcatactacaaaacaaccacatctatgtagatgttacaaccacctcctcccgccgtgccgttcggtcggtcggttcgaatgaagggggtggtggagagatagtatgtgtgtgtgtgacacacacacatacacacacacacatagtataatatatatcacacacactactctctcacacacacgcgctgtggtgt

SEQ ID NO: 654020 - DNA, 789 bp, Homo sapiens
  misc_feature (298)..(298): n is a, c, g, or t
tagctgaaaattaactctgacctctgtgctcggctcatggacgctagaatattattcggtatgtacctgaaattgaagttggtggtggtctgaaagctatcattagattctgttggtaccgctggtccctgcaatcggagaaagatcttgtgcactagaacatactctcaaagatcacggtctaggtgaccggcgatatcggacgtacataagagtgcacttgcgtgaagcaatgtacagtcattataatcggcatcagaggcgaatatctggactatctctaacccgtggaatgccngttacaaaaagatagtgcaaccgagcgtcccaaagagaccgaattcagtatcgagcctgtgtcaactgagtagcagagtcccattcgaagagaacgtgtgtattgtgcaccctatgtcgtaaaatggctgatctcatgaagtaattcgcgctgttcgataatattccaatgagtgagaccgggtcatcacttacctcgggtactatcttttgatactgatcaacattaagtctatattaccattagttggtaatccacttcggtatgactatcgtttgccctagggatgatctgatgaacgcaaggctgcaccgtgcgccaaggggccctgtttacattcattgtaattttcctccagcaaggtttccattttggtatgcatttgattgtaaactcaggggttataaacaacttgacattcttctaaattaaagatttagtgagaaacagagccaaattggccctcttaccttaagcttttaattccaata

SEQ ID NO: 654021 - DNA, 113 bp, Homo sapiens
tgcctgtcttggcctttcaaagtgttgggattacagatgtgagccgccgtgcctggcctgcctggccacttaaaaaaaaaaatttagtagagatagttgcctaggctggtctt

SEQ ID NO: 654022 - DNA, 520 bp, Homo sapiens
agagtataaggtcggctcggttattcgtagtgcggtttcattttactgcggtgttcactcggattctccatctcagatgagcagactttgaggttgttccaggatgaagaactctggactggggagggctcgcgggaatggtttgagctaatctgcaaagcactatttgataccaccaatcagctcttcacccggttcagtgacaacaacctgctttattgctcgcagcctatcgccccgtcatctggcctgaatgttgagtttgcgggacggctcgtgggcaagtgtctctatgagtcctctctaggaggagcctacaagcagttggtccgagactcgcttcaaccgctctttcctggccaaatcataggactgcgtatgcattacaagtactttgaaacagatgaccagaattctacaaatctacagttgtttatcctcaacaatgactgagtgagatgggctggtctttgcagaagagaatatataaatcaggtcattggataaggttgtagactca

SEQ ID NO: 654023 - DNA, 581 bp, Homo sapiens
  misc_feature (179)..(179): n is a, c, g, or t
  misc_feature (255)..(255): n is a, c, g, or t
  misc_feature (364)..(364): n is a, c, g, or t
  misc_feature (435)..(435): n is a, c, g, or t
  misc_feature (457)..(457): n is a, c, g, or t
  misc_feature (475)..(476): n is a, c, g, or t
  misc_feature (483)..(483): n is a, c, g, or t
  misc_feature (487)..(487): n is a, c, g, or t
  misc_feature (509)..(509): n is a, c, g, or t
  misc_feature (556)..(556): n is a, c, g, or t
  misc_feature (575)..(575): n is a, c, g, or t
aagagaggtcagttatactcagtggacgtgactctggacccagacacggcctaccccagcctgatcctctctgataatctgcggcaagtgcggtacagttacctccaacaggacctgcctgacaaccccgagaggttcaatctgtttccctgtgtcttgggctctccatgcttcatcgncgggagacattattgggaggtagaggtgggagataaagccaagtggaccataggtgtctgtgaagactcagtgtgnagaaaaggtggagtaacctcagccccccagaatggattctgggcagtgtctttgtggtatgggaaagaatattgggctcttacctccccaatgactgccctacccctgnggacccggtccaggggggtggggattttcttgggactatgatgctggtgaggtcttcttctacaacggganagagaggggtcacaacctcaanttcttttcaaggtacctnnggggggnctgnccggccctacttcaagctttanttaatccgggaggggaaaaaggggaaggtccccctgttcaacttggncccaatgagtgggattggntgggtt

SEQ ID NO: 654024 - DNA, 451 bp, Homo sapiens
  misc_feature (426)..(426): n is a, c, g, or t
tgctccatagcccacctctgggccctagtcttttccattggaactaactctagaggtgacctcttccagcccaataactttaaagcccacctatttgcccataggtgtctccagccctggccttcctgtggaaggaccataatcacttggcagccacaggatatatcaaaaatgagtcacaactcttgattccatccacctccaaaatccaggtattttccttaattctcattctttcacaactccacatatatccatatcctcattatctcaggacaacgtgaccatttcttgccacttcccaccacttccatgcctaccaaagaagcctatcttctctcaccaggaccactgaaaaagtcttgcaactgatttcccttgtcctcttcttgcctctctacagtcaattctctatacaacagtcancagtaagatttgtttaaaaaaaaaa

SEQ ID NO: 654025 - DNA, 628 bp, Homo sapiens
  misc_feature (426)..(426): n is a, c, g, or t
aggcaatcaggggaaagatgcagagtccaggttcacgccactctcctaaactaccccggcataaagtgacgaccagcgaggatatgctctcaatcatggagaaatgggattcttgcatttttattatgaccttaccctgtgtgggctgccagaggacccagatcttcaggtttctgcgatgcagcaccagacagtgctggaactgacagagactggggtggaggcggtggcagcctccgccatctctgtggcccgcaccctggtggtctttgaagtgcagcagcccttcctattcgtgctctgggaccagcagcacaagttccctgtcttcatggggcgagtatatgaccccagggcctgagacctgcaggatcaggttagggcgagcgctacctctccagcctcagttctcagtggcagccatgntggtgcctgcatggacattggcgcgtgccacctcatgcttgaggtgtccggtatccaccaaaaggggtccctgagggtatgggcaagggacatgcttttattagcccttggccatgggcgggccatggttttccaaccactttttgggggtttgtgtaggtgagggtgaccggactctataaattagacctgtcagaccatg

SEQ ID NO: 654026 - DNA, 330 bp, Homo sapiens
acagctcggttgatatatcaccgtagtgtcatcttatagtgtctgtcgttaatcatcaggtcgtagttacgtcgcactgtcgtggttatattgtcagaaaacatgattagactaattcattaatggagacttcaagcttatcctgatcggctccagaaaaagttcacccaccttatgtcccttcttaaaacactggactgttggcatgcattagacttcagcactctgaagcaacatcctgacagtcatccacatctacttcaaggaatatcacgtcggaatacttttcagagagggaatgaaagataggcttgaatctaaatgcaatca

SEQ ID NO: 654027 - DNA, 929 bp, Homo sapiens
cgttcgggtggtggtggctgtagcgcttcggagacactgcctccgcccttccccggcctgtcagccggagtccgagggggcggccgtgggatcagatcccgtggctggggacagcgacaccgagggggaggacattttcaccggtgccgcggtggtcagtaaacatcagtctccgaagataactacttcccttcttcccatcaacaatggctccaacagaagaatgggatccatgaagaacaagaccaaaagccacaggagtctctttgcagatgccacagtggagctatccttgcaacgagcacacaaaactaaatcagaagaaggtgctatccaggaaacactcatttctcttcctcctcaggaagaccacaacacttcttcgtacattccccatgtcaacctatgcaggatgctaggatggatagtaacgaagcacgggaggactcagatttctgacttggagcacgtcgagtcataatctgactccgtgcagaagcatagggtgatgagtatgcaatgccatatggtagcgctacagaaggttaacagacactagacatagcttaccaattgttcacgacagcaaaagcagtttgcaagtaaatagagaacgcattatcagtgcacgtttgcttgggttcttctactgagacagcatttcgcgagcaagcgactcctcagaatggacttcagtagtcgcctcgcagcccgcgggagcaatgagcctacataggcgatgaacagaagtgaatcgtggcggaacggacagatccttctatctgcagaatctcttgagacgtcggagggcccgctttagaacaggtacccttcagcaggattgtaaatcatcctaccatgtacgaggaccctgacgtcagagaggtcttggacacaacgaacgagctgcgcacgtgccggggtaccag

SEQ ID NO: 654028 - DNA, 283 bp, Homo sapiens
tgtggcatctccacatgtctcctttcctgactgactctcagggcccagaggctcaggccaacaggtccagcagtggtcattctcacactttgtcctgggcctttaggtcctctgttccctgagtcatcagcacagggagtcctgatcagagttggggtcctcaagaaccaaaattctcaggctcttctgggtccctgccagctggggcctctctcttgagcaccgaggtagaggtcagcccccattcttcctgcctgcgcagaacccggggcacatacaaagg

SEQ ID NO: 654029 - DNA, 245 bp, Homo sapiens
accccccgggccctttaaaaaaaaccccccttatggaatttaaaagggttaataaatttggcctagttgataaaaaggctgtgggacaactgaaggagaactttccgaccctaaaacaggtatattacttagatgttaaaattttttagtggggtgggcaaatgctggggtgtcccccccaacatattttaatatggttttttaaatggttttcccccagcctaaggattaaaggatatgggcca

SEQ ID NO: 654030 - DNA, 137 bp, Homo sapiens
gtcctctagccaatctacctaattacctagtctacctaaatacctagtcataacgtagagttacctaaatatttaacttacctaaccctagaatatttttacttgtgggactataaatgtcccagtttcttttcttt

SEQ ID NO: 654031 - DNA, 385 bp, Homo sapiens
  misc_feature (125)..(125): n is a, c, g, or t
  misc_feature (279)..(279): n is a, c, g, or t
  misc_feature (308)..(308): n is a, c, g, or t
  misc_feature (315)..(315): n is a, c, g, or t
  misc_feature (341)..(341): n is a, c, g, or t
  misc_feature (357)..(357): n is a, c, g, or t
cagtgaaaaatagttaaattatcaccaacctcactgataaaaattcatctgaggtataactgacatctattgctaatggaatgaagatgaatgaagtagcttctaaatacaatgccttatctttncactatctggactagctgtaacctacccattccagggttttgtttttgtttttaaatttggggacttgactggaattgacttggaaaaaacaacgcagcacttgccatacttattatctgcctaatattgttaagatctaaaggcaattagganattctcaaggtatctaaatctgatagcanatactcntcttttaatgctttctaccttcccantgaggaaaagcagctnctcgtgggaaatgttcaaatctaccagg

SEQ ID NO: 654032 - DNA, 2979 bp, Homo sapiens
cacgtacgaaagttagaggttgagtgagcaagtgggacagatgaaaggtcagaagatgtggccagaggagagaatttcagagctgaagattttagaagcaaagcaaacacattctggatacacgtgagatccaagtggtgactgtgctactgagaagctgaacgaaatggaaagcaaagcctgttggagctgaggtcaaagaatgtgaagccagagtggatactgaatgggaaagttaataacaaggatgtggaagctattgaggagacggagtgcgcctaaagagctgctaagccgcacatctcttgagacccagaagctcgatctgatgactgaagtgtctgagctgaagctcaagctggttggcatggagaaggagcagagagagcaggaggagaagcagagaaaagcagaggagttactgcaagagctcaggcacctcaaaatcaaagtggaagagttggaaaatgaaaggaatcagtatgaatggaagctaaaggccactaaggctgaagtcgcccagctgcaagaacaggtggccctgaaagatgcagaaattgagcgtctgcacagccagctctcccggacagcagctctccacagtgagagtcacacagagagagaccaagaaattcaacgtctgaaaatggggatggaaactttgctgcttgccaatgaagataaggaccgtcggatagaggagcttacggggctgttaaaccagtaccggaaggtaaaggagattgtgatggtcactcaagggccttcggagagaactctctcaatcaatgaagaagaaccggagggaggtttcagcaagtggaacgctacaaataaggaccctgaagaattatttaaacaagagatgcctccaagatgtagctctcctacagtggggccacctccattgccacagaaatcactggaaaccagggctcagaaaaagctctcttgtagtctagaagacttgagaagtgaatctgtggataagtgtatggatgggaaccagcccttcccggtgttagaacccaaggacagccctttcttggcggagcacaaatatcccactttacctgggaagctttcaggagccacgcccaatggagaggctgccaaatctcctcccaccatctgccagcctgacgccacggggagcagcctgctgaggctgagagacacagaaagtggctgggacgacactgctgtggtcaatgacctctcatccacatcatcgggcactgaatcaggtcctcagtctcctctgacaccagatggtaaacggaatcccaaaggcattaagaagttctggggaaaaatccgaagaactcagtcaggaaatttctacactgacacgctggggatggcagagtttcgacgaggtgggctccgggcaaccgcagggccaagactctctaggaccagggactccaagggacagaaaagtgacgccaatgccccctttgcccagtggagcacagagcgtgtgtgtgcatggctggaggactttggcctggctcagtatgtgatctttgccaggcagtgggtatcttctggccacaccttattgacagccacccctcaggacatggaaaaggagctaggaattaagcacccactccacaggaagaagcttgttttagcagtgaaagccatcaacaccaaacaggaggagaagtctgcactgctagaccacatttgggtgacaaggtggcttgatgatattggcttaccccagtacaaagaccagtttcatgaatctagagttgacggacgaatgctgcaatacctaactgtgaacgatttactcttcttaaaagtcaccagccaactacatcatctcagcatcaaatgtgccattcacgtgctgcatgtcaacaagttcaacccccactgcctgcaccggcggccagctgatgagagtaacctttctccttcagaagttgtacagtggtccaaccacagggtgatggagtggttacgatctgtggacctggcagagtatgcacccaatcttcgagggagtggagtccatggaggcctcattatcctggagccacgcttcactggggacaccctggctatgcttctcaacatccccccacaaaagacgctcctcaggcgccacctgaccaccaagttcaatgccttgattggtccggaggctgaacaggaaaagcgagagaaaatggcctcaccagcttacacaccactgaccaccacagccaaagtccggccaaggaaactaggattttcacacttcggaaacataagaaaaaagaagttcgatgaatcgacggactacatttgcccaatggagcccagtgacggtgtcagtgatagtcacagggtctacagtggctaccggggcctcagcccccttgatgcccctgaactggatgggctggaccaggtgggacagattagctgatgcccttgtcacctgccctctgtgcaccctgagagctcacagtaacactgtgtgtgtcaccatataactgcacctcacccccgcacgtgtgcatgactcgcagagaatattccagcaattgtgtacccctgggccagtctctttgaaccctgagggtggccaggatctggagctgcatctctaaggggccaggctttggggaccattgccaaaggtggactcaggaggaaagacacttaaagacacttttacatgtctagtaattcttgatgttcatcttcagcaccagtggaaacacatgaacttcgatgcaggtccagagaccatggacactcccacgaggctcagctctcaggcaccccctacacttcagttgagggaaaagctcaagtgccttaggcccgtggaccacagtcttggctgagatcaaagggatgagcaacagggacttctgccacagtgacaatggaattgtgttgtgccttacttcagaggtggtctcttctttcttgtaataaaagcaatatttatgcggaaagcaagcaaaaaaa

SEQ ID NO: 654033 - DNA, 254 bp, Homo sapiens
  misc_feature (246)..(246): n is a, c, g, or t
aggatccccaaagcagttaatacagactcattttcatggtttatgtagagcttcaattttgtctaagcctttacattcttcaatcattatactaagtttctcagtttcacctagtttctcagcagcctgaaaggatatttgaaacgggcatccagggataaccatgaataatctatggtatcgttttgcagttacagaggttcatcaagcggttctattatagcccacagtgaacacgggtacacnaatctgtt

SEQ ID NO: 654034 - DNA, 1736 bp, Homo sapiens
  misc_feature (17)..(17): n is a, c, g, or t
gagcgggctggccagcnggtccccgggaacaggaaccctggtggacgggtccagcaggcttcttcggtgcccgagagggagcgggtgcccaagggggtggtccctgtggcaggtcccggggtgggggcgcggcgctccgggaagagccttccgcaggtccccgccccgtcacgtgggcgccggccccggccgctgcggtcggtccgctggttggtcgggcgcttggtccggcagttggtcggtgggccagtggcccgtcgctcgcttctgggctctcatgtttgaaggtgggagggacacgggagcggcccgcacaccttattgacagccacccctcaggacatggaaaaggagctaggaattaagcacccactccacaggaagaagcttgttttagcagtgaaagccatcaacaccaaacaggaggagaagtctgcactgctagaccacatttgggtgacaaggtggcttgatgatattggcttaccccagtacaaagaccagtttcatgaatctagagttgacggacgaatgctgcaatacctaactgtgaacgatttactcttcttaaaagtcaccagccaactacatcatctcagcatcaaatgtgccattcacgtgctgcatgtcaacaagttcaacccccactgcctgcaccggcggccagctgatgagagtaacctttctccttcagaagttgtacagtggtccaaccacagggtgatggagtggttacgatctgtggacctggcagagtatgcacccaatcttcgagggagtggagtccatggaggcctcattatcctggagccacgcttcactggggacaccctggctatgcttctcaacatccccccacaaaagacgctcctcaggcgccacctgaccaccaagttcaatgccttgattggtccggaggctgaacaggaaaagcgagagaaaatggcctcaccagcttacacaccactgaccaccacagccaaagtccggccaaggaaactaggattttcacacttcggaaacataagaaaaaagaagttcgatgaatcgacggactacatttgcccaatggagcccagtgacggtgtcagtgatagtcacagggtctacagtggctaccggggcctcagcccccttgatgcccctgaactggatgggctggaccaggtgggacagattagctgatgcccttgtcacctgccctctgtgcaccctgagagctcacagtaacactgtgtgtgtcaccatataactgcacctcacccccgcacgtgtgcatgactcgcagagaatattccagcaattgtgtacccctgggccagtctctttgaaccctgagggtggccaggatctggagctgcatctctaaggggccaggctttggggaccattgccaaaggtggactcaggaggaaagacacttaaagacacttttacatgtctagtaattcttgatgttcatcttcagcaccagtggaaacacatgaacttcgatgcaggtccagagaccatggacactcccacgaggctcagctctcaggcaccccctacacttcagttgagggaaaagctcaagtgccttaggcccgtggaccacagtcttggctgagatcaaagggatgagcaacagggacttctgccacagtgacaatggaattgtgttgtgccttacttcagaggtggtctcttctttcttgtaataaaagcaatatttatgcggaaagcaagcaaaaaaa

SEQ ID NO: 654035 - DNA, 1235 bp, Homo sapiens
agctgcttactatggaagatgaaggaaattctgacatgttagtggtgaccacaaaagcaggccttcttgcagttgacaacattgcagcaaacaccaatgcacacagacacacaagacagcacactgttcaaagttcaattgccggttctgcgaacacaagcacaacagcacaacttcgagacacaagttgggagaatggacaagagcaacttaaccgatgcagcaaagcaacagcatgtgaccaactgcaagcgagaactaaacagggtcttactgaagtcaacacaaagcttcaacacatggcaccacatgaagcagtttcaagaagaggttctagtgcatgctacatccaaagcccatcagcttgcaggcaagatattgtgtcaagtaacaccataaagccaattgccaacaagcaaaccggcaattcagcacagtattcaacaggacacaactcgaagcaaggcaccaaccatgcaacagagaacgaacttgacatgtcagttctgcaagaccagcagcacaggatgcaccacaggaactatcataacggtacattcgcacagcaatacagaaactagaaaaataccaagcttatgtccagaggtccagcacttcaaaacaaatctagatcgggacgacaaaggacaagcggtgcatcacctcactttcacaagaccgcagattgggccagcgctgcagccaatggtcggctggaccacggcacatctgcaaacgcacactcacctgccttaccaacctcaactcacagaacgcatccggtctacaaaacgaagccaaacttcggaacacgacaacagggaaacaggatacaagagcaaagcccgcgcgcacgacagtgcaatatccgggactacagaaaccccagtcaagtccggccaacggaccgcacacaagacaggcgtgccacaccggctcaggcaccctcggccaaccccgcacaggcgaaccagcaccagacagaacaaaggaacacatcagaccacgcacgcaccaaccacgaacaacaagcaccggtaacaaaccagaagaacagacacgcaaacaaaaaaaagaggaagtgacaaaacaaagaaggccagacgcacgaacaccaccgacgagaacagccgcacacagggcagaagatcgcacaaagacaccgagaaccgaccaaacaggaaagcagaaagagaaaacaaataaccccgcaagcgccacctgaacgaaagaaa

SEQ ID NO: 654036 - DNA, 863 bp, Homo sapiens
  misc_feature (800)..(800): n is a, c, g, or t
aaacttacggctaggtacgaggcctgggtgttagacagaaaagtgacgccaatgccccctttgcccagtggagcacagagcgtgtgtgtgcatggctggaggactttggcctggctcagtatgtgatctttgccaggcagtgggtatcttctggccacaccttattgacagccacccctcaggacatggaaaaggagctaggaattaagcacccactccacaggaagaagcttgttttagcagtgaaagccatcaacaccaaacaggaggagaagtctgcactgctagaccacatttgggtgacaaggtggcttgatgatattggcttaccccagtacaaagaccagtttcatgaatctagagttgacggacgaatgctgcaatacctaactgtgaacgatttactcttcttaaaagtcaccagccaactacatcatctcagcatcaaatgtgccattcacgtgctgcatgtcaacaagttcaacccccactgcctgcaccggcggccagctgatgagagtaacctttctccttcagaagttgtacagtggtccaaccacagggtgatggagtggttacgatctgtggacctggcagagtatgcacccaatcttcgagggagtggagtccatggaggcctcattatcctggagccacgcttcactggggacaccctggctatgcttctcaacatccccccacaaaagacgctcctcaggcgccacctgaccaccaagttcaatgccttgattggtccggaggctgaacaggaaaagcgagagaaaatggctcacagttanacatgacaccagcaagccgcaggattgtttcttgaataaaaaatttattggaattccagcggg

SEQ ID NO: 654037 - DNA, 625 bp, Homo sapiens
tctctctcctcccgccgcccaaaatgccgaagggaaaaaaggccaggggaaaaaaggtggttccggccccagctgtcgtgaaaaaccaggaggctaaaaaagtggtgaatcccctgtttgaaaaagggcctaagaattttgggctttggacaggacattccagcccaaaagagacctcacccgttttgtgaaattggccccgctatatcaggttgcagcggcagagagccatcctcatataagcgcgctgaaagtgcctccgtgcgatttaaccagttcacccaggccctgtggaccgccaaacagcttacttcagctgtgctttaagctgtggcccacaatgtttacagaccagagacaaagcaagagaagacgcagacgacttgttgcgcccgggccgagaaagaaggcttgcgtggcaaagggggacgttcccaacgaagagacccacctgtgttccttcgagcaggagttaaacaccggtcacccaccttttggtgtggaagaacaagagaaggcttcagctgtgggttggtgaattgccacacagaggggtggattcccattcgaggcgtggtgtgtctctcttgccttgcccgtggtgtcgttaaaagggggggggtcc

SEQ ID NO: 654038 - DNA, 678 bp, Homo sapiens
  misc_feature (1)..(1): n is a, c, g, or t
  misc_feature (78)..(78): n is a, c, g, or t
nacaggattttggtacctgcttctgggaatttgccacgacctgttaactttacctatgtgagggaaagggacaaaganacatcttctttttcttcccagacctcaaccttgtaggttttaaagagccttaaagcatggtgccaaggggtcttaggtactgcaaaccaaagcctttaggtatgctctaatacggtgaaaacaaaggacagaaggtttttaggttagaaacctttagccaatagaggcatatggtatgttgtaaagctggaaccaagtttgcatttttgagggctttagatgaaggatagtctcttatcagatagtaagacagtgcagttttcgtcagttttcttgtctgaacactaatggacaattctagcactttgtttgaaggatttcagagttaacctcatgaaattcagtattttttagcaagtttgcttttggttttatcttggcttttagtaatcatgttggctggtctggtcacaggtgactgtgaaacatatgccctggtcttgctttcatcactctaggatcatgaagtgctatggtatttcctggtctatgaatattaaggttggaatgtacatttttattcattgtttggatcagatgctcagttcctgtagaaaacgtgctgtaaaagcccatgcaacaggctaaataaaacttgaa

SEQ ID NO: 654039 - DNA, 931 bp, Homo sapiens
agcggagggttacttaccggggctgactccacagaggaccatggtgggacctattaagcctaacttcctcactctccttctccctctgacagagtaacctttctccttcagaagttgtacagtggtccaaccacagggtgatggagtggttacgatctgtggacctggcagagtatgcacccaatcttcgagggagtggagtccatggaggcctcattgtgagtggctctctggcctagcccacctgccttggtgcaaatgggatattcagaaacttatttattaaggacaagacacaaaagctaacgaaaaaaaataggtacttcatctggaggtcttgcataatttgatgtctcaaagtattttgataatttgtccttgagaattaatatacctcatggaagcaagatgccttctggcagcacctccttggcatgagacttgaggattctaggtcgatgggttgcatggagaccaacgcttacaaggcgagggaacagcagggctgaggaagggacggggaagccgtaaaaatgcagcttcccacttgctgcaataggatccctatcactactcagatctgtcagtggcaaagccagaggggaaatgaggaagtgtggtggcttggatgtcatccagagaagatcctgagagacagcctcaccaaagaggtcccagttctctgctggcctgtgaaaacaaggtggtcagtcagcacatgtgctagtatgtgctcagagccaggccctgtgccagccagtgagtggagtgggactcagaacaagtgactgagctcctgtccctcctctggaggcacccccagccccaacaggccagtctctcagcatcctccccctcgagccatttgtatttgctcctggccaggcttgtctctggttccttcttagatcctggagccacgcttccctgg

SEQ ID NO: 654040 - DNA, 98 bp, Homo sapiens
  misc_feature (80)..(80): n is a, c, g, or t
tgcatccccaccatcaccatcattaccagcactaccatctctaccactaatatcatcatcattgccaccaattcttttcncgcgcatgctttttcacg

SEQ ID NO: 654041 - DNA, 442 bp, Homo sapiens
tccccgtcccacgcacagttgaggattctacgtggatctctcggctcccctggtgtgtgtgtgtgtgcggaggaggccgcggcccttagatcacattcattgccttcttccaatctcaggagacacagaaagtggctgggacgacactgctgtggtcaatgacctctcatccacatcatcgggcactgaatcaggtcctcagtctcctctgacaccagatggtaaacggaatcccaaaggcattaagaagttctggggaaagtaagttggtgccgttgatcctaattatattgcttagaatttttctttttgattgggcaaagagtctatgtaagcccctggtccaatagacactgaaacggcagtcaaaacagagtgttcatgttcaaagagaagattctgagatattttccagggccaagagaaggagaagtatgaaaga

SEQ ID NO: 654042 - DNA, 3573 bp, Homo sapiens
  misc_feature (17)..(17): n is a, c, g, or t
gagcgggctggccagcnggtccccgggaacaggaaccctggtggacgggtccagcaggcttcttcggtgcccgagagggagcgggtgcccaagggggtggtccctgtggcaggtcccggggtgggggcgcggcgctccgggaagagccttccgcaggtccccgccccgtcacgtgggcgccggccccggccgctgcggtcggtccgctggttggtcgggcgcttggtccggcagttggtcggtgggccagtggcccgtcgctcgcttctgggctctcatgtttgaaggtgggagggacacgggagcggcccgcacacctgagccgcccggagaggagcctcggccccgtacccagtaagaagaggaggaggccaggcaggcaaaaggagtcatggcttctgatgctagtcatgcgctggaagctgccctggagcaaatggacgggatcattgcaggcactaaaacaggtgcagatcttagtgatggtacttgtgagcctggactggcttccccggcctcctacatgaaccccttcccggtgctccatctcatcgaggacttgaggctggccttggagatgctggagcttcctcaggagagagcagccctcctgagccagatccctggcccaacagctgcctacataaaggaatggtttgaagagagcttgtcccaggtaaaccaccacagtgctgctagtaatgaaacctaccaggaacgcttggcacgtctagaaggggataaggagtccctcatattgcaggtgagtgtcctcacagaccaagtagaagcccagggagaaaagattcgagacctggaagtgtgtctggaaggacaccaggtgaaactcaatgctgctgaagagatgcttcaacaggagctgctaagccgcacatctcttgagacccagaagctcgatctgatgactgaagtgtctgagctgaagctcaagctggttggcatggagaaggagcagagagagcaggaggagaagcagagaaaagcagaggagttactgcaagagctcaggcacctcaaaatcaaagtggaagagttggaaaatgaaaggaatcagtatgaatggaagctaaaggccactaaggctgaagtcgcccagctgcaagaacaggtggccctgaaagatgcagaaattgagcgtctgcacagccagctctcccggacagcagctctccacagtgagagtcacacagagagagaccaagaaattcaacgtctgaaaatggggatggaaactttgctgcttgccaatgaagataaggaccgtcggatagaggagcttacggggctgttaaaccagtaccggaaggtaaaggagattgtgatggtcactcaagggccttcggagagaactctctcaatcaatgaagaagaaccggagggaggtttcagcaagtggaacgctacaaataaggaccctgaagaattatttaaacaagagatgcctccaagatgtagctctcctacagtggggccacctccattgccacagaaatcactggaaaccagggctcagaaaaagctctcttgtagtctagaagacttgagaagtgaatctgtggataagtgtatggatgggaaccagcccttcccggtgttagaacccaaggacagccctttcttggcggagcacaaatatcccactttacctgggaagctttcaggagccacgcccaatggagaggctgccaaatctcctcccaccatctgccagcctgacgccacggggagcagcctgctgaggctgagagacacagaaagtggctgggacgacactgctgtggtcaatgacctctcatccacatcatcgggcactgaatcaggtcctcagtctcctctgacaccagatggtaaacggaatcccaaaggcattaagaagttctggggaaaaatccgaagaactcagtcaggaaatttctacactgacacgctggggatggcagagtttcgacgaggtgggctccgggcaaccgcagggccaagactctctaggaccagggactccaagggacagaaaagtgacgccaatgccccctttgcccagtggagcacagagcgtgtgtgtgcatggctggaggactttggcctggctcagtatgtgatctttgccaggcagtgggtatcttctggccacaccttattgacagccacccctcaggacatggaaaaggagctaggaattaagcacccactccacaggaagaagcttgttttagcagtgaaagccatcaacaccaaacaggaggagaagtctgcactgctagaccacatttgggtgacaaggtggcttgatgatattggcttaccccagtacaaagaccagtttcatgaatctagagttgacggacgaatgctgcaatacctaactgtgaacgatttactcttcttaaaagtcaccagccaactacatcatctcagcatcaaatgtgccattcacgtgctgcatgtcaacaagttcaacccccactgcctgcaccggcggccagctgatgagagtaacctttctccttcagaagttgtacagtggtccaaccacagggtgatggagtggttacgatctgtggacctggcagagtatgcacccaatcttcgagggagtggagtccatggaggcctcattatcctggagccacgcttcactggggacaccctggctatgcttctcaacatccccccacaaaagacgctcctcaggcgccacctgaccaccaagttcaatgccttgattggtccggaggctgaacaggaaaagcgagagaaaatggcctcaccagcttacacaccactgaccaccacagccaaagtccggccaaggaaactaggattttcacacttcggaaacataagaaaaaagaagttcgatgaatcgacggactacatttgcccaatggagcccagtgacggtgtcagtgatagtcacagggtctacagtggctaccggggcctcagcccccttgatgcccctgaactggatgggctggaccaggtgggacagattagctgatgcccttgtcacctgccctctgtgcaccctgagagctcacagtaacactgtgtgtgtcaccatataactgcacctcacccccgcacgtgtgcatgactcgcagagaatattccagcaattgtgtacccctgggccagtctctttgaaccctgagggtggccaggatctggagctgcatctctaaggggccaggctttggggaccattgccaaaggtggactcaggaggaaagacacttaaagacacttttacatgtctagtaattcttgatgttcatcttcagcaccagtggaaacacatgaacttcgatgcaggtccagagaccatggacactcccacgaggctcagctctcaggcaccccctacacttcagttgagggaaaagctcaagtgccttaggcccgtggaccacagtcttggctgagatcaaagggatgagcaacagggacttctgccacagtgacaatggaattgtgttgtgccttacttcagaggtggtctcttctttcttgtaataaaagcaatatttatgcggaaagcaagcaaaaaaa

SEQ ID NO: 654043 - DNA, 2974 bp, Homo sapiens
gaggagtaacacctcagggggcctcagctcctttttcagccattccctcaagtacttggaattccagccagtcccaggtaaaccaccacagtgctgctagtaatgaaacctaccaggaacgcttggcacgtctagaaggggataaggagtccctcatattgcaggtgagtgtcctcacagaccaagtagaagcccagggagaaaagattcgagacctggaagtgtgtctggaaggacaccaggtgaaactcaatgctgctgaagagatgcttcaacaggagctgctaagccgcacatctcttgagacccagaagctcgatctgatgactgaagtgtctgagctgaagctcaagctggttggcatggagaaggagcagagagagcaggaggagaagcagagaaaagcagaggagttactgcaagagctcaggcacctcaaaatcaaagtggaagagttggaaaatgaaaggaatcagtatgaatggaagctaaaggccactaaggctgaagtcgcccagctgcaagaacaggtggccctgaaagatgcagaaattgagcgtctgcacagccagctctcccggacagcagctctccacagtgagagtcacacagagagagaccaagaaattcaacgtctgaaaatggggatggaaactttgctgcttgccaatgaagataaggaccgtcggatagaggagcttacggggctgttaaaccagtaccggaaggtaaaggagattgtgatggtcactcaagggccttcggagagaactctctcaatcaatgaagaagaaccggagggaggtttcagcaagtggaacgctacaaataaggaccctgaagaattatttaaacaagagatgcctccaagatgtagctctcctacagtggggccacctccattgccacagaaatcactggaaaccagggctcagaaaaagctctcttgtagtctagaagacttgagaagtgaatctgtggataagtgtatggatgggaaccagcccttcccggtgttagaacccaaggacagccctttcttggcggagcacaaatatcccactttacctgggaagctttcaggagccacgcccaatggagaggctgccaaatctcctcccaccatctgccagcctgacgccacggggagcagcctgctgaggctgagagacacagaaagtggctgggacgacactgctgtggtcaatgacctctcatccacatcatcgggcactgaatcaggtcctcagtctcctctgacaccagatggtaaacggaatcccaaaggcattaagaagttctggggaaaaatccgaagaactcagtcaggaaatttctacactgacacgctggggatggcagagtttcgacgaggtgggctccgggcaaccgcagggccaagactctctaggaccagggactccaagggacagaaaagtgacgccaatgccccctttgcccagtggagcacagagcgtgtgtgtgcatggctggaggactttggcctggctcagtatgtgatctttgccaggcagtgggtatcttctggccacaccttattgacagccacccctcaggacatggaaaaggagctaggaattaagcacccactccacaggaagaagcttgttttagcagtgaaagccatcaacaccaaacaggaggagaagtctgcactgctagaccacatttgggtgacaaggtggcttgatgatattggcttaccccagtacaaagaccagtttcatgaatctagagttgacggacgaatgctgcaatacctaactgtgaacgatttactcttcttaaaagtcaccagccaactacatcatctcagcatcaaatgtgccattcacgtgctgcatgtcaacaagttcaacccccactgcctgcaccggcggccagctgatgagagtaacctttctccttcagaagttgtacagtggtccaaccacagggtgatggagtggttacgatctgtggacctggcagagtatgcacccaatcttcgagggagtggagtccatggaggcctcattatcctggagccacgcttcactggggacaccctggctatgcttctcaacatccccccacaaaagacgctcctcaggcgccacctgaccaccaagttcaatgccttgattggtccggaggctgaacaggaaaagcgagagaaaatggcctcaccagcttacacaccactgaccaccacagccaaagtccggccaaggaaactaggattttcacacttcggaaacataagaaaaaagaagttcgatgaatcgacggactacatttgcccaatggagcccagtgacggtgtcagtgatagtcacagggtctacagtggctaccggggcctcagcccccttgatgcccctgaactggatgggctggaccaggtgggacagattagctgatgcccttgtcacctgccctctgtgcaccctgagagctcacagtaacactgtgtgtgtcaccatataactgcacctcacccccgcacgtgtgcatgactcgcagagaatattccagcaattgtgtacccctgggccagtctctttgaaccctgagggtggccaggatctggagctgcatctctaaggggccaggctttggggaccattgccaaaggtggactcaggaggaaagacacttaaagacacttttacatgtctagtaattcttgatgttcatcttcagcaccagtggaaacacatgaacttcgatgcaggtccagagaccatggacactcccacgaggctcagctctcaggcaccccctacacttcagttgagggaaaagctcaagtgccttaggcccgtggaccacagtcttggctgagatcaaagggatgagcaacagggacttctgccacagtgacaatggaattgtgttgtgccttacttcagaggtggtctcttctttcttgtaataaaagcaatatttatgcggaaagcaagcaaaaaaa

SEQ ID NO: 654044 - DNA, 317 bp, Homo sapiens
acccccccttttttttcaaaaccaaggggtttcccaaggaaatggcccccctgggccgggtttttttgggcccccccccggaaaagggaatctgggtttcccgggggggggtgttttttgggggatttccccccaagggggccccaaaaggtttttcccctttgaaggttttttaaaaatttttcccgggggtttttttttttttaaaaggggggccgggtccccagggggggggggggttttttccccccaaaggcttttttggtttccagggggggggggcttttttttttttttaaaaggggttttccccctta

SEQ ID NO: 654045 - DNA, 309 bp, Homo sapiens
tacagcttggtgctttccgctctcacagaagccttcagacattcccgctgccggtcttggcatcttcgaagtaaggagagttttagatgcttctggatgttcgatgctagctcctttacagactgcagcagctcgatttgtcttcgtattttctttcctgagcactataagtgctgggctcccatctttttttctccctttggtgttccggagttctgctccatctccaccataaagctggcggccctcggctttggcgcatccgtagcggctatggtgtccttccctccccagtggtatcactacttt

SEQ ID NO: 654046 - DNA, 3729 bp, Homo sapiens
  misc_feature (17)..(17): n is a, c, g, or t
gagcgggctggccagcnggtccccgggaacaggaaccctggtggacgggtccagcaggcttcttcggtgcccgagagggagcgggtgcccaagggggtggtccctgtggcaggtcccggggtgggggcgcggcgctccgggaagagccttccgcaggtccccgccccgtcacgtgggcgccggccccggccgctgcggtcggtccgctggttggtcgggcgcttggtccggcagttggtcggtgggccagtggcccgtcgctcgcttctgggctctcatgtttgaaggtgggagggacacgggagcggcccgcacacctgagccgcccggagaggagcctcggccccgtacccaggaaaaactggcggagagcctcagaaccacctgtttcctctgctgcaccatgcttgagtgtggaagccgtgcccctgttctccacagcgtgtatggccattcggcacatgtgtagatttgctgaatgagcaaacagcaactcctccagtttacagactaagaagaggaggaggccaggcaggcaaaaggagtcatggcttctgatgctagtcatgcgctggaagctgccctggagcaaatggacgggatcattgcaggcactaaaacaggtgcagatcttagtgatggtacttgtgagcctggactggcttccccggcctcctacatgaaccccttcccggtgctccatctcatcgaggacttgaggctggccttggagatgctggagcttcctcaggagagagcagccctcctgagccagatccctggcccaacagctgcctacataaaggaatggtttgaagagagcttgtcccaggtaaaccaccacagtgctgctagtaatgaaacctaccaggaacgcttggcacgtctagaaggggataaggagtccctcatattgcaggtgagtgtcctcacagaccaagtagaagcccagggagaaaagattcgagacctggaagtgtgtctggaaggacaccaggtgaaactcaatgctgctgaagagatgcttcaacaggagctgctaagccgcacatctcttgagacccagaagctcgatctgatgactgaagtgtctgagctgaagctcaagctggttggcatggagaaggagcagagagagcaggaggagaagcagagaaaagcagaggagttactgcaagagctcaggcacctcaaaatcaaagtggaagagttggaaaatgaaaggaatcagtatgaatggaagctaaaggccactaaggctgaagtcgcccagctgcaagaacaggtggccctgaaagatgcagaaattgagcgtctgcacagccagctctcccggacagcagctctccacagtgagagtcacacagagagagaccaagaaattcaacgtctgaaaatggggatggaaactttgctgcttgccaatgaagataaggaccgtcggatagaggagcttacggggctgttaaaccagtaccggaaggtaaaggagattgtgatggtcactcaagggccttcggagagaactctctcaatcaatgaagaagaaccggagggaggtttcagcaagtggaacgctacaaataaggaccctgaagaattatttaaacaagagatgcctccaagatgtagctctcctacagtggggccacctccattgccacagaaatcactggaaaccagggctcagaaaaagctctcttgtagtctagaagacttgagaagtgaatctgtggataagtgtatggatgggaaccagcccttcccggtgttagaacccaaggacagccctttcttggcggagcacaaatatcccactttacctgggaagctttcaggagccacgcccaatggagaggctgccaaatctcctcccaccatctgccagcctgacgccacggggagcagcctgctgaggctgagagacacagaaagtggctgggacgacactgctgtggtcaatgacctctcatccacatcatcgggcactgaatcaggtcctcagtctcctctgacaccagatggtaaacggaatcccaaaggcattaagaagttctggggaaaaatccgaagaactcagtcaggaaatttctacactgacacgctggggatggcagagtttcgacgaggtgggctccgggcaaccgcagggccaagactctctaggaccagggactccaagggacagaaaagtgacgccaatgccccctttgcccagtggagcacagagcgtgtgtgtgcatggctggaggactttggcctggctcagtatgtgatctttgccaggcagtgggtatcttctggccacaccttattgacagccacccctcaggacatggaaaaggagctaggaattaagcacccactccacaggaagaagcttgttttagcagtgaaagccatcaacaccaaacaggaggagaagtctgcactgctagaccacatttgggtgacaaggtggcttgatgatattggcttaccccagtacaaagaccagtttcatgaatctagagttgacggacgaatgctgcaatacctaactgtgaacgatttactcttcttaaaagtcaccagccaactacatcatctcagcatcaaatgtgccattcacgtgctgcatgtcaacaagttcaacccccactgcctgcaccggcggccagctgatgagagtaacctttctccttcagaagttgtacagtggtccaaccacagggtgatggagtggttacgatctgtggacctggcagagtatgcacccaatcttcgagggagtggagtccatggaggcctcattatcctggagccacgcttcactggggacaccctggctatgcttctcaacatccccccacaaaagacgctcctcaggcgccacctgaccaccaagttcaatgccttgattggtccggaggctgaacaggaaaagcgagagaaaatggcctcaccagcttacacaccactgaccaccacagccaaagtccggccaaggaaactaggattttcacacttcggaaacataagaaaaaagaagttcgatgaatcgacggactacatttgcccaatggagcccagtgacggtgtcagtgatagtcacagggtctacagtggctaccggggcctcagcccccttgatgcccctgaactggatgggctggaccaggtgggacagattagctgatgcccttgtcacctgccctctgtgcaccctgagagctcacagtaacactgtgtgtgtcaccatataactgcacctcacccccgcacgtgtgcatgactcgcagagaatattccagcaattgtgtacccctgggccagtctctttgaaccctgagggtggccaggatctggagctgcatctctaaggggccaggctttggggaccattgccaaaggtggactcaggaggaaagacacttaaagacacttttacatgtctagtaattcttgatgttcatcttcagcaccagtggaaacacatgaacttcgatgcaggtccagagaccatggacactcccacgaggctcagctctcaggcaccccctacacttcagttgagggaaaagctcaagtgccttaggcccgtggaccacagtcttggctgagatcaaagggatgagcaacagggacttctgccacagtgacaatggaattgtgttgtgccttacttcagaggtggtctcttctttcttgtaataaaagcaatatttatgcggaaagcaagcaaaaaaa

SEQ ID NO: 654047 - DNA, 2906 bp, Homo sapiens
acagtgttgggggagggaccaattctgaagaccggggactgtattattccatcccatcattagcccatggtctttccccctgtaatgttcttcccttcttgcctttaaccagttctcatttctcaaaattcagctcagcttttctcctctctaaagctttctcagccttccctctggtgagagggagcccctctctcccactgttcccatattgtgttacaggtgttggagccataagagcattgcacattattctgttaccctagtgtacttgtctgtctcccagatgtggggagtgcttgctccagacctggcacagggcctggcagggagtagatgttgctgatgtttgtcgggtgaccatatcaaatgggattttctcattgaaagcaacaaaatttggctctggctaacctaagccaaaaagaatgtttttaaaagagtctgcagtggctcgctgaatgaaaggaaaagctgaagaaccaagatcagaaagggaaggagcagaaaaagcccaagaacccaggtctcaggactgtactactgggatatgaacatgatctaagctctagggtccaggaaggagaggcaagctggcccagatggactgataagcctatcacacccccttgcatcttgaaagagcaaggcatctataatgatgtatccaccatggctgcacccagggaggaaatgtctccctaaaaggaatcatgtgaagcagggggaaagatggtggtgggtcccccaaacagactgtcctctaccgtgactcttctgtctctggtgcagatgcctccaagatgtagctctcctacagtggggccacctccattgccacagaaatcactggaaaccagggctcagaaaaagctctcttgtagtctagaagacttgagaagtgaatctgtggataagtgtatggatgggaaccagcccttcccggtgttagaacccaaggacagccctttcttggcggagcacaaatatcccactttacctgggaagctttcaggagccacgcccaatggagaggctgccaaatctcctcccaccatctgccagcctgacgccacggggagcagcctgctgaggctgagagacacagaaagtggctgggacgacactgctgtggtcaatgacctctcatccacatcatcgggcactgaatcaggtcctcagtctcctctgacaccagatggtaaacggaatcccaaaggcattaagaagttctggggaaaaatccgaagaactcagtcaggaaatttctacactgacacgctggggatggcagagtttcgacgaggtgggctccgggcaaccgcagggccaagactctctaggaccagggactccaagggacagaaaagtgacgccaatgccccctttgcccagtggagcacagagcgtgtgtgtgcatggctggaggactttggcctggctcagtatgtgatctttgccaggcagtgggtatcttctggccacaccttattgacagccacccctcaggacatggaaaaggagctaggaattaagcacccactccacaggaagaagcttgttttagcagtgaaagccatcaacaccaaacaggaggagaagtctgcactgctagaccacatttgggtgacaaggtggcttgatgatattggcttaccccagtacaaagaccagtttcatgaatctagagttgacggacgaatgctgcaatacctaactgtgaacgatttactcttcttaaaagtcaccagccaactacatcatctcagcatcaaatgtgccattcacgtgctgcatgtcaacaagttcaacccccactgcctgcaccggcggccagctgatgagagtaacctttctccttcagaagttgtacagtggtccaaccacagggtgatggagtggttacgatctgtggacctggcagagtatgcacccaatcttcgagggagtggagtccatggaggcctcattatcctggagccacgcttcactggggacaccctggctatgcttctcaacatccccccacaaaagacgctcctcaggcgccacctgaccaccaagttcaatgccttgattggtccggaggctgaacaggaaaagcgagagaaaatggcctcaccagcttacacaccactgaccaccacagccaaagtccggccaaggaaactaggattttcacacttcggaaacataagaaaaaagaagttcgatgaatcgacggactacatttgcccaatggagcccagtgacggtgtcagtgatagtcacagggtctacagtggctaccggggcctcagcccccttgatgcccctgaactggatgggctggaccaggtgggacagattagctgatgcccttgtcacctgccctctgtgcaccctgagagctcacagtaacactgtgtgtgtcaccatataactgcacctcacccccgcacgtgtgcatgactcgcagagaatattccagcaattgtgtacccctgggccagtctctttgaaccctgagggtggccaggatctggagctgcatctctaaggggccaggctttggggaccattgccaaaggtggactcaggaggaaagacacttaaagacacttttacatgtctagtaattcttgatgttcatcttcagcaccagtggaaacacatgaacttcgatgcaggtccagagaccatggacactcccacgaggctcagctctcaggcaccccctacacttcagttgagggaaaagctcaagtgccttaggcccgtggaccacagtcttggctgagatcaaagggatgagcaacagggacttctgccacagtgacaatggaattgtgttgtgccttacttcagaggtggtctcttctttcttgtaataaaagcaatatttatgcggaaagcaagcaaaaaaa

SEQ ID NO: 654048 - DNA, 259 bp, Homo sapiens
  misc_feature (41)..(41): n is a, c, g, or t
ggccagatcttgtggctcactgcaacctccgcctcccgggntcaagtaattctcctgcttcagcctcccaagtagctgggattacaggctaatttttgtatttttagtagagacggggtttcaccgtgtcggccaggctggtctcgaactcctgacctcaggtgatccacctgcatgggcctcccaaagtgctgggattacaagcccgagccaccgctctggaccctttaagtcatttctaaaagaagttatgttcact

SEQ ID NO: 654049 - DNA, 505 bp, Homo sapiens
ctcctatctgaatccagattgcgggtaagtcattcatcatcatttctcctcaaccgaacagcaagtctcatcccactccaatatgatgtttgtccccacaaattgatacacataattcttgctggccgtggtattgacttaataaatgaaaatcatgagatggcatcagactttactttatttgctagctcagcagaatttgattcctagtctgataaggaaaccctattttccctcagacacttttcactttatgtcacaggtttggttcccagaggaaactggatgtagatgaagcttcgtgtgcatgatgttcattaggaagtgatgtggggatccacatctgtggaaaggataggcagggaagccttatgtgcaaagggacaagtctactggcagtgcagcctgacattgtcacctggccacacggacagagctgtagagctaagaaatcctcccctatttgtcccaactgaatcaaatggcaaagcctatgtacccctcc

SEQ ID NO: 654050 - DNA, 3551 bp, Homo sapiens
  misc_feature (17)..(17): n is a, c, g, or t
gagcgggctggccagcnggtccccgggaacaggaaccctggtggacgggtccagcaggcttcttcggtgcccgagagggagcgggtgcccaagggggtggtccctgtggcaggtcccggggtgggggcgcggcgctccgggaagagccttccgcaggtccccgccccgtcacgtgggcgccggccccggccgctgcggtcggtccgctggttggtcgggcgcttggtccggcagttggtcggtgggccagtggcccgtcgctcgcttctgggctctcatgtttgaaggtgggagggacacgggagcggcccgcacacctgagccgcccggagaggagcctcggccccgtacccagtaagaagaggaggaggccaggcaggcaaaaggagtcatggcttctgatgctagtcatgcgctggaagctgccctggagcaaatggacgggatcattgcaggcactaaaacaggtgcagatcttagtgatggtacttgtgagcctggactggcttccccggcctcctacatgaaccccttcccggtgctccatctcatcgaggacttgaggctggccttggagatgctggagcttcctcaggagagagcagccctcctgagccagatccctggcccaacagctgcctacataaaggaatggtttgaagagagcttgtcccaggtaaaccaccacagtgctgctagtaatgaaacctaccaggaacgcttggcacgtctagaaggggataaggagtccctcatattgcaggtgagtgtcctcacagaccaagtagaagcccagggagaaaagattcgagacctggaagtgtgtctggaaggacaccaggtgaaactcaatgctgctgaagagatgcttcaacaggagctgctaagccgcacatctcttgagacccagaagctcgatctgatgactgaagtgtctgagctgaagctcaagctggttggcatggagaaggagcagagagagcaggaggagaagcagagaaaagcagaggagttactgcaagagctcaggcacctcaaaatcaaagtggaagagttggaaaatgaaaggaatcagtatgaatggaagctaaaggccactaaggctgaagtcgcccagctgcaagaacaggtggccctgaaagatgcagaaattgagcgtctgcacagccagctctcccggacagcagctctccacagtgagagtcacacagagagagaccaagaaattcaacgtctgaaaatggggatggaaactttgctgcttgccaatgaagataaggaccgtcggatagaggagcttacggggctgttaaaccagtaccggaaggtaaaggagattgtgatggtcactcaagggccttcggagagaactctctcaatcaatgaagaagaaccggagggaggtttcagcaagtggaacgctacaaataaggaccctgaagaattatttaaacaagagatgcctccaagatgtagctctcctacagtggggccacctccattgccacagaaatcactggaaaccagggctcagaaaaagctctcttgtagtctagaagacttgagaagtgaatctgtggataagtgtatggatgggaaccagcccttcccggtgttagaacccaaggacagccctttcttggcggagcacaaatatcccactttacctgggaagctttcaggagccacgcccaatggagaggctgccaaatctcctcccaccatctgccagcctgacgccacggggagcagcctgctgaggctgagagacacagaaagtggctgggacgacactgctgtggtcaatgacctctcatccacatcatcgggcactgaatcaggtcctcagtctcctctgacaccagatggtaaacggaatcccaaaggcattaagaagttctggggaaaaatccgaagaactcagtcaggaaatttctacactgacacgctggggatggcagagtttcgacgaggtgggctccgggcaaccgcagggccaagactctctaggaccagggactccaagggacagaaaagtgacgccaatgccccctttgcccagtggagcacagagcgtgtgtgtgcatggctggaggactttggcctggctcagtatgtgatctttgccaggcagtgggtatcttctggccacaccttattgacagccacccctcaggacatggaaaaggagctaggaattaagcacccactccacaggaagaagcttgttttagcagtgaaagccatcaacaccaaacaggaggagaagtctgcactgctagaccacatttgggtgacaaggtggcttgatgatattggcttaccccagtacaaagaccagtttcatgaatctagagttgacggacgaatgctgcaatacctaactgtgaacgatttactcttcttaaaagtcaccagccaactacatcatctcagcatcaaatgtgccattcacgtgctgcatgtcaacaagttcaacccccactgcctgcaccggcggccagctgatgagttgtacagtggtccaaccacagggtgatggagtggttacgatctgtggacctggcagagtatgcacccaatcttcgagggagtggagtccatggaggcctcattatcctggagccacgcttcactggggacaccctggctatgcttctcaacatccccccacaaaagacgctcctcaggcgccacctgaccaccaagttcaatgccttgattggtccggaggctgaacaggaaaagcgagagaaaatggcctcaccagcttacacaccactgaccaccacagccaaagtccggccaaggaaactaggattttcacacttcggaaacataagaaaaaagaagttcgatgaatcgacggactacatttgcccaatggagcccagtgacggtgtcagtgatagtcacagggtctacagtggctaccggggcctcagcccccttgatgcccctgaactggatgggctggaccaggtgggacagattagctgatgcccttgtcacctgccctctgtgcaccctgagagctcacagtaacactgtgtgtgtcaccatataactgcacctcacccccgcacgtgtgcatgactcgcagagaatattccagcaattgtgtacccctgggccagtctctttgaaccctgagggtggccaggatctggagctgcatctctaaggggccaggctttggggaccattgccaaaggtggactcaggaggaaagacacttaaagacacttttacatgtctagtaattcttgatgttcatcttcagcaccagtggaaacacatgaacttcgatgcaggtccagagaccatggacactcccacgaggctcagctctcaggcaccccctacacttcagttgagggaaaagctcaagtgccttaggcccgtggaccacagtcttggctgagatcaaagggatgagcaacagggacttctgccacagtgacaatggaattgtgttgtgccttacttcagaggtggtctcttctttcttgtaataaaagcaatatttatgcggaaagcaagcaaaaaaa

SEQ ID NO: 654051 - DNA, 258 bp, Homo sapiens
ttcgcggcgctcgaccaaatagcacatagagaggtactgcccgctgaagaggctatcccaccagccaacttaaaaatggtgtagagagaacatgcaggggaagagcttggcctctgaggttctgcagtttcatcctattttctttccctgaaagccagactctacctcgtatgagtatgtgtgtcctttcggatactctcctgcgcatcatattcacaatagctctgtgagatactgatcaagagcatctccacgttt

SEQ ID NO: 654052 - DNA, 102 bp, Homo sapiens
ctctagacgatccccagtagttggtgaagggccatgcctactctgtgaccggggccaagcaggtgaactaccgaggccaggtggtgatgcctgatccggatt

SEQ ID NO: 654053 - DNA, 170 bp, Homo sapiens
gttctagagatccctacagctgatgtaaggatgggcacacctgacgacatcgacgagtgtagctcaaggcgccggaatcctctgcacctttccgctgtcgtcaacgtgccagtgagctaccagtgtgcatgccctgagctgggaaccaccatgacggccaaggggaaggt

SEQ ID NO: 654054 - DNA, 82 bp, Homo sapiens
tggaaatccctctccccctgaaccattttcaaattggaaatgaaggacctggactgttgattaaaaagttacttcttcttta

SEQ ID NO: 654055 - DNA, 455 bp, Homo sapiens
cacgaggaggtgggggccatcggcgtgatcctgtggatcggcggccacgacgtgctggcgggacggctcaccgcgggggagctgtcggccttcgtcttctatgccgccgtggtggcgggctccgccggggccatcagcgaggtggtcggcgacctgcagcggggcgccggggccttggagcggctgatggaaatcctccgcacggaaccggagatccagcggccggcgcggcccgtgcccctgcccgagccgccggtggggcgggtggagatggagcgggtcaccttcttctatccgtcgcggccggagcacccggccctgtacgacttcaccctgcgggtggagccgggtagccgcctggcgctggtgggcccgtccggcgcgggcaaaaccaccgtgttcctgctgctcctgcgcttctatgattccgccgccggcttcatccgcgtggacgg

SEQ ID NO: 654056 - DNA, 445 bp, Homo sapiens
gatttaaaagtctcattattgttattatttttccaaaaccatatgatactttgggaataagtttggtcttgaagtcagaagacctggaacaaagactttctgttgacacatattagctgcatgaccttgcataagtcatgtaatttaccgggcctcaatcacaccatttgtaaaagaaagatgctgtccactatcttgagaaccccccagggttgtggtgaggacaaatgagacaatgcagaaaaacagggctgtgaaaactgtcaaatgctgtgcaaatgggtggagttgtcatttgccacactcctctttagactaattttttagataacagggatttttattagtgcctcttctatgctcactttgttacatgagtccttgttggagaaatgtaagaaataaaagcttggaagagttcatggttcaaatgagagactaggag

SEQ ID NO: 654057 - DNA, 121 bp, Homo sapiens
acctcctaccccagggaattagacagaggagtgaggggagatttcctttttccctgcctaccctttggtagcttttgtattttatagtatgcattatctggtcgaaaagagcattaaattt

SEQ ID NO: 654058 - DNA, 658 bp, Homo sapiens
  misc_feature (45)..(45): n is a, c, g, or t
  misc_feature (182)..(182): n is a, c, g, or t
  misc_feature (203)..(203): n is a, c, g, or t
  misc_feature (205)..(205): n is a, c, g, or t
  misc_feature (209)..(210): n is a, c, g, or t
  misc_feature (214)..(214): n is a, c, g, or t
  misc_feature (226)..(226): n is a, c, g, or t
  misc_feature (229)..(229): n is a, c, g, or t
  misc_feature (232)..(232): n is a, c, g, or t
  misc_feature (247)..(247): n is a, c, g, or t
  misc_feature (249)..(249): n is a, c, g, or t
  misc_feature (255)..(257): n is a, c, g, or t
  misc_feature (259)..(259): n is a, c, g, or t
  misc_feature (265)..(267): n is a, c, g, or t
  misc_feature (269)..(269): n is a, c, g, or t
  misc_feature (273)..(273): n is a, c, g, or t
  misc_feature (277)..(277): n is a, c, g, or t
  misc_feature (286)..(286): n is a, c, g, or t
  misc_feature (288)..(289): n is a, c, g, or t
  misc_feature (296)..(296): n is a, c, g, or t
  misc_feature (438)..(438): n is a, c, g, or t
  misc_feature (463)..(463): n is a, c, g, or t
  misc_feature (469)..(469): n is a, c, g, or t
  misc_feature (501)..(501): n is a, c, g, or t
acacacacactcttggagagagagcgcaaggtgtaaagaggaganagagtgaacagggagcggggcttttgtctgttggtctccctggactgaagagagggagaatagaagcccaagactaagattctcaaaatggtttattacccagaactctttgtctgggtcagtcaagaaccgatttncaaacaaggacatggagggangncttnntaanggaagacttccngtnccnaaggaagtgaaccgnangaagannnangagacnnncnctgnctcnctgactccncnnggcagcngtgaattcacctctccagctaccagttacctccaccctttttaatcgtcccacctccatttgtattgcatatggtgtatggggttttgatgaggtcttggtatcatatatgggatttttttttttctgtgtaaatcatcaantataagaagaaactatgggactctnagcctngctttagagaatttacagtggacaaataggtntcatcaaaccagtttttaatcattctgactcaagtgaaaacgctcagaatttcacactgtgaatccacggttaccacccctaacagttggcctcaagccgggtcggtcaacaacatggtctcccacaactaaatctcccacggtgttacacacaacg

SEQ ID NO: 654059 - DNA, 320 bp, Homo sapiens
  misc_feature (18)..(18): n is a, c, g, or t
  misc_feature (95)..(95): n is a, c, g, or t
  misc_feature (281)..(281): n is a, c, g, or t
atttcggcacagggactntttttctctgaagaatcacactggggctgagtgcagtggctcacatctgtaatcccaacactttggaggacaaggtnggcagatcgcctgagctcaggacttcaagaagagcctgcgcaaaatggcaaaaccccacctctattaaaatatccaaaaattagctaggaatggtggcatgcctctggtcgcagcttctcaggaggctgagataggagaatcacttgagcccaggaggtggaggttgagccaagattgcgccactncactccagcctgggcaacagaaccagatcctgtcttcaa

SEQ ID NO: 654060 - DNA, 237 bp, Homo sapiens
gaactatagaagacttaagtcattgaatgttgaaaagaaaactgactgttgcatattgtctgcgtcactctttcaggtaacactctatgtatgtatgtttttcccttgtagcacaaccattccttggatccgtacaaaaaacgttattctatttctgacaaaactctcggagtaagcaaaacaccatgactctggataaaaaatagacaagcccgtctttctctgggagggaagctt

SEQ ID NO: 654061 - DNA, 102 bp, Homo sapiens
tgatgacgaaaggattagagggaggcaagactgggacaggaagagcagcttgcaatgtgtctgcagtccaggctgaacacatacagaggctctccactagga

SEQ ID NO: 654062 - DNA, 739 bp, Homo sapiens
ccacggcagcaacggcgcgcggcgccgcagcacgaagacagcacatcctcagggcagcggtcgtggccaggatagtagagcgacagtacgcatcttgtgccctcatagccgaggcaatgcgactctcacggaaggcagtgaagcgtcctcctaactggcccacgccatacagcaagactacaaaggatacagcacaatgcaaacagggcatcgccaacgcacaacaacccgcagacgaagcacgcctgggtgccagccgctccgtccggaacgggaccagagcattgagcgaggaagaaacggacgtggatgccaatagtgcctaccgctccccctccccagaaccgtgcaagcaactaagaggatttgggggcacttacaggattctgcaaactcatcgttggtatgagtgagatagtggtaccccctatatcacctcatgaataaaaactaaggccaggcacggtggctcacacctgtaatcccagcactttgggaggcccgaggtgggcggatcatgaagtcaagagatcaagaccatcactggctcaacatggtgaaaccccgtctctactaataaatacaaaaattagctgggcatgcgtggcacacgcactgtattcccaagctaacctcaaggaggctgagaacaggagatatcgctatgaacccggtaagtggaggttgcagtgagctagagatcacactaagccggcagcctggtacatccaagttcttt

SEQ ID NO: 654063 - DNA, 127 bp, Homo sapiens
actagaggatccggtcgtatcaaagtagtctgcttggtcatttgtcctgttccctcagaagcatgtgatcttggttctgcttttgcccttggaagcatgtgatcttggtacctactctggaaaggtg

SEQ ID NO: 654064 - DNA, 266 bp, Homo sapiens
ctgaccccgtacgccaaaaggcggaaggagtaggactggaagtaagaatagaaagtttcttagtcactgtgatgtaacaactctgaactttagaacaaaaggtacatcttttatacttgtgttaaagtgaaaaaaataattctttaattgtgtaatgtttcatatgctttttaaaatacccatatggaactgttaaaaaggcagttgtatatatgagcctagagctccaggtctggattaaagatacacacttgggcgtacgggga

SEQ ID NO: 654065 - DNA, 603 bp, Homo sapiens
  misc_feature (428)..(428): n is a, c, g, or t
  misc_feature (579)..(579): n is a, c, g, or t
gtgggcgcctgtagtcccagctactcgggaggctgaggcaggagaatggcgtgaacccaggaggcggagcttgcagtgagccgagattgcaccactgcactccagcctgggcgacagagcaagactctgtctcaaaaaaaaagccaggcatggtgtatttggactgtggtcctgggagatggaggctgcagtgacctgacatcacactgctgcattctagtctgggcaacagagtgagaccctatctcaaaaaattaaaaagttaggtgaggctgggtgctgtttacacctgtaatcccagcactttgtggggctgaggcaggcagattgcttgaggtcaggggttccagaccagcctggccaacatggcaaaaccctgtctctactgaaaatacaaaaattagctggtcgtggtggctcacgcttgnaatctcagctacctgggaggctgaggcaggagaatcacttgaacccaggaggcagaggttgcagtgagccaagatcacaacactgcactccagcctgggcgacagagtgagaccccatcttaaaaaaaactcacggatatcctctgttggnggagaagccattttgtgattttcc

SEQ ID NO: 654066 - DNA, 208 bp, Homo sapiens
atatgagtgtggttcatggcacgccagatcaattacaatggtaacatcaaagatcaagaattaccaaaatgtgacgcagacacaaagtgagcacgtgctgttaaaaaaatggcactgatagatttgctcaacacagggttgccacaaaccttcaatttgtaaaaaatgtaatgtctacaaagtgcaataaaacaaggtatgcctgtaa

SEQ ID NO: 654067 - DNA, 344 bp, Homo sapiens
  misc_feature (44)..(44): n is a, c, g, or t
  misc_feature (89)..(89): n is a, c, g, or t
tttaaatcccattatttaaaaattatccctggtagaaaatcctnctaaggtttattaatccaatggccatcaatgaaataagatttgtnctgaatgtatgaccctatattagtccctttgggaggatataaacatttgtgggagcgtgcttgcccctagtttgtatgttaggagaagagaaaagtccctaagaaattaaaatatggcccagaatgaaagaatccaaatgctcaggaccttttgcaggagaatggaattaatctaaaagaaagaatggatcccttggttttttaatgaaaaaaccttgggaggaccttttaaaattaaagattttttttctttga

SEQ ID NO: 654068 - DNA, 648 bp, Homo sapiens
tctcatgcctgtaatcccaccaccacacccagctaatttttgtatttttagtagagacagggtttaccatgttgacgaggctgatctcgaactccttacttcaggtgatccgcctgcctcagcctcccaaagtgctgggattacaggcatgagccactgcccccggccagaaatttacagatgcatgaaagtaggggcttggtttaaacattgatattgcttcttcttacactaagtaactccaccattgataatccatatgttaatgctggtatgcttatatgtatatgtctaactaacataatcttttgattcatttgtatctttgttccccttgccagcccatagaatctctccttactgctgctatatcataacggtgttaatttacctcctgtgagttatattgtgatatgttccgttctcattgttaattcactaattcggaatacccctataagttctctctttacttatactctttttcctcagtgtattcgtcatcttttgcacctattgctcattactcttcatcgcttttcctacttcgcatttagccaaatttcactttccctaatccctcaccacttgtatctcatccgtttccgttatcctttcttactacctggctcactcacattcttcctc

SEQ ID NO: 654069 - DNA, 311 bp, Homo sapiens
cgccgctctagagatccccctcataatgtgtgcccacatatgggaatgcttaaacagcagaaattgttcttacagttctagaagctagaggtctgagatcaaggtgtcagcagggatggtgcctcctgaggcccctctcctgggcttgtagatggtgtcttctccctgcatcctcacagggtcatctctctgtgtgtgtctgtgtcctcatctcctcttcttataaggacaccagtcctattggattagggcccacccatgtgacctcattttactttaatttcctccttactgacccatctccaaataca

SEQ ID NO: 654070 - DNA, 141 bp, Homo sapiens
cgggaacgtgtatcctctctcagtggggagccatatgaccaggcgagaggatctggaggcggaacttaaggggtgagaagagtaacagctcgtgaagtgtgacggccctgacttggatagtgtcgccgagaacagacaaac

SEQ ID NO: 654071 - DNA, 156 bp, Homo sapiens
tcgtatcatagccgtgcccatgcccgtacccgtgcacgttcccgagccggtgcccgccaacatcaggaagctttggtgtgccagatggtcaccacggaggaagaaggtgacaaggaggatacatgtgaagtagcatttctgggtgcaagcgaatca

SEQ ID NO: 654072 - DNA, 162 bp, Homo sapiens
cacagcttcatagtccccgcaatgcaatgagataacatctgcaaagctgcacaaaactgcaccatgtagtcaggcagcctcatcaaactttcagctttgctattgtctccattttcaactatacgcaaaaactcaacaggtggcaaagcatttcaaacaagt

SEQ ID NO: 654073 - DNA, 502 bp, Homo sapiens
  misc_feature (267)..(267): n is a, c, g, or t
cagtgtgtgtagaattatgcagctattattgtataggggctgatttttcttgttagcttctaataatgttagcttttatatatatgggtatgcttttgtttggtgcatatatatttataattgttatatcctcttactgaaatgactcctttatcattatataatgagctttcttgtctcttatagtttttgtcttcaaatctattttgtctggtataagtatacctacccttgctctcttttggcttccattggcatgacatatcntgtctttttctatccctttattttcaggctatgtgtgtctttataggtgaagtgtgttttctgtagcagtaacagatcatatgggtcttgtttatttatgcattctgccactctttgtcttgattagagtgtatagtgcatttacatttattgttattattaataagtaagtactttgtcatgctattttgttatttgttttctggttgttttgcgattttctcttccttccttc

SEQ ID NO: 654074 - DNA, 190 bp, Homo sapiens
  misc_feature (18)..(18): n is a, c, g, or t
tctagaggtatccccttnattgcaatcttggcggttgattggcgagcctctgagtcctggtggtagttctggcgcaccctgcgcaggtggacgcggctcgtcatggcggcgactaaggagaggcggcggcgcgcggcggatggctgcgcggcgcctggtcgcggcgtgcgggggccttgcgggcagtccg

SEQ ID NO: 654075 - DNA, 489 bp, Homo sapiens
ggacggagctgagcgtgctgggggtgcagatgtcgctctcgggtctagggacggcggacggagtcggtggtccctggcgcgatgggccagctcggatgttgtgctgcctgcggtgctgcagagacaggaggggactggccagagttccctctagaaggagatgcccggccgtgcagctggacacgcagcaccatgggaaccagatgttgttatctgtaacacgaatggaagaagaatatgtggaacaggaggttagtttagccagccgcaccctttacatcaaaaacaaaagctatttatgaattcaaaaatccagtccacaggaatctggggtatggtgttgcaactcagaaggtcacttgaatcagattcctcttggccgagatatgcaacagttcttgggtgattgagaaaattggattggggaaggcgcacttttaacccagcgaaacacaatttgacagggaaggaaaaaaattaggggacttg

SEQ ID NO: 654076 - DNA, 280 bp, Homo sapiens
gccggtttcccggcccaagtcccgtcctgcagcagtctgcctcctctttcaacatgacagaatgccgctgtgtccttcgacaaggaccttcctggcaggtggaatggccgcagccaatctccaagacggcggtaggccccatcgcgcgggtcaaacttgctgctgcaggtgcagcatgccagcaagcagatcacttccagataagcaatacaaaggcattatagactgcgtggtgcgtatttcccaggagcagggagttctgtacttctcgcgcggtaac

SEQ ID NO: 654077 - DNA, 1775 bp, Homo sapiens
  misc_feature (1330)..(1330): n is a, c, g, or t
  misc_feature (1769)..(1769): n is a, c, g, or t
  misc_feature (1772)..(1772): n is a, c, g, or t
tagtgggctcctatcgttgagctccatgtctataagccttgcagtctcggtgatgagcgcgactcgttgctagagcaccggctgaacggggcacgtacactctcttgaaacgataactcacacatgagcctggagagactaccggcaatcgtggcatattctctgtcagatatgatgaggatgacagagagggctgatcagaatttcagttcatgtatagtggggtcagtagtcagatgaatagacgtttgcgaatcaactgagagcaaagaatccgatcagggagcactacctgatcactgaattgctgcgtcgtgagaagttgagacgtcgtgctcatcggaccgaatcgcgtgtcgtcactttatagagcgcggagagggactagattgggagcttgcttcggcttagtagatgccactttcttgcgtttgcgatgaacatgcaagctcttaggcaggccctctcgagcgaactgtgagagtagcgctatgtactatgcgtatataccggtacgttggaacggacgcgtgcactgggcgaaatctctggcagtataggtgcttgacgcgcatgaaagccggggatgtctgcaagagcacgctggggacactgcatgggccttgacgtggtgggacgggcgaagcctagttcccgaggggtgtgcctccgtagagcagagatcggttgttgccctttgacaaggcctgttacttgtaacgcgaagtggcatcgagggggctttaaccggaaccccatggcttgcgaagtccgggcttgaagcgcaccaaggccagggggcagaacccgagaccgtgtgcagaagcacaacctgtttgacttaacaaagggcctgagactaaaagaattccatatcgcgtggtggctgtgttgtctggaccgtggcccttcattgtttacgcaaggggagctaactacaggccgttacctgtggtgaacgacaagcgccgttgagtgcgggttagaaagactaccaccgaggaccccactggaattggcgcgtctgcgtggccgagcacaaggcccttggggtgggggaacattatagctttgcgcccggccttaagggtctttgacgctcgcctgtgagctcgctcgagcttacgagagtttctcccccttttaagattaccccgcgttgggcggtcctaaggggtcaggaggagattgcccagcggtgcaaacagcttaacaatgggcgcagagaagacgtacctgtttacccggcgacacaatgtcccatgggtaggccccccatatggtgctggtggacaccatcacatttcgctatcctgggaattagtctccngtcttagattggcggcagaacccgcgtttgtttgactaaaagcgtttcagcacacggtaccaggagctcgtaggcacctcgtgcacaaggataatatctcttcggacacaagaggagtaataggcgggcacaaaaagagaatcggtagagtgagtataggtccgggtttgttgtaaatatgtgtgggccacaaaagcggggtagtgttacaacataaaggcactgttactaggtgggtataataaccacactggaattgttgtgatgataggaagatactatgacaacgatgtgttgtttcagttattgaatcgaagtgtgcgcctgcagagtaatagatgatattgaggtagatcatgagtagtgctatattgtagtgaagtacgaactagtagatgattgtgtgtatattgtaattatatatgtagagagggggggnggnagc

SEQ ID NO: 654078 - DNA, 670 bp, Homo sapiens
ccgcggtctctccttgaatccacgtcgccagcccggcgcctctgccgcgctacccctgcacacccgcccctctcctgtgccatgaacttgctactaccagcatcatgccctaccaatatccgagcactgaccccggagcagaagaaggagctgtctgacatctgctcaccgctatcgtgaccacctggcaagggccatcctggctgcggatgacgtccactgggagcatttgccaagcggctgaagtccattggacaccgacgaacactcgaggagaaccggtgcttctaccgtcgagctgctgctgacagatgacgaccgctgtgaaccccttgccattgcagggtgtcatccttccttccatgaagacacgtcttcccagaccggcggatgaatgggctgtactcttccccctgatgttatctaaattccacatggtgcgagtgctggtgggcattcaaggctccacaagagtgcgttggtcactcccttggtcagcgaacacatgtggcgaagactagcaagctcaagggggttaggcactgtcgctgtctgtagctgcatggtgaccctagttacaagcaaggatcggaggcatgaccttcgccaaagatgggcagtagtgtgtctgagagacttggcagaacggactccccatcatacctcgccc

SEQ ID NO: 654079 - DNA, 94 bp, Homo sapiens
gaagagactcctcctcgccccctccctccccccctggcccctctcccctcctctcccgcctctcccttcccccctccccctcccccgtcctccg

SEQ ID NO: 654080 - DNA, 1078 bp, Homo sapiens
gctagtaacaatagctcgctatgacagattgaaaccgcagaacatcgccatgaacatcatgcaactcatcacgtaccattctccgttggcccattccaggaacactcgtctgaagctgctcaggcaatcaatgcgtatcgcatataccatgaagccacgacttatcctattacctgatgtaatctgatcgacaacagtgtatgaccatctcacggaccgtaactacactgtgtggcaatcttgagccaggtgctgcgctaggaccaaaagctgaatgaggttcgcatcgtcaccaaaaggctctggaggccgcgagaaacgagtgcctaataatagcttgctgaagcatcccttaaacccatgttccagcagagtatgtgcctgtaacctaaacaccggctttagtatagttcagaattcgtcttgccctcaatttgagcccctatatccccagatggagaccccaatccactaatgcatgccgccgtcatgacctactgagctcagtagctctgatttatacccaatacactcgagactctttctcgatgcccttagaggagttatccttacgtggaagggaacctactcgtgtccatacctcagaccaccactgaggtagccccgaggaaaccagatatcctcgaaaagactttgaaaactggattgactcatggggcctccgagttaagattctgcgcttgagcactccattgtaagttaaaaggcactgacgctccaccgaaaggagtcactggaactggaggacccgtcttctgggctgggtgtgaccaaggcatggatcttggggcccagtcccatgtgagagcagcagacgcggtcttccacatccttggccaggcctctccacaggttccgctttgttggtccttaggccccaggcctcccgcatctccactgtctactcacatgacccgtggctggggtctttcgtcccctttgcagcccatgcgggcgggttatggggcttttgccctccttttacgggtgggtccgaatgccaacccctctgaactccaggtcccctgtctgaggagagggagccccccccgggtgc

SEQ ID NO: 654081 - DNA, 545 bp, Homo sapiens
caaactttcagcatttgttatccaaaaacgggcttgctgggtgcacactttgtttgtgaccgaatgaaaatcgatgacatgatgtttgtcctgcaagggcagtggatgggcctgtgtaccagtgccccggaaagttaggtggcccggggcaaaaacatcctcaaaaatgccctggtattttatttaaatggcactactcctgtgtgtgaggacatcggaagcagcctcctgacctatggcccccgcatccccctgggtgaatgggaaagccggattgcggaggtggatgccagtgtggtacgtgaaatttgttccaagtacatttatgaccagtgcccaccagtggttggatatggccccttttaacagttcccagattacaaccggatccgtaggggcatgttttggttgggtttttaggggggaagcctatgtaagcaaaagggcagggccggggtttgtggtccccccccccccccaaacacagcatttgggttcttttaacctgtgccccaggtgccccccaataaaatcttttgttgaga

SEQ ID NO: 654082 - DNA, 166 bp, Homo sapiens
tagccgacagcatctgggtgtatgtctcgtgttcaagtatcgcagtctactgatatggctttcactattggtaaacggaccagagaagacacatgtctgtctctgaaataaaagcagaacccactaacaatggaaaacctgcagcaatgcaaactggtggccaatg

SEQ ID NO: 654083 - DNA, 509 bp, Homo sapiens
agccacaagcgggcgacttcggggaatccggcggaccaagagcgcgtcccaggatcgatcaggcgcgaacgtgctttcgcccttggctaggctggcgagcacgcttttcattttgcttgaagcttcgcgtgcccatcctgcggcaatacagtctttgactgggcatgcgtctgaagtgtgcagcggcagaaccataggcttttaggccaaactttgtgggcattggcgccctaagtcggccagggcgccccttgccccatcatgccgtgccgtgaaccaaatcaacgcagtgtgaccataagacaagatgtcagtccttttcgacttctcagcgccctttgacaagaatttgtataaaattctccctgcttttcgcgggagattggatatggcaagcatacccttcgagatgggcctcccatcttaatcagcggcacattagcagtgatctgagcgctgggcgcgtagactttgacgggcggagaaagtgacgtccctgaacatgacgg

SEQ ID NO: 654084 - DNA, 339 bp, Homo sapiens
tacagagtgaatgtatcaagcagacacctcgcgatatggtcttataggttgctgaacaccttagcaaaaaggcaaggcgcagacctagttgcaagtgtcatatatatagagattaaacgtgctgcggctgttcgccggctggcaaacagccctgtttcctgggctaaaggtcaggattccggggggggcgacttggcttttccgttcaccacagatgaatgctcagccaaggtactggtcaagcgacggattgcgtcctggtcttcctttgacatcgctcggtaattgcccaacactttttcttcgatctttgctcagttatccagctggatcggcgtt

SEQ ID NO: 654085 - DNA, 439 bp, Homo sapiens
ttggggctcattcaggggctgtcttattatatatatatggcccagctgtaactggtaacaggtccatggttcatttcgtgcagcaagtgagtatgcggagacacggggttgcagcagagaaaagaggtttaattggtagggttgccaaaacagggaaacaggaggaaccctcaaatccgcctcccagggagttggtgggtagagtttcaatttaagagttggagagtgggctgaagtgtggagatcatgggtcaaagtatgcagggtaaagtcatggcacagagagatgaagaagctatattcttacacgggttgggtttctctgggggggggcctttaaacggtggggtgtcagctattctggtgtacttcaggatctggcttatagcaatttttttttttttttttaaggaaaggggtctggctctgcccccaatgg

SEQ ID NO: 654086 - DNA, 307 bp, Homo sapiens
  misc_feature (258)..(258): n is a, c, g, or t
gcctacagcttactgcagctacctccaaaaatattaactaggggggcaccaactgacctgtggagattccctctaccgaaggctgtgacgtgagccctctccggaccagaggcagttagttctgacaccaacaaatggggataagaggttgatagcctagcagggggaaagaggcctcctccaaaccaaacacaaaaaatgacactgcacagcaggctggggacatgtccttgaaggacacagccccaaagatcctgnccggtgaggtagtgcccctaagatcaacaggcatcatcatgaatcctat

SEQ ID NO: 654087 - DNA, 957 bp, Homo sapiens
atggcggctccctgggcgtccctgcgccttgtgtcgacccccatgtgcaatgggcgtatcaggggcatccatcgcctgaggtgcggacagttggcccagagggcgaagtcagcacagagcggaatacagtgcacgaatcccttccaatattcgcgtgaccaacacttaatttctaacgatgtggagggctctgaagggatatactatgctcccgaggacggggaggcatggtaaccaacggtgcgtttgcatgaaaaaatcggagtctttaacaccttaggggctggtgcatggaaatggcaacattggtcccatcacgggggctgcaaggggttcccctttatattactccatttccccattgaacagcccccaggggaacgcgacgcggccagctccacaggctttcctgaaccgcaacacacgcgcaggctttgcgcacttcaacgggaccaaatgcactcaagcgcttattgcgcccacctgttccgttaccttaccaaggagaaggttatccgtgggcggaagagttttccccgtcgttgccacaagggtgatgcccgttggtccggcacacgaccttgggttggcgaacatatggccccgggtgtgttggaccgcgtggtcttgtacaccatttccaagacttttaccgggaagtgtgagtcgcccttttggtgcaacttaatagccctttgcctcttgcaccggccgtcctttgcacgcaggtgaacagctcttttccctaaagtgatccccttttgtcactcgcgccattggccgactgccacgtcggtcagcattcccccgccaaacctgaattttggtcatagtccgagacacccctgggaggtatgcgcttccataccacagagccgacgatgcctcttatcgttaaagaacctcaaatgattggtcgcccgcgagaaagctttccggaatctgatggaccacgcg

SEQ ID NO: 654088 - DNA, 839 bp, Homo sapiens
gggaggtagacatgggagactttcatttgttctgtactaagaaaaattcttctgccttgggaattcctgttgatctatgaccttacccccaaccctgtgctctctaaaacatgtgctgtgtccactcagggttaaatggattaagggcggtgcaagatgtgcttgttaaacagatgcttgaaggcagcatgcttgttaagagtcatcaccactccctaatcgcaagtacccaggacacaaacactctgcctaggaaaaccagagacctttgttcacttgtttatctgctgaccttccttccactattgtcctatgaccctgccaaatccccctctgcgagaaacacccaagaatgatcaataaaaaataaaataaaattaaattaaaaaaaaaaaaagagaggaacccaaaaaaaaaaaaaagaaggttttttaaaaatcaaattatgtgagagtcttttccccttttaagaaaagaaaaaagaagaggaaataacaaacatgatgaaaggaaaaaaagaagacgaaaaaagatgataaggaaagagaagaaacataaaagagtaagaactaagaagagagagagacgaaaaaaaaacaaaaacaaagaggacgagggggcgggcccgaaaaaaaaatatagccaccgggcgggggggagcgcacaacagattgcgaggcgcgcacacgtgctgttgaacaagaggaaggccccccctagagaggggggagcaactataagaagcacacgagacgggcgcggcggatacagcacagggggaggagaaagaacaaagcgcgcggacggcggttctggggagaggaccccctctgtgcggg

SEQ ID NO: 654089 - DNA, 1141 bp, Homo sapiens
  misc_feature (259)..(259): n is a, c, g, or t
  misc_feature (314)..(314): n is a, c, g, or t
  misc_feature (466)..(466): n is a, c, g, or t
  misc_feature (515)..(515): n is a, c, g, or t
  misc_feature (531)..(531): n is a, c, g, or t
  misc_feature (535)..(535): n is a, c, g, or t
  misc_feature (537)..(537): n is a, c, g, or t
  misc_feature (610)..(610): n is a, c, g, or t
  misc_feature (630)..(630): n is a, c, g, or t
aggatccgaaatgagcgtcccatgaccgtccctcgcatggaacctgtagatagcaatatccactgaagatggcgaaaatagtctgtttagtatgaacatttggcttgtggagtcttgtcatgccttctacttattgtgtttaacgaagaatcaaaggactcattcagctctcgatcaatagtctatcgacctgagaatatcagtcgagtcttcatttgccactgctctctactatctcttgatggttctgatcgcgaanatccttctatcaacacttgctagttccttcactcgaattgtcgtcgtgagtgccnggtacccgcgcttgcttgccgctctccgcagcacagtcgtttcgtgacgtaccttttttcgatttaggtcggtcgtctgggccccgagtgtgggatcatggtgaatactagtggtctccataggctggtttctctctaaggatccaatccgntggccctcaagtgtagcatttatgtgtcggcctatgtcggatttgtcgntcaatccacaaataanaaancnaatgggcgccctgagagtagcgggattactacagagcgcagctctccctggaatacctagaagacctctccangaatctgagtccgtcttctntgtagagcgctcaagtataaccataagggaactccttagatcaacaagagagagatggtccctaggtagacgtacgcctacgagtgtcgatacatttaggcgcgcacggcccccttggaaggctcccgggagggttgccaggtgtgggggctccttggcaaacttttaaatttgaactgatttcaatcctttcaaaaaaaagcaccaatcctccaggcccaggccgtgggtgagctcattggccttgtgaattcccccaaggcaactttttggggaacggtttcagaaggcgccgggacggcttggcattcgacccttagcaagggtcccaaacgacaagtttcatgcgacggaatccagagggccctatgcgggcaaaaaaccggataggaggtccgcaggacgccacgtgattctgtcctgagacatgacagacagaatttcacagagaggaaatatattagaccgcagtcagtagttatacacggatgcacgacctcacagcaccgga

SEQ ID NO: 654090 - DNA, 173 bp, Homo sapiens
  misc_feature (66)..(66): n is a, c, g, or t
  misc_feature (111)..(112): n is a, c, g, or t
gtactactctgtccggtcaattgggtccttctctaggctgtctctcacaatgtccctgctcatcanaggatctgatgctctctcaatggcttcttcatcgtcgtcgtcttnngaatccactgctgattctggcaacccactcgggtccatatcaccagcctcgctttctgtgg

SEQ ID NO: 654091 - DNA, 941 bp, Homo sapiens
agcctgaaaacctttatggctcaagatcagattccctgactaacccctctcttagagctacagcgagctgcattaccagcttaaaacacttcttagggattaaatatagatgtaatttttcacaatcgttcgtaatttaaactgtgtttaaaggtaaacattgttaaccttgtaagatggataacgtgtatccgaatgtcaggccttgaactatttcgacatgagtcaagaacacaagcgagctttcacaacacaaatcaattggaagcacaagtgcatggccacggtgactgaatgctgttatatttctaaaagtttctacatgtcagattatatgcctgcattcatagtaaaatacctctaataaacactgtctatacgaaaacctgacttcagtgaatatcctcccgtatctacacacttgggccagtttatatactgctatttacactattatttcctatagctacccatgttctcgtgtacctttcgcagtccatccgcaattcactacgattcataccttgatggtaccgctctatctggttcgggcccgtaacaccgtccagcatcgcactacacgacacctggtccatgtgacatactttccatgcattacttcaaacgatccaaccccactagtggaagtacggccacttcacaatatcggccggccgatcgctcacactgctctaaaccaccaagcatcctcacacgcttacgccccaacaaacaacacaacacaaccaccgtgcgcgccccgccccgaaccacacaacagcggggcgagcacccagaaaggaacaggaaacacgcacacacccggcagacaggagggtccacaaaagccgacgagctacacacgcgcgggcagcccaacgacagccacaacgccacgcaacaaacacccaaccggacacccccacaagacgcgacgagca

SEQ ID NO: 654092 - DNA, 1025 bp, Homo sapiens
  misc_feature (62)..(62): n is a, c, g, or t
gggtctaggtacgaggctgggtggtggaaggggtgccgactcgcctacctacgcgtctcttnattgtcgatatttcgtcggcataggtttatcgtagagacgtatacatattatatagacacacggtctttaaatctaggcctgtatccggtgtccgaggcgaactcagataggatgatgtgtaagaggaaagcctgaagcaagtgcgcgattgagtaaaaacccggcccgccttcgcgcccgtggtagtccggcggcaggagcgagagcgagccggcagggcgcggaccgccatggcgctcgctcgttgccgggggagcctggcgcacgcgcgcgcgccgcgcgcgcgtcctggagggaccacccggacgagggagatggggttcactagtcggactgtcgggggagtttgctctcgccgggcgaggacaggacgtactgcgcagcgcctgccgcctcttcgtggggatgtctgcccacgcgacgtcgcggagggggacttcctgaggctcttcgaacgctatggcgagcccagtgaatgtcttcatcagaccgggaccgtggcgttcggcttcatccgcttggatatccagaaccctggctgaaattgcaaaagcagagctggacggcaccattctcaagagcagacctctacggattcgcttcgctacacatggagcagccttgactgtcaagaacctttctccagttgtttccaatgagctgctagagcaagcattttctcagttggttccagtagagaaaagctgtgtggtgtggatgatcgcggtagagctacgggagacgggtttgtagagttgcaggcaaaacttctgccgaaaggtctggaaagatgtgggggtggggcattctgctaacaaggacccctcgtccagtccttgtggggaccctggggcgttgaggattaaaatgggttgccaaaagttatggaaaaaccacattttttgggaaaggaacacccaccgttgtgtaccgggattgatttggatgcacccagagaaggg

SEQ ID NO: 654093 - DNA, 100 bp, Homo sapiens
ttccatggaggtcagcgccgagtcgacaggcttgttggagagctcaagctggataggctgctcctggaactgaagcactcgaatattggccccttcccat

SEQ ID NO: 654094 - DNA, 200 bp, Homo sapiens
atcccctttctccgaaaggcaacatatttattggggaaaacaggagagcaagcccagagcagggggcatcatggaagaggaatgatggcagataacatgtgcacctagcctctgtgcaccctatcttgtcagggctggataccccagtaagtaagccctagcacaactcttcctctaccttctgggcaacatggatcggg

SEQ ID NO: 654095 - DNA, 441 bp, Homo sapiens
  misc_feature (397)..(397): n is a, c, g, or t
  misc_feature (422)..(422): n is a, c, g, or t
tcacaagttagatttaaggaaaagtggagtcaacaggaaaagattattggaaacaacatttacagtctaagaaaggagaaatagaaacttctgggcccttttaaggactagtctgccctgctgtacccaggatagcaatctatattcccagagctcctaggtttccctgcactgagcaactatatccatttcatatgaacattgtaaacattatacaacttctgtccaaaaaagttatacaaaattgagatatcatcacaatagccaatgccagcacaaatgaaacaactagcaaactattgtaaagcagtttttagatagtacataatactaggatataaactgtataagtaatacttgccaagcagagggcaataactaataagtgtgtgatacngggtaagggaaggttgaagaagtcngtggccaaattaaagattc

SEQ ID NO: 654096 - DNA, 1087 bp, Homo sapiens
tcccataataagaagcggccaaataatctagtaataaggtcgtatgtcatgactcacccatgtgcctggcatcatgcattgcacattaggtcattgcagcaatttatgtcgtctctacacacagcaccattcaagcacacagtaacacatgtcctgcagggcaacaaacaccccatgctggatcatttgcgtcggcgcatgcatttcagcatggtcaaccagcaagcattcatagaagcaactaacaaagtctatcttcatagcattatcttcagcaggccccgacagtatcacaatatccgcgctggctaggatccagagtatgttcgtgcacttcagctgcactgcaatgggcacagatgtcactttcgaagctcatcaagttgctgtgtgaagaaatctggttgcagaacaccacggattgaattggaagagatgggaccctcattggatctggttctgaggaggacacacctggcatcggatgaccttgataaaattatctatgaaaagtgccaaaagctctcaagccaacagcaagacgaaacaatatagcccagtgatacctctgggatacaagttactggcacggatagcatatgccagaagcaagaccctaacgcacaacgtaccaccaccaggaaaacactgacacggggggtagacaagaccagccgcacacggccggcccagggaactaaacaggaaggaacacacggcagaacacaacagtccacgacaacagaccctcgcacgaacacacttcgactcggacgccacaacacgaaaccaaagcacaacacacacaaaacacaacaacaccacgtgacgacagccgcagcgagcgcacgaacggacgacaaagagcggcgcacgaaacgagacgaccaacaaacgagaacagagacagcgagcacagcccacacaagctgacaagaaggaggacacaagcggagaaaaaggcagagagggagcagcgacagagacaagacactcgcggagagaagcgaacagccgcagggaggcagagggcagcagcgaaaagcagaaaagagacccgacagcgagagagaccggacgaggtgca

SEQ ID NO: 654097 - DNA, 203 bp, Homo sapiens
  misc_feature (21)..(21): n is a, c, g, or t
  misc_feature (196)..(196): n is a, c, g, or t
tttcatcgcccgctcccgggncatccgctccctccctccctccctctctccctggcaggactccccgccagccatccccgccactctccgcggcgcattccgggagcagcggcgtagcggcatcgccatgtcccagcccggccagaagccgccgcctccccgcggcccggcgagcaggccgcccgccgcacccatnagcatgt

SEQ ID NO: 654098 - DNA, 569 bp, Homo sapiens
gaataataataaaagaaaaagatttttaataaaacatttttaaaaacaaacattatacacatataaaggaaagaaaggttattaacaatcccattcttaactgcgtaatttgggaatttgttatatttcagcttaatatatttatagttatattgttcatagttggaggtattgatgcatgtgttggtttgccaacattatctctatgatattgatctctatttgcttgacggctgcccttcttaagatcatgaattacaatatattcaaatttgttttttctgaaacaaggaagaacagatgaggcagtggagtgcactgaaggtagtgtaagtctttggtttgaaaccaaatctcctgcatgctagttactcttgggattggtggagtgcttttagcctactgagtgcagtgatggaaaaaatactagctgtaagaaatgattttgattgaagaatattgtattttaatctttgaagttttattaatggacagacattattaaattgacacaatttttacaataactaatctttcagtgactttttttttaattttacatataagga

SEQ ID NO: 654099 - DNA, 191 bp, Homo sapiens
aacgtcagcactcctgtgtgatggcaagggacatctttcttggagtgaccgtcgtgtgcaggcccggtagtccgccacagggctctgagcatgcactggtcccggatgctagaatctgggggagcggacccactcccctcacattccgcaggcccatggactcactttggtaacatactcctaccaacact

SEQ ID NO: 654100 - DNA, 853 bp, Homo sapiens
attctaatcgcaacaggcagttgcctaatgcggttacgaagcgataaatgctaggctatatacaaatatccacaaaggccccaacgtagtaagaccctacgggctagtacaacctttcgctagtacgccgataaaatctcttcagccaaatgagcccctaaaacccaggctcaacagtctacctatcaccctcttagatcgaccgccccgagcttcaggtcttcacacatcggcgtccttcatactatggaccccacacttccgcacgatcccacggagcacccatgaggtcggaactcaaaacgtagatcacttcgcatatattatttcttcctcacaatggtcatatgaccataatagcggcagatttccaacacaacatcatggatcaagggatgagcatcaaactcaaaacatcacagccactgatcgggcgcccgcgccagagccgcctcgcccacaccgcggttcctcctatgaatgcttccccctccagccatcatctcatacctatgcagacccattcactcatgcggctggcttccatcaatacctctgtcctcgccctccctcatccatctccacacacgaccagctctggctatactccagtggcccattcagtgacccctgggaccatacactcatgcataatactccacccaaacaggtaagcaagaagatcaaaaacgaaaactcacatagagattgacgaacggcgacagtccgctacactaacacacccacagcagcgaccaaccagaaacacacacaaaggtcatcttccgccctctcctaaacagtcgacaacaccaccacatccccaagaccccacaccacacacaacaaccaa

SEQ ID NO: 654101 - DNA, 99 bp, Homo sapiens
aactgtggctgtaaacagtgactctgcatagtcagccttatacttgatttctttttgaatgcaaataaaataaaatttgtaagtccaccaaaaaaaaaa

SEQ ID NO: 654102 - DNA, 491 bp, Homo sapiens
cccccccgggttttcccttttattttccgggtttttattttgtgggaatttgtaagggaaaaccattttcccccgggaaccagttttgcccttttttcccccaggttgaaatttaccccccataaaagggaaaaaaagtgggggcccccccgggggggggcccttttaaaaaaaaggggtcccccggggcgcaagaaattgggcaaaaaccctttttccccccgcctttgggtttttaggccttttgttttcccccttttttcttttaaacccctccccccaagtggaaccccttcccccgggtccccccaaattttttccggggcccttggccccggggtttaaaaaccattttcccaaagccaaaaccgttttttcccctagggggggggagaaaaaaaaaacctgggcccctttttggtaggggaaaaaaaatttaaaagttttttaatttttttaatgggggaaaaaaaccagggggaaacccccca

SEQ ID NO: 654103 - DNA, 462 bp, Homo sapiens
gagcaccatgcctccagcagtgggagggcaggcgtgacgctgccgattccacatggtatctggaatgttggtttgggagatggagtttcgctcttgtggcccaggctggagtgcagtggtgcgatctcagctcactgcaaccggtgcctcccaggttcaagcgattcttctgcctcagcctcccgagtagctggggttacaggcgctggccaccacgcctggctaattttggtatttttagtagacgcggtatttcaccatgtgggccaggctggtgttgaacccctgacctccggtgatccacctgtctcggccttccaaagtgctgggattacaggcatgagcctcggtgcctggccttttatctggaatttaaaaaaaacaaattcaattgtagcccagttgaagctattacggggctggtggccagttttaaccaggggaaatcggcatccgggtgta

SEQ ID NO: 654104 - DNA, 116 bp, Homo sapiens
taaccccgtttctgtggcaacaaagtcacagttacccgctgaaaagggtttcttagaatgaggcccttgcccagtctactaccaaagggttgatgtggggatactggaattgacag

SEQ ID NO: 654105 - DNA, 310 bp, Homo sapiens
ggatggtgtttctcaggagcacatcggtgtgcaataaggacaattatcacaagtgtggagcacttggcggaaagtctgtgccctgatgtgattggcagcccgttctgtctaatgagcaactcccataaaaaagataattgagcaattgtctgttgaacctttattgttggctattcttgagtttggtgacctttaagaagacatttaaccgaggcaacgggcttcatggtgacttatgaccatcctagtaacctttactgtatctctctttctctttcttttcttgtctattcttttctttcttgcgttc

SEQ ID NO: 654106 - DNA, 419 bp, Homo sapiens
gtagatcgttatcaccatgctggatccgcagactatgatgcgtgatacactctatcactgtgaacagacatcctcagagagcctattacacatagagcatcctatggattctgagccatgcattgccactgacctaggactatgaccagatactcgtggagctccttcataccaatgtgctgcccgtatgaagtgcacacattgcaggcagacctcagatttgagcacagagctgttctttacatagctcagatgaccgtccatgacgtttaactaatctggatgccactagacgactgtactttcttgcctgagttctgcgcggcttccctacgcacgctccatcatagcaggctgtgcgacctaggattctatggtaccggtgattacagctgggtgcagctatcacatgcctaggg

SEQ ID NO: 654107 - DNA, 429 bp, Homo sapiens
  misc_feature (43)..(43): n is a, c, g, or t
  misc_feature (49)..(49): n is a, c, g, or t
  misc_feature (57)..(58): n is a, c, g, or t
  misc_feature (70)..(70): n is a, c, g, or t
  misc_feature (121)..(121): n is a, c, g, or t
  misc_feature (149)..(149): n is a, c, g, or t
  misc_feature (171)..(171): n is a, c, g, or t
  misc_feature (194)..(195): n is a, c, g, or t
  misc_feature (213)..(213): n is a, c, g, or t
  misc_feature (221)..(221): n is a, c, g, or t
  misc_feature (232)..(232): n is a, c, g, or t
  misc_feature (250)..(250): n is a, c, g, or t
gagtcccctgtcgaaacggttggcacatcagggagtaggaaanagaggnggacgcanngggataagtagnatctgggatctcaaagagggttgttcgttctggtctctacagctacagggntgatgtcccagaggcagacctctggatnaagcagagagcagcaggccagnctttctagcagactagggcgaanngcccacaggctctcctanactctgtnaggacgtgtanatttgtatctgtctgagncacgaagaactgccttatggtattagaaagggagaagagcagagaaggggagaattgatgaaaaatacctctttccctctcctatccaggtaaaaagcttattttgggggtaagtgggagtaggggatattcagaaaccttgaaaacgagaatcctagaaacaggtgtagatctctcca

SEQ ID NO: 654108 - DNA, 474 bp, Homo sapiens
gtcatatactccattcagctcggtcaactttagcacgggtctcgtccccaggggctttcccagaactagggccttcaccatgaagctccatgagcttccccaattcaaactggggctccttcagcattttaactttcctaccgaagacttcagggagaggataactagatgggcagccttttctatgtctttcccaaggctgtcgggaatcaatttatggaccacttcttccaagtcattggtctggacctctggggtcatgattcccatcatcttctccgggatgggggggacctgtgggtgctgagcataagaggtctccggaacctgatggtggcgtttttaagtaaacccaacacagaacagccaacgcaagtacccatgggtagtctggacatcacggtgagctccaatcatggtctggccattttgggcccagggaccccttttggtcaagacttcccggaggggggg

SEQ ID NO: 654109 - DNA, 84 bp, Homo sapiens
agcatatatctgtgcagcgttgtgacaggaaaaagtcgcggctacgagcagtacttcgggccgggcaccaggctcacggtcaca

SEQ ID NO: 654110 - DNA, 355 bp, Homo sapiens
  misc_feature (194)..(194): n is a, c, g, or t
  misc_feature (205)..(205): n is a, c, g, or t
  misc_feature (247)..(247): n is a, c, g, or t
  misc_feature (265)..(265): n is a, c, g, or t
  misc_feature (270)..(270): n is a, c, g, or t
  misc_feature (281)..(281): n is a, c, g, or t
  misc_feature (290)..(290): n is a, c, g, or t
  misc_feature (343)..(343): n is a, c, g, or t
gaattcggcacgagggtcagtgatcacgtggctgagcaggcactgatatggtgactgagcatgaactgatcatgtgccgggagccggggaggcattccactctggacaaaggtcatgaggaaggaggctcggcatacgcaaattcgggatcgagcctcaggagtccacccagatgttctcgaacatctcccccncaaaaaaaaanccggagtctgcctactgtattgctttgtgctctcacctctgnatttcactgggggctgtncccancatcatctcgntctctctgncaagggttaacttacagctcaattcataaagttccttgtcattaatcctttanttccagtgagtt

SEQ ID NO: 654111 - DNA, 957 bp, Homo sapiens
  misc_feature (5)..(5): n is a, c, g, or t
  misc_feature (111)..(111): n is a, c, g, or t
  misc_feature (118)..(118): n is a, c, g, or t
  misc_feature (125)..(125): n is a, c, g, or t
  misc_feature (149)..(150): n is a, c, g, or t
  misc_feature (185)..(185): n is a, c, g, or t
  misc_feature (217)..(217): n is a, c, g, or t
  misc_feature (239)..(239): n is a, c, g, or t
  misc_feature (270)..(270): n is a, c, g, or t
  misc_feature (278)..(278): n is a, c, g, or t
  misc_feature (282)..(282): n is a, c, g, or t
  misc_feature (290)..(290): n is a, c, g, or t
  misc_feature (292)..(292): n is a, c, g, or t
  misc_feature (302)..(303): n is a, c, g, or t
  misc_feature (315)..(315): n is a, c, g, or t
  misc_feature (381)..(381): n is a, c, g, or t
  misc_feature (395)..(396): n is a, c, g, or t
  misc_feature (400)..(400): n is a, c, g, or t
  misc_feature (418)..(418): n is a, c, g, or t
  misc_feature (424)..(424): n is a, c, g, or t
  misc_feature (442)..(442): n is a, c, g, or t
  misc_feature (462)..(462): n is a, c, g, or t
  misc_feature (484)..(484): n is a, c, g, or t
  misc_feature (496)..(496): n is a, c, g, or t
  misc_feature (520)..(520): n is a, c, g, or t
  misc_feature (522)..(522): n is a, c, g, or t
  misc_feature (532)..(532): n is a, c, g, or t
  misc_feature (534)..(534): n is a, c, g, or t
  misc_feature (538)..(538): n is a, c, g, or t
  misc_feature (541)..(541): n is a, c, g, or t
  misc_feature (557)..(557): n is a, c, g, or t
  misc_feature (565)..(565): n is a, c, g, or t
  misc_feature (572)..(572): n is a, c, g, or t
  misc_feature (611)..(611): n is a, c, g, or t
  misc_feature (615)..(616): n is a, c, g, or t
  misc_feature (640)..(640): n is a, c, g, or t
  misc_feature (664)..(664): n is a, c, g, or t
  misc_feature (872)..(872): n is a, c, g, or t
  misc_feature (876)..(876): n is a, c, g, or t
  misc_feature (957)..(957): n is a, c, g, or t
gtgantttctttaatcaaagacaaccatgacaaatttattaactatcaaaatcaattttttaataaaaaaaatctgcctttaaaaatattgaatcatacaatatgtacaanaaatgcngctttcngttttgaacttcactatccatttnnctccttcagctagcatcaagcacttggcttctgcngcctctgacttggagtaatcacaggctctganatctcaaaggtcttcacaatcncctcccagtcacggtaactcaaagctataanaccttganttcnaacttgtntnttatgttcanntccctcattttnttcattaatactaacaggctctattactggcagttggtcttggtcaagttttattcttgcaaaatnatcccgtataatgnnggtnacatgaaagatgttttcnactgtnggggggaaagagtgaggntcaaccacaaagtgaaaganggacattggggtatcagggtcntgtcgaaaatgngtgtgggacagtcccaagagtgtntntacttctttntntgtngcntcttgatgagattgtnccattctngttaacngggcagggattgcgctctcctcttgtatcagagggactnttgnnggacgatcaactcgtgggtttggnacagggcactctccgtatattggncccaacagaaagtggaatgtatgggttttattaaaggtgttttctgctgttctgcctgttatcttccaggagtcatagactatgaattcaaaatcaggactatcttcatcacggatgagttcttcagcttctagcggatttacacccatatgtgtgagtagagtttcaacatatcttaacatgtcaaaggagctcaggtctgagcgcntgcntttgctttctctttgcccaaatctgaagccaaaacaagaaagtgggcatccaggactgcttctcttgctcgggacacttcn

SEQ ID NO: 654112 - DNA, 858 bp, Homo sapiens
ttgtgcagatggcagtgaccaaatttctgactattgctcctggaacatccaagaggtgacgggtagtgttgggtccttctacaagctgaatgagtgttcgtctctaccgcttgtgggtgtgaggtaatacagagctggatgtctcccatgatgaaacagaaatacaacatcaaagtgacttactgagtcttattggataaacgctattgtgtgacctgctggactcggcctcactctctgatcagacagtctctaagtacgtcttcttcgtcagtatatcaatgctacagctcctgaatgccagagccacaagagtgtatagactgggggacagtgggcactctgctgctggaaaacccacttgggcagaagtggcctcacccatccaaggtctttctgtatgaagcagccaaggtgtagggcgcttcggagcaggaagctacaagctgttgctgaatgagacccacaacgcaggaccacttacagacgcgagcatccccggtgaagactctgtgaactatgaagactgtgtactgtttcagtgtgaccacacaaacagcagactatctagcactgtacttctcaatgtggttcggtcagggcctttgccccttaatatacacactattgccccttaacatataccatggaccataggaacacacgacatgaaatcacgactgaaggaattccttcaggggggtgtcacaaactggcgcttggatggaccccacagggcttgagatttcaagtactagaactcaagaatcttcacattagcctaaaacccaggagcaagtggggcagcgtccagtactccgcggcaaattaaacgatctgcgcgcacaagagaaaagg

SEQ ID NO: 654113 - DNA, 869 bp, Homo sapiens
caagtggtgctcctgcctcggcttctgaatagctgggactacaggcatgtgccaccatgcccagccaattctatttattttttttgtacagatggggtctcactgtgttgcccagcctgttcttgaactcttggcctcaagcagttctcccacatcagcctccaagtgctgagattgcaggtatgaaccaccgcgcctggtcctcttgtgatgatttaaagaagttgtactaggccaggcgcggtggctcaggcctgtaatcccggcacgttgggaggccaaggcaggtggatcacctgagatcaggagttcaagaccagatggccaacatggtgaaaccccgtctctgctagaaatacaaaaattagccaggcatgttggcaggcaccggtaatcccagctacttaggaggcggaggcagaagaatcacttgaacccaggaggtggaggctgtagtgtgccaagatggcaccactgcactccagcctcggtgatagagcagtactctgtctcttaaaaaaaaaaaaaaaaaaaaaaaaaaaaaaaaaaaaaaaaaaggggggggggtaaaaaaaaatcaccggtggggggagccaagtatacacgcgtcacccccgcgtgttttgtcaacaaggggggccccatagaggagggcaattaatagagagaggaagggggggcgggcgtaaacacagggccggagcggggaaaaccgtgcagccggggccatggtggagaggaccccttatcgcggggggggcaatggggcaccactcctcagagaattaagcgccagggaaactaaaaattaggggttgggggtaacacaaccgcaaggtcgcgtggaaatggaccgaatcatggaaatc

SEQ ID NO: 654114 - DNA, 732 bp, Homo sapiens
  misc_feature (352)..(352): n is a, c, g, or t
  misc_feature (549)..(549): n is a, c, g, or t
  misc_feature (551)..(551): n is a, c, g, or t
  misc_feature (554)..(554): n is a, c, g, or t
  misc_feature (621)..(621): n is a, c, g, or t
  misc_feature (667)..(667): n is a, c, g, or t
  misc_feature (675)..(675): n is a, c, g, or t
  misc_feature (714)..(714): n is a, c, g, or t
attattggtggcatgtgacacgcaaatgttatctaaaaggaagtgcatccaggtgtggtggctcacacctgtaatctcacttacggaggccaaggtgggaggactgcttgagctccaggagtttgagactcgcctgagcaacacagggagatctcgtccctataaataatttaaaaattagccaggtgtggtggcgtgcacctgtggtcctagctactcgggaggctgaggtgggagaatagcttgagccctgaagtctgaggctgcagtgagccatgatcctgccactgcactccagcctgggtgacagagtgagaccttggctccaaaatgaaaataaatttttttttanaagaggaaatgttctttaaagcatttcagatttcagatttttagatgagggatgctcacccactaagtataatgcaaatattccaaaatctgaaaaacccgaaatctgaaacacttctagtaccaaacacttcaggtaagagatactcagcctgtattactaatagcactcataccgcctcactattgcctcacagngncantcacctctgtggcaaggaatgctttccttctgccaattttataggcaaattccctggatggacaagntaaggggccccatttcaaaccaggtttcctccaccttttcaggttntccagggnctgtcaatggccttcaggttttcaatggcaaggcggggntaccggtacatttttttc

SEQ ID NO: 654115 - DNA, 1468 bp, Homo sapiens
gccaatccataacacgacgcagcccatcctagacatcctccgtcaagaaccaggccaaactacatagagttcctccagccaagtattccagaacgcaccaggcacggcaggcatgcagccagtttcaacgcacgcagaagcacctcatttcagttcaaaccagcatccagggcatttgcaagcagcacccagctccagccacagcacagcttcaatctcccaataaaaccatctcatgttcaacatcccaaattccagccatttacgctgttagctcattccagccatccaggccactcttcattgcattccatgcaggcacaccattcacttgctaatcatagctgtatcaagtgcaacggtttattcattatatacccctttagttattatcagatcccaggttggcagatcggtagcatgcgtgcgtagcatatgcacacatcaggtgcaccatgatgggacatttcatcgtatggatctatatgatgtcaatattcaacattccaaagcacatagtgctcacgtgggcagattctggaaccatggcatagggctatcaatgcaaggccacacatgtcatggcatgcagcagtagtgcgtttcaggcaaacagcagtggccactgcaatcatccaagcattcagcacctcattgtgtataaggcaacaccgagtacaaaaggaaggacgattctagaggtgcaggaggtgagaacaagatgacacaacatgggcactcccatgacgatcaagaatacgacgacacccattcacagggtcagacgacgccaatacgacatgacaagggacaagcatggagcgacagaagactatacatcatgcaaacatcaggaagggtggaagactatatcaaagaactgtgtaacgatttgggtggagcacaactacaagtttgaccaatgcgaacataaaatggactatttgaaaacattatgcgaactttctttataacaattgtttcaagaacagaccatacataagaattattctatggaaacaatggtatatatatgataattacacagcatatgaacaaagaatactaatggcaccatcggcctctccccactgccgaccggcccgaccacggcgcaccagcggcagcggagccatggaacatccgccaccatacaaaaacaagcactattcagaccacgactgcacaagcatcaccgcacgaggaagacaaaacaaccagcacgccaagagggcaagagaacaaacaacgtaaccaaggcacatagaacagcagcaacatagaagcaaacgaaaagaaggaacaaaaacaaagaccaaacaagacgagacacaaaggaaccatccgaaacaaagagaaggaacagaaagaaagaaggaaccagaaaaagcaacaaaaggaggaacagcatcaatagaacacagactatccgacgaagacgaaacagataggaagagagcaaaagcaa

SEQ ID NO: 654116 - DNA, 165 bp, Homo sapiens
aggagagggtctgtctcctgagatagtcagatggctaccattgtctatatgtccattttagttaatattgtgtattaaaggataagcgttaatcgtaaagtatgttaaaaatagatgtagtaaacaagtccctttgtgaatgtcccttgtgagttttaggagccc

SEQ ID NO: 654117 - DNA, 142 bp, Homo sapiens
ccgcttcgggctcttagctactgaggaggctgcaggcaggaggattggttgagccagtgaagaaggaagctgcagtgaactgtgatctgtgccactgatagtgaagcctgggtaacaggagaccctgtctaaaaaaaaaaaa

SEQ ID NO: 654118 - DNA, 179 bp, Homo sapiens
gaagtgcacagctgggtacctcagacctagcggctgatccctcaagagtgatggaccagcacaccttaccaggaccagtgggaggaccggatccaggtgtggcatgcggaacagcgtgggatgctcaaagataatgctctgttggaatacctgaagattgctcaggacctggaaatgta

SEQ ID NO: 654119 - DNA, 194 bp, Homo sapiens
ccagcttgaatcaccttgccaataagcaacaggtaaattaaaacaaccggtacaagtcacaaatcatcctggtaataaagtgaaatcagaccaaaacgaatgaatgaacagcacgtcagcttaactgggggaagaggcaccagaaacttgatgcctagatgtaccgaccaattataaaacatgaaccaccaggt

SEQ ID NO: 654120 - DNA, 219 bp, Homo sapiens
  misc_feature (99)..(99): n is a, c, g, or t
  misc_feature (103)..(103): n is a, c, g, or t
  misc_feature (132)..(132): n is a, c, g, or t
  misc_feature (146)..(146): n is a, c, g, or t
  misc_feature (204)..(204): n is a, c, g, or t
gtgttccaataaaggaatacctgaggctgggtaatttgtttaagaaaaaagatttatttggcacacggttctccggttggacaagaagcatggtccctncgcntgcttttggggaagctcaggaaggttttnctcatggcagaagncgaaggggaagcaggcgtgtcccatggcgggagaggatgcaagagagagtggggaggnccaggctccttgaac

SEQ ID NO: 654121 - DNA, 273 bp, Homo sapiens
gcctattataaaccaacctcctgacattgccccgccctcattgtggtttcctcataatcaccaaccagtcttccttcctaataggagaccaccaaccacggaatggttctggacaatctacagatgatgcgcactgaagcttgtcatgtgctctgtcttcaccttaaagaggccagaggctcaataagctccacccttggatcatgcttatactgccttttctctgtactagcaacccagtaacgggtaactgggtagtccggatcctctata

SEQ ID NO: 654122 - DNA, 100 bp, Homo sapiens
tttgccttccgtccaaggggataaatatggcttctgtggacaacgttgtagtctgtaaacttaaatactatggacccatgacagtagagaaagggaaaca

SEQ ID NO: 654123 - DNA, 424 bp, Homo sapiens
tatcaattgggtaacctggctcatcagcgtcttccaccatcgaatcagagatcagcagctcgttcccactgccagatctcggcccaagcatctacgactacgcaaagagtatggctctgttcatggttggtgtcaacgtgtgcctcatcgtgtgtatcatctgtggtccagagtacttccacagggacttcagtgcacactgctgaagagaactactctgaccagaagaaggccaccatcgaacagttcgacacggccagcgacgaggagcgtgccatgggatcattgaagatgaacaccgaggttgaggagttcgacatggacaaggcatctgtccagcacagagaatctgctagagactagagcttttacagtacattatgaatttgatttgaagttgttgttgaaacaaaacaacaaaaag

SEQ ID NO: 654124 - DNA, 547 bp, Homo sapiens
cacgagggctaagatcatgccgctgcactccagcctgggtgatgaatgaaattcatctcaaaaaataaaaaaaataaaaaagtaaaaggaaagttaattgtagtattttatttaacccagtgtacccaagatgttatttcagcatgtaaccaatgttaaaaattgattgaggtatttgttgtaaactaatttttttcatactcatttgaaattcaatgtgtattttacacttacaatgtggattggcacatttcaggtgctcagtagccatatgtagctagtggctactataatggatgacaaaactatagtttcaatgcaaataaaattaaaatcctaacaactttttaatgtgaatcttgataaactgattctaatatgataatacaaaggacaaagagtagctaaaatactctcgaagaccaagataggaagacttgctttaccaggtattaagtcttattataacagtaactaagataatacagcattgaaacaagtgtggaaagtagatctatgcaaaagaataaagaacccagaaacagat

SEQ ID NO: 654125 - DNA, 119 bp, Homo sapiens
  misc_feature (46)..(46): n is a, c, g, or t
  misc_feature (64)..(64): n is a, c, g, or t
  misc_feature (80)..(80): n is a, c, g, or t
cattccgggagttgtcatcaagtctcttaggcagtctggtgatatntggtgttctgagctaagnagggaatggacttgtntgtcacgcaggggccaagagaagcaggtgcaggtcttag

SEQ ID NO: 654126 - DNA, 987 bp, Homo sapiens
tgggaaaaagtcatggaggccagggggtgggcttgaaaccagcttgggggggttcgattccttcctttttggtctaaattttagtgctattacgggttcttcgaagtggtggtggataggggtggggggcatccatatagtcactccaggttcatggagggttctctctcctactattacgacttttcgcttcgaaagcgaaggctttctcaaactcagtgaacaattatttaaactatttacgtgggcgtgtttagaagcaaactcgaagtgagcccatacagagtgactaggagtgtttcccacgtggtgggtgctagtgccatctcggggctaccccccgcaagatcacgcctcgggggccattccgcgagatagggccgcagacaacggggctggagtgggggcacagaacacgctccacgcattacaccgcccccgcgagacaaaacgactgccacagcgcgaaacagcgggccatctcgcggggccgcaccgagcccgcgccccccccaccgcgccgccccccccggcgagcaacattagcgcggacacacaccagcgcgcagcaggcaagagcaccccccaccccccaacgcaatcgcgccaccacactcacacggccgtccgttaatgaggcatacgcggaacactaacgtggacaaaacccggggccacaacaacacgcccaaagccccgcgcaagcaccgcagcctacacacacggacaccagctcctcacgcggcaacagaacgctcgctcgacccgaccaaaaccaaaaacggcgcgcaggccggaggagagccagcgcgttacagggaccgaacacaaacagaacagcgacattgctcactgccccggggggggccaccgaaacgcaacataacgcgaccccaaaaccaacaccccacttagaacatacgtaggaaaacgacccacgcccccaacgcgcgacggaccaaagacaccacagccacaacaacccaa

SEQ ID NO: 654127 - DNA, 275 bp, Homo sapiens
  misc_feature (149)..(149): n is a, c, g, or t
  misc_feature (205)..(205): n is a, c, g, or t
cgcctggcaatgtgatgttttaatatgtatatacattttggaataataaaatcaagctaattaacatatccatcacttcacatacttattgtgtgtggtgtaaacatttaaaatctatactcgggaggctgagacaggagaattgcttnaacccaggaggtggaggttgaagtgagccgagatcacgccattgcactccagactnggcaacagagccagactctgtctcaagagtaaattaaaaagcagccagacaaccctatcattcaaattca

SEQ ID NO: 654128 - DNA, 172 bp, Homo sapiens
agtcagcacagttgtattcagcttggaaggtgacaaataatactggtgacaactttcaaaaacatcaagtctgtgaccgaacccaactgctccgatcgtctggagactatttgctgttatctgtgaaccactgtgagcaccacctccttgttctccttcacccaccagctcg

SEQ ID NO: 654129 - DNA, 634 bp, Homo sapiens
atttttagaagagatggggtttcgccatcttggccaggctggtctcaaacacctgacctcaagtgatccgcctgccttggccccccaaagtgctgggattacaggagtgagccactgtgcccagcctccaacctaatttgagtttcatttgtatttttttcatcaccttacatgtgttaacagctgtttcaacataaactccattataatctatatacatttaaagaccgtgtttacataatctcttctgggtagaaaatggaaatacttaacctttgcattggtccctttcaggcttgaacaacagtggctgtatctgcatcgtggggttgctggtggtagaacactttggtgttaggaaagtttggaaaagaggatatccctgtattaggccattatgattagagataagcagcctgggagaaacatacaagacctgtggctactggtagagaattggaataagcttccaacaatggactgtagagattaatggagattgtttagtgggcccatggctaggtggggtattaatacagttgaagttatgttgcccttggcacagatctttgagaatctcatacatctgtgaaaaagataatgtgaaataaacagtaaaaaaaaaaatagtcga

SEQ ID NO: 654130 - DNA, 93 bp, Homo sapiens
tctgacgacacggccatatattactgtgcgagggattcggggaagatagcagtggttgggtacaatttcggtatggacgactggggccaaggg

SEQ ID NO: 654131 - DNA, 250 bp, Homo sapiens
cacgaggcttgccccacccatcccatctccaaccctaatcttccatttcctcccgccagtctccattgaatcaatggggcaggacagaaagacagtcagaacaatttccttctttcctcgcacttctccccaggcgtcatcttttatatagtgtttcaaaaggatactctgaaaccctctctgtgccccaagtaaagatgacattacatctgctttcgaatctccacaggcaaaagaggggggtgcctta

SEQ ID NO: 654132 - DNA, 193 bp, Homo sapiens
ccgagatcatgccactgcactccatcctgggcgacagagccagactccgtctcaaaaaaaaaaaaaattcggaagcttttctacaccccaataactttcaaggctggagagccaattcaaggatgtggcaatcccatttacaatatctggtaaaacaaaaaaaagatcctggggaatacttctacccaggggg

SEQ ID NO: 654133 - DNA, 794 bp, Homo sapiens
  misc_feature (587)..(587): n is a, c, g, or t
ttccttaagtcctaatgggaaaaaaaaaaaaaaaaattgaaatagttgaaaaactctggggtgtaaacaattgattgtaaccctacacattattcaataagtagtaaaaggagcttccacagattttcaggtctaattcttggccctttcttggtgggggccataattattaaaccattaattggtgtgtaactggactaacaagaggtcatttcttctttctaaaggaagacttatcagttacgctggcacatttgggtgtaagacgcagcttcatataatggtgaagactctggcggtcgaaatggttaatatttctaatttattggaagaaaaggctgattttacacaaatttattttatttctcaattccatagagaaatccgaggggttcggggagctgggtattggaatatgcgtcgatccatggaaatggtcccacatcttttctaatgtgggccaatttattcgtgcaatctaacagaaggaaattaaagatgcgtttcccttgggaaacttaagtccttccagggcgggaaagacttaacctgtgcgtccaatacacccttttgtgcgctggaaattntaaaggtaatctccagtggtgcggaggggaccttttaaagccccttttcgtggagtaaagaccagcgttttccaatattttttcttgtgaaccttcaaatattctctcaagaaatcctctttccctaagtgggaattacgttggaaattagacattacattaccttttggaccagttggtttccgacccatttccccctaaggaatg

SEQ ID NO: 654134 - DNA, 218 bp, Homo sapiens
  misc_feature (15)..(15): n is a, c, g, or t
  misc_feature (25)..(25): n is a, c, g, or t
  misc_feature (111)..(111): n is a, c, g, or t
  misc_feature (141)..(141): n is a, c, g, or t
  misc_feature (152)..(152): n is a, c, g, or t
  misc_feature (186)..(186): n is a, c, g, or t
caggcgggcgaaccncgggcgctcngtcaaggtgatcaaaataaaggcgctaatttataccgccgtggctccggctttccctggacatgggtgtgggatccggagaaaatncgcaaactgggccagctgtcctcagcgacncctgtagggcnaggcggattgcaaggaggaagcctgctgcctggngaaggaaggaggggtgcaaatttctccaaggt

SEQ ID NO: 654135 - DNA, 927 bp, Homo sapiens
ggcccgccaggttgacacataaaattaacgtgtcacagtatcatcgttagaagtgaaagaagccccgtttatcctgcaggtgcccctctaccaccaactacgtgacaaagaacatggtgctatctgggcatgggagaattgtccagttggctagggctggtatgtgtcccctcaaattcaagtgtggccaaggtgacagcatcaagaggtggggtcttgtacgagatcactaggccatgagggatctcttaggactggggatgaaggcccataatacaagaggttccagggagcatcctgctagctggcctccggtatgtgagacacagcaaggaaagccctagtcaacaagtgccagctcctggatcttagacttcccatcctccagaacctgtgagaaatacatttctggtccttacaaattacccagtctccggtatctggtcatagcagcacaaaatgaaggataccatacctgaacacctgaacattcttcacaagggaagtacatgcacgggttaatacggggtctcagtatggtggtgcttaataaagggaatgcgaaaggggggaatcagggcataggattgaccaagttacgggtagaacttttaaatgggcctaaatggtaagatggttttacaaaatgcaggggaaattgggaagctaaacccgggcaataaaagggccaaaaatgaatgtttaaaaaacctctagatttgtctacaactgcggcatcgtgtcaccaagacaccaagacaaaaagcacaacgagggcgcgaccagcagttacaaccaaaacaccgaaggggcgcacaccccacaaaaaaacgcgacaaagaccacccacacaggagaacagacaacagacagcgaaaaccaactcacacaccgccagcaaaacaacaaacaccacacaccacgaga

SEQ ID NO: 654136 - DNA, 110 bp, Homo sapiens
tcttgaggatcccgcgaatccaggtagacggcatgcacaccacccacggaatcgagacctggattcgcgaccgaacctggattcgcgaccgaacctggattcgcgaccga

SEQ ID NO: 654137 - DNA, 349 bp, Homo sapiens
  misc_feature (83)..(83): n is a, c, g, or t
  misc_feature (180)..(180): n is a, c, g, or t
  misc_feature (299)..(299): n is a, c, g, or t
  misc_feature (311)..(311): n is a, c, g, or t
gctacaggacccgtgaattgtgtggtgttatgaatctcgatatgagactgctacgtacctgtgggatcaggtcaaacgtagtncacatgcgatatgtgaaagtttcctataggctagcatgcacaggggcgtcaaacaaacctaaggctatcaagtgacacgtaatcaagcaagggctcncgtagattgctcgaatatgtattcgagacttggtttagggctggactaacatgaattcctacatgcgaagatgggtcaggaaaagcacaagtcataagcgtgaaaccgtattcacactnataaacgtcaancatgcatatatcactaagtagcataacaccacacaatt

SEQ ID NO: 654138 - DNA, 681 bp, Homo sapiens
cggtattaagcgaggtactataatttcaataattaattttacaatccatgtagcaaagggaaaatcatacagagaggccagtgtatataattaagagtttatacagaacacggccaattccacaaaacagcactggatggttcatatattggcaagcacaagacatgtggtcacatgtggtcccactgtgttacagggtagaaccaagcccacagacaattacattagagttaccacccgtgaaagcgaggcccttggagcgtgctcagctttcttagaaaattagagaacttctcaagggtcataattacattttggatctcaaaagtgtcttctaaaatggtttccatggggggagaaatttaagaaaggggcaaaaatccaatcttagtgggaacttctgaagtttcatttagggggtccttttcgcaatctattttgataacaatataaaatataaacatgtgagaaaaaaaatgtgtataaacactagagggtttagaaaggcccttcaatagtgttattttgaggtagagtataactcgtgagaggtggtacccaggaggttagagaaaaagagcgtggaatttagaattactacgattctttgccgtggtatttaagtgaagtaatttgaggccactttggcgtgcacagaaaacttttaaattattctcgtca

SEQ ID NO: 654139 - DNA, 283 bp, Homo sapiens
tagtcgatgaccagcttgctcaggaacaggtcgcggatctgctcgacggtgaacggggtggtctcggcttcgtggccgcgggtggccacgtgggcttgcaggaattccagcgtggcctgttcgtcgcgatggtcggccagcaccgcctcgccgatgcgcgcggtgatcggcaggatcacgatgttgtgctgttcgaagtagtcctgcggcaggtcgcagcaggaatcgacgacgataccgatacgcatgcggccctccagacgaccacgttggccaaacatgg

SEQ ID NO: 654140 - DNA, 1042 bp, Homo sapiens
ggccaaatacaagtctgtcaaagttattcggctgattggatcgagacatctgtgtgaagaaatagtctataggaaagcagacctcctaaactgcagctcaccaaccatgatcatagaatggaggccattttactctgggagcccagaaacccgactgccgatgactgaccatcgcagttgatgtgagatactcaaatttggattctggataaacatgctggcctctgagtgggagcaccatggtatgaaatagacctggaagtccatcctgggagaaacaaaagatggccagtgggtctctgatgccttgctctgccaggcctgaagggacggacggcgatatattcaaggaggcaaggaaagaaagtctgtatgcataccttatctgaaagggctcaaacgactgattgctaaagaagccccgggtgacggcacagactcgagaaaaattcacttagaaacaatggcgtgtaaaccactatacaggaagaagaaccgtttaggagtacaaacaggcgttagctctgaacgaagagtgatcccaatccatcgtcacggaaaataaccacggtgacaggatggtttcctcgaattcacgcaagcgtccccctggaatgggctaccggcggcattcttagcacctagaacagcgcaaagaccgttgtatccctagcatgctccctggaacacgaaattctgtggacgcggcaccttccgcatcagcaaagcacacaacggcacccaccaagcacaaagtcccgaaggcacggcccacaaacggcacacgacaagccggcaagcacccatgcgatttgcgcaacccgacacgcacacagcaacacacgcacgggcactcaagcaccgcgaagacaaaaagagaccctgtggcacacctagaacgacaagagagccgactggatgcgctgcgtgggggcaaattccccaaccaggtgaacccagaaccaatgactggcacgcctgacccacacgccagcgcagaaggcggcaccccaagaagcgaaccccctcgccaaacaactgc

SEQ ID NO: 654141 - DNA, 165 bp, Homo sapiens
agcagcgtttccctaatctcctagcacttccctcctccaggactgtattgtaattatactgtggccactttctggaaagaaaggaggatgaccacaaaacctggcatttaagacacttagagctagttgctaattgactggccaggatgggcccctgggatggag

SEQ ID NO: 654142 - DNA, 201 bp, Homo sapiens
  misc_feature (7)..(7): n is a, c, g, or t
ggatccncttctgaaaaaaaggtgtcaaattactaataccattaaagaaataatgatgttcaaattgtaataatcagttacccattgcaaacttctcttgacttctggttgggttgatagcaccaccagtatccttatcacccccgtcatcatgacataatctgtctcttcttcattccccaaacccactcttcatcaagt

SEQ ID NO: 654143 - DNA, 166 bp, Homo sapiens
cagacacacttccggtgcctttgcagaccgagatgccagaggctcttgaagtcaccaaggggaggcgttaagaaatcctgcatctccgtccctcacaagaccgctgtctcaggcttttcaagctgtgaagagacacatcagagccctgggacactgtcgcatgaca

SEQ ID NO: 654144 - DNA, 392 bp, Homo sapiens
aatcggaccacctggttacatatgaagtgtgagtgatctaagactgtactgcaacacatgtgctgttctggcgggaccaccgagtgtagcctggcattgactgcagcaggtatgcagaatggagatcatgtgcccggcagtcatcacacatgagatcatcgagatcattgctactcctgagcgcaagtactccgtgtggatcggcggctccatcctggcctcgctgtccaccttccagcagatgtggatcagcaagcaggagtatgacgagtccggcccctccatcgtccaccgcaaatgcttctaggcggactatgacttagttgcgttacaccctttcttgacaaaacctaacttgcgcagaaaacaagatgagattggcaatcaagctt

SEQ ID NO: 654145 - DNA, 240 bp, Homo sapiens
tcgactcttgagcatcccccgccatttacaactatctactgtgcccttaccttgctggtgcctcagctcttttcatcagtcatgtgtagattataagattatctacctcaatacaagttttatgaaaattcatcataatgatattctttatgcttttagtacagagcctgacatacagtttgtgcaataattagaaattgttttggccaggtgcggtggctcacacctctaatcccagca

SEQ ID NO: 654146 - DNA, 1559 bp, Homo sapiens
  misc_feature (1399)..(1399): n is a, c, g, or t
ggcttacagctgatggtctgtcaggtctggccacagcggaggtctgccgcggtatagcgaggtcgtgtcagtcgtcatgctgaggtcagggcgaacgtggacatgtaatggtcggtacgcggcagctaggtcggcattagggttcgcgcctgtgtctctacctgcgcgactctgaaactcagtggttgatagctagcatggagcactaactgtgccgtaggctctggtgtttgagtgcgatagatgcgtgagtgcatcatagagagcgaacaggaacactagacttaacacgtgtccattttcgattagctcagcgatggaggtggattgttcgagcctgccacggttgctgatatcccatcggagccgttgcttacgtgagggaatcgtgcttcgcagggaggctgatctaacagcgtttaactggccttttgaagagaacaccgaatccaggcattttccctagtgctaactgtatcctagattccataggcgaacattctaattcgtaaaaggggcgaaggaagtcactagttggcaattcggctacccatggtgcgtacgaaggctacccggggccttattgcactgtgcccagagaataccgaagttggcgatccgcttgtcacaaggcgtacgtttgcttcccagtattgccgcatttcccgaaggcttgttatcctgggagacaattatgttttccattgtgccttggcctgttgcaaaccattgtttccaatagccccttattttggaatctccctttggctggagttacacccaaaccaagaagttaatgcaaaggtctactgggggtcgttaggtcgggccaatggaattcccaaaggaataagcggggcgactttaggcgtttttgagctatcacttttcccgagaggtttagacacctgttatacacagattttgcaaaactttggtttacgcccaatggtttggtcccccattgtaaagtccgtttaggcctatttattggtgcacggtgtgcccacccccacacaagtttgggaatgtatggcgtccttgaatggggctacccaaattcgacagctgtcgataagtcctgtttgtgcacaggtttaaccggcgggaacgaaacggcgaatttgctttattgtgtccggccacggtgtgtccgaaactgtccccaatagagagggccggtgtgggttatcttttatcaggcagttaatttcgagaattttccgggcttcggcaggcagagagaaacaaggttgtccctatttacacggtgggcacaccaaccgggattttggccgtttatatttctcacgaacaaagaacgttggcttctcagggcgacatcgacggcgggaattttagcacgccgcgccgtgtggcacatcatggaaccaagacncttgcgtttgggggaacacttcacacacacgcgtgggtgttatttcccagaaaacacgcccagggcctacgatcatttttgtagacatgtaaaacgtgatatatagtatacccagaggggtgttcaacgcccttagaggcccagtctccacatagtgctc

SEQ ID NO: 654147 - DNA, 565 bp, Homo sapiens
ttgttgacttcttgtcagacacagtgcatgaagaacttggtggcttcatcacacaggatccgccctggaacatgaagagaaaggtccgcttcaaagtatgtacaaaagctgtgacgggcagtaacgcaaggcagtgctgcaggcaggccgcaggcagtgtctgaggatggccatagttggggatttctgatgaagaagcgagccgtaaaaatccaccccatgtgagaagtgaggagggcactcccatggggtctgaggttgaagagtttgaagattgggtgcagtggctcacgcctgtggtcccagcactttgggaggctgaggaggttggattaattgagcccagaaatttgagaccagcctgggcaacatggtgcgaccctgtctctattaaatttttttttttaaattagccagatgtggtgttgtagacctctggttccagctactcgggaggccaaggtaggaggatcacttgaacttgggaggttgaggctgcactgacccatgattgtgccactgcactccagcctgggtgacaagagtgaaaccttgtcttttcaat

SEQ ID NO: 654148 - DNA, 1059 bp, Homo sapiens
  misc_feature (1025)..(1025): n is a, c, g, or t
  misc_feature (1030)..(1030): n is a, c, g, or t
cacacacatgacagcaccaagagcaacgcacattcgaggaggaaccataaatagacgcacaagcacaccacggtgcaccagcacagaacacaaccaaattgcaagcacatcccacggcagcagccttaacaactagcaagctctacaccacgaagcaccagcagcgtgtgcagcacataacacatcaccagaccagcgcagtttaactactatggcatgcacctagggaacgttgccagctagcagcaacagcagcaaactctccacgtctttaccccaacctcatgtaccaaacagtctcgttagacacttatctaacactagcgttctacactcgtagcatttcgtcataggtgccaggtgcaatcatcgtagactctcataagacccacccagtgcgacagcatctcttaagctccttgtcagcaagcagcaacggctacttctacttcagccaccagcgcagtgcactctgtatattccccacagaacttgagagcacatgccaaggtcgtcacatttgtaagcgaggcattccagccccacgcaacagcaacaagccacatttgccaggcagcagcatgtcaaatgcactcacaccgaccattctagcaaagcaaacagtcacgtgtacagcactacagcaccctgtgttcaactgacgacagtctaccacttggccagacagatagtaagaccatatacattgtagaccacgcacaaacgcaactccctacaactaaaccgagagaactccacgtcgcaccacacttagaacggcttcaaggagattactacatcttcatggatgctaacacacgctcctaattcatgcagcacttttaaccttccttgaccagccaactcctgactgcagctgtgcaccggatacaaactcagcgatctaccgcaggtgcgcgtactaggctgcgcagtcttggacaccactgtcgcatatcagggggcgcacacttctgcgatctcgtaccatataccgcgaggcgcacatatcagttcgtcttccnactantccgcagtcctcgcgccaccaccactccc

SEQ ID NO: 654149 - DNA, 199 bp, Homo sapiens
  misc_feature (13)..(13): n is a, c, g, or t
  misc_feature (55)..(55): n is a, c, g, or t
  misc_feature (134)..(134): n is a, c, g, or t
  misc_feature (172)..(172): n is a, c, g, or t
cttgatttaccanttggacagctacgcgccacgggctgaggctgagaaaactttnatttatccgctggatctcctgctcaagctacacgatgagcgttttttggttgctttcggccagcgggacggcatccaantgggtcatgcagtgctggccatcaatggcatggacgtnaatggcaggtacacggccgacgggaaa

SEQ ID NO: 654150 - DNA, 915 bp, Homo sapiens
  misc_feature (4)..(4): n is a, c, g, or t
  misc_feature (68)..(68): n is a, c, g, or t
  misc_feature (73)..(73): n is a, c, g, or t
  misc_feature (76)..(76): n is a, c, g, or t
  misc_feature (85)..(85): n is a, c, g, or t
  misc_feature (92)..(93): n is a, c, g, or t
  misc_feature (106)..(108): n is a, c, g, or t
  misc_feature (110)..(110): n is a, c, g, or t
  misc_feature (118)..(119): n is a, c, g, or t
  misc_feature (124)..(124): n is a, c, g, or t
  misc_feature (126)..(126): n is a, c, g, or t
  misc_feature (131)..(131): n is a, c, g, or t
  misc_feature (508)..(508): n is a, c, g, or t
  misc_feature (693)..(693): n is a, c, g, or t
  misc_feature (695)..(695): n is a, c, g, or t
  misc_feature (702)..(702): n is a, c, g, or t
  misc_feature (716)..(716): n is a, c, g, or t
  misc_feature (725)..(725): n is a, c, g, or t
  misc_feature (728)..(728): n is a, c, g, or t
  misc_feature (743)..(743): n is a, c, g, or t
  misc_feature (752)..(752): n is a, c, g, or t
  misc_feature (755)..(755): n is a, c, g, or t
  misc_feature (759)..(759): n is a, c, g, or t
  misc_feature (781)..(781): n is a, c, g, or t
  misc_feature (784)..(784): n is a, c, g, or t
  misc_feature (792)..(792): n is a, c, g, or t
  misc_feature (813)..(813): n is a, c, g, or t
  misc_feature (826)..(826): n is a, c, g, or t
  misc_feature (851)..(851): n is a, c, g, or t
  misc_feature (868)..(868): n is a, c, g, or t
agcncaccctgtaatcccagcactttgggaggctgaggtgggtagattacttgagcccaggaattcangaccngcntgggcaacntggtganncccttttctatannnantaatctgnnctttntngcatntgcctgtggtcccagctactgaggaggctgaggtgggaggattgcttgagcccaggaggcagaggttgcagtgagccaaggtcacgtcactgcactctagcctgggcaacagagtaagacaaaaaaatatatatatattgaaaatcaaaggaggcaaaattttgacagggaaggaagtaactgcaaaacactaggctttagtaggtacttatataaaatctagtccagttctctcatttaaaaaaatgaagacactgaagtacagacttaaatagctcagatagctaattaggaaatttcaagttggccaataatagcattctctctgacatttaaaaataatttctattcaaaatacatgcataattgattttacncctcattactggtggataatttatgtgatgtggattgctggtgtccagcatgacccataaacaggtcagaagaatgatggaatgttttagaataaactcctgcttatagtatactacacagttcaaaagatgtttaaaatgcttttgtatttactgccatgtaattgaaatatatagattattgnancctttcnacctgaaaatcaancagtatganagnttagtatttgtatgngtcactagngtntaangaagctttaaatttacaatttnttntttaaaanatttattaatgggaatggaanataacaattcagnttaattccccaaccttattttgggngtagacattgtattccncaattttgaaagggtgggttttacctttaaaaaaatgaattcagaga

SEQ ID NO: 654151 - DNA, 859 bp, Homo sapiens
  misc_feature (60)..(60): n is a, c, g, or t
  misc_feature (452)..(452): n is a, c, g, or t
  misc_feature (637)..(637): n is a, c, g, or t
  misc_feature (639)..(639): n is a, c, g, or t
  misc_feature (646)..(646): n is a, c, g, or t
  misc_feature (660)..(660): n is a, c, g, or t
  misc_feature (669)..(669): n is a, c, g, or t
  misc_feature (672)..(672): n is a, c, g, or t
  misc_feature (687)..(687): n is a, c, g, or t
  misc_feature (696)..(696): n is a, c, g, or t
  misc_feature (699)..(699): n is a, c, g, or t
  misc_feature (703)..(703): n is a, c, g, or t
  misc_feature (725)..(725): n is a, c, g, or t
  misc_feature (728)..(728): n is a, c, g, or t
  misc_feature (736)..(736): n is a, c, g, or t
  misc_feature (757)..(757): n is a, c, g, or t
  misc_feature (770)..(770): n is a, c, g, or t
  misc_feature (795)..(795): n is a, c, g, or t
  misc_feature (812)..(812): n is a, c, g, or t
gagagagagagagagagagagagagagagagagagagagagagagaggagagagagaganaggagaggagaggagagactgtggtcccagctactgaggaggctgaggtgggaggattgcttgagcccaggaggcagaggttgcagtgagccaaggtcacgtcactgcactctagcctgggcaacagagtaagacaaaaaaatatatatatattgaaaatcaaaggaggcaaaattttgacagggaaggaagtaactgcaaaacactaggctttagtaggtacttatataaaatctagtccagttctctcatttaaaaaaatgaagacactgaagtacagacttaaatagctcagatagctaattaggaaatttcaagttggccaataatagcattctctctgacatttaaaaataatttctattcaaaatacatgcataattgattttacncctcattactggtggataatttatgtgatgtggattgctggtgtccagcatgacccataaacaggtcagaagaatgatggaatgttttagaataaactcctgcttatagtatactacacagttcaaaagatgtttaaaatgcttttgtatttactgccatgtaattgaaatatatagattattgnancctttcnacctgaaaatcaancagtatganagnttagtatttgtatgngtcactagngtntaangaagctttaaatttacaatttnttntttaaaanatttattaatgggaatggaanataacaattcagnttaattccccaaccttattttgggngtagacattgtattccncaattttgaaagggtgggttttacctttaaaaaaatgaattcagaga

SEQ ID NO: 654152 - DNA, 660 bp, Homo sapiens
gtagaagggaattacggagcacctgtacgtctgctttgacgccccgtaacgaaactcggacatctcaacattcacagcagatgactgatcggtgccgcgcctgccataggcgttaccaaagcgggtcaagaacagcaaatcacgattctcgggcgaggctttcgcctctcgttccatcctccgccagcctttggacatattccagcaattcatcacgcaacgcttcgggtatccagacctggccagtcacaccgaatttcgtgtgcactggcggagctgcgcctggaccaactgcaaggcgtagaagcccttcagcggaagggtcgggggcggcgcgctccagagactgaatcttgagatcacagatgctgccgagccgcatcccggtaaaaaatccaagggccaacatgaggtagagctcgggcgtggcgttctctgcggcgaaatccagaattgcatcgcgatcggtctccgagactggcaacagcccatcttcaagtgtttggcctgggcgcttacggttcgggatgctgaggtcggtggtggttccgctgatcgttcgctcgaaccccacccggtcgaagtattaacgacgtagggctttcccgccacagctggacgtgtggagaaagaagctcctatgccttacccacgaataga

SEQ ID NO: 654153 - DNA, 997 bp, Homo sapiens
  misc_feature (997)..(997): n is a, c, g, or t
aaagcatgggagagagaactggccagggtgtaaaaagggccgcacaaggagaccggtctctaggagatctcctaaggtcacccaattccgcgaacccactcagggttcgcttgtagtgagcaagctcgatccgtagtgtgacttaatgtgactccatggactcgcgtacgatccctggtccgggctatttcgaccatggtctgacttgatcatggacttctatagtggctggtgccgtccaataatcgtgtcgcgattatactcatggcttttatttgtgatccaactgggttatagtctacctaatgaccctctatgacgcagacggcgtgcgagacttgagtccattagtacgatccgttactcaagtgagtttggaacgaaattctattagtcgccataaggaatcaatgaacgtatttgatttctctggccattgatctgtcctctagaaaccttcacttatggctggcgcagaacatcttatatctcgaacagacccgtcccaaatcatggatggataacctgcgatacatgaatagttccatattcatagagcatgcttcgcgcaggtctccctgggcttgactcagatcagatgatcggtgtgctagggatgccccggggcgggttcctttcacgggacgtaatcgtctccaggccacttcgaatgcctgcgcttgtgattgaacctaccctgccgcgttaccagacgtactcgcattaattcaacccttcccttaacagggacactacaggcagggaagggatgttcaaaactgcttgacttggcgggcagggtgggccacaaatcgggcagaccggtctgtgaacttgggccagtgttccctcggaaggcagggatctagcggcacaggttggagcaccaacaatttccgcatacatcctattgatcgcacctggttccaagaaacctaacgcgcttgactcctactggggccagtggcagggacactgcgccaagcgtcgaggcctn

SEQ ID NO: 654154 - DNA, 117 bp, Homo sapiens
atgccacaggagcacgtaagtctatcggaaagcaaagacggttcaacattgagagaatctgttagttacgaactcactacatgaagagactataaaaagggaagactttgggcactc

SEQ ID NO: 654155 - DNA, 218 bp, Homo sapiens
tttcgctgcagtgttccccgagcctgttagacgcagcgcccggggagacttgagagaggaaaggataagaggaagtgctgccctaggcttgcatgagttcgaagcaagctttgtttccttcccgccagcaagttcccttagaaaccgggacccgccccttcctggcctgcattccatccctctcccggggcgaggtaggacctccttggttctttggt

SEQ ID NO: 654156 - DNA, 543 bp, Homo sapiens
cctcataatcatctaatagttctcatacatacctccttgtctactgactcctacctacctctatagcgtttcttgtcttcttcctcctccttaagcctactgctcctcgtcctgtttgtcctatcatttagtttctctagctgcctttgttacgccccacgtctacgttgccaaactcctcagcgtatgcctcatcgtatggtgatagaggaagttgtcaaagatggtgccagacttgacctgccagaggtccaggcccagcacgccaacagttatcataggcatagatactgggatcgggagaatactcggggttgtcaatatatactgggtggatccaagtgcccttgtaatctgggttgtcgatctgccggggcttccactcacccttgtactcagggttctgaatcactgggggttcccactctccgtccatctcttcatcccagtcctcgggcttcttagcatcagggtcagggatatgctcgggcttgtcccagtcctcaggcttggagtctgtgggatcatcgatcttggcccgct

SEQ ID NO: 654157 - DNA, 304 bp, Homo sapiens
tttttcttgtgtatttgtcagtccttggaatgcagcttcatttacacaacaggtctataataagaacatgaaatgacgagtccgtgggatctgcggcagaggtggttcttgtgtgaagcccaggcatccagacgtagggccaaaggaagggctagtgttagaggacctaatacttgaactcgttatatttcttgctgcccccacgactgtcctgaggctgagctttccgtttttagtgcttatgtttggcagcgtgctcagccaccatgtcactgaagtcctccttctctacttgagcctgctg

SEQ ID NO: 654158 - DNA, 182 bp, Homo sapiens
  misc_feature (7)..(7): n is a, c, g, or t
gagtatnttccgatgactccgccgatgccgctgggattacagctgtgagctactggacctggcctatttatttatttatttatttatttatttatttttgagacagcatcttgcaatgttgcccaggctgtatgcagtggtgtgtacatagctcatggcagccttgacttcctgggtcctcg

SEQ ID NO: 654159 - DNA, 882 bp, Homo sapiens
gcaggaagaaagattaaggcaaaataaatgaagtagactgcgcggatgaacaagaaacgtactagtagtggcaagtatcaggaacaagaagtgttgtttaaatagaaaaccaaagtgttgatcagatgaaatacaaaggaagatgatgttcttggaagggcaactaagtacaagaagagattaggtctgcggaatgaaggattctgcggaaaccaaccgtacaaatacaggctaattggaagttatcacggagcagttctgagtgagcatactgttcacttactgtagttgtggtgtcaggtatatttatgctccccctgtagcttgccctcagtgagctcattgcctatgacctgtcttaccatgtgattgtgaattggctctctggtcgtcgtccggagctccatatgtccatgtgcctactgaagatctcgtctgtggactatgtcagcagatgcctcaaaatcgaataggtcataatctccagaaaatcatttccccaattctctccctgaccccaagtctgttactcttcctgtggtccctataccagaaaattcctatcattactcatctgagtcacccgattatgaaacgctaagcatcagaacttgactgctgactccttttaacgcctggtatatactcaatttcacgaggactattctgtcctgtaatatctcaacatgttttaccttctcttgtctggggcattagcgttggaacccgcaatgggacgacctttctggacactccagaaagagaatttaggcgtgtggcccactagtctggtcaacacggggttaaagagcgaaaaagtggaaaggggggtgccaaacacatggaacggggggaggaaataaaaaaatttggggcccagaa

SEQ ID NO: 654160 - DNA, 313 bp, Homo sapiens
  misc_feature (295)..(295): n is a, c, g, or t
acgttagcagcgcagcacatcataaaaaagagaagaaaaaagagaaaccgtggcactatgttaataaagtaagctactttgttgttagtaaataagatgagggcatggctgggaaatggtcccttgggcattaattaagccatccaattattaattagtaaaccaggtgttccaattaaaaagaatttaccttggataggttaaccaggaccaggaaagtgagtttccctgaaggagttctttgttcctgatcaaaggaaattgatacctgttagcattcactggcaccataatnttaaggagaaagaactct

SEQ ID NO: 654161 - DNA, 180 bp, Homo sapiens
tagaggatcccgaagtcacccgcgttcgacagcaagtgatcaccgcgcaagttgaatgcgcgttcgcagatcgacgggccgatcgagaagccggtgaccgtgcgttgggcgatcgccagggaatcgccatggctgacatgactccgcaggacatggccagcaaattgctcgccgcgggtg

SEQ ID NO: 654162 - DNA, 169 bp, Homo sapiens
tgctatttccctttcataaaggcacacatttgatcttatcttctcttacccaacacgcagtggcagtgtgtattttccttctctttttttgttaaatattctggtttgtggaggttcacagacatgtgttagtatatccttgcctgcatgtagttgttcattactagac

SEQ ID NO: 654163 - DNA, 337 bp, Homo sapiens
tcccctaccattttcgcccagcgctaggcaattagtagggaatatggggaaaatatcattagcattaagggtttcaacatactactcagtccataagaagaataaaataatgctatttgcagcaacatggattgaactagagcctctcatattgagtgaagtaagtcagaaatggaataccgacaatacactatgcaccgagattactgtggaagatcagcttgcactttgactgaatctgaccttcgattcatccttctcaccatacactgggaaaaaaaaaattctaaactctatatctggttccatcgtgacctctttaacctgggctgcgaca

SEQ ID NO: 654164 - DNA, 291 bp, Homo sapiens
cctcaggtttcatagttaacagcgagcacatctgagcaaacacgtacctctttttcttgagtaatgtgtagagaacattttgtggtagtgtttatgtctgtcttttggaaacgttacacgatagtgttaattctttactcatcatctcagtatgtcattatcattctctgaacagcatttgtttgtagaagtcaacattaattaatcttctcaactgaaatgaaaatactttatgggaatacactgagaaccccccgcccccatcttgcacatggttatatgtgttgcccc

SEQ ID NO: 654165 - DNA, 157 bp, Homo sapiens
tctagtcagcggtgagggggctgggtttggggctcctgttcaggaatacatgtccgctgcagcctactcctggatgttcacctggtatttgtcccgtgccatctttgtctagagatttgaaggcacggaacatggcgtccagcctgacctagcagga

SEQ ID NO: 654166 - DNA, 681 bp, Homo sapiens
atcatgccccgctagacgaagagctgaccgctcagagaatggttacgaaagggacaaacaagccaacaaacgaagtccagtctccccatttgttgtaaccgccgggtcccctttggttgccatggcacttgaggccagaaagtcctcagctcccaggtgaagtcctccaccagctgcccattcctgggggtggatgccgtgacagccacgccagattgtcagctacccagaaggagaggaggtggccgtctgtgttctccaaacttctgggactcctcaaggagtgaagtctgatctacgcacggaaccaaccaccacggcaaaggaagagcgatggcgcccccatgtggcaacacaagcactgcgatttcacacaagaccaaatcagaattggccggaggggaacgtcagattcttagggagtgttactccaactaatgctacactcagggcgacttcttggaaggcaaaagccccatagtctagccatacaactttccagaaaagtagcactcttcaaaacagctggcattaaaattcttggctctgccatccacccgttctgtgagactctttcctcatccccaaaaatggaaggtctgatgacttcaaaaagagttttaccgtttttcccctcattgaaaataatagaaaacagtaaaatactgcatttctgccttc

SEQ ID NO: 654167 - DNA, 292 bp, Homo sapiens
gatctaagaggatccttttttttttggtgatagaataaaaagttactttgggctggcaaggttgctcaagcctgtaatctcagcactttggaaggcgaggaggtggaccacttgaggtcaggagtcaagaccagcctggcaatatggtgaaacctcgtctctactaaaaatacaaaaattagccagatgtgggggtacatgcctgtaatcccagttactcgggaggctgaggcaggagaatttgtcgaacgcagaaggcagaggttgaagtgagcaaagatggtgccactac

SEQ ID NO: 654168 - DNA, 292 bp, Homo sapiens
gtcagaggatctcatcagccctaaattattatgaagtctgctactatacagatggataataattttagacaattaatttccatctcccatctaagaacaaaatatgcatactaaatttttctacttaaatgaacttaagttcatttagattatttagaagttgatttatattatttaattcttcaacaaaactatgcaaatgcatgcagtaagtacatagtcataacagaaaaaaatgattcctatctttaaatatcatgtgatggacaccataataaatttagggttgatg

SEQ ID NO: 654169 - DNA, 242 bp, Homo sapiens
acctctcacgactccccggcacactctgaccccacgacaggccaatgctgatgacgcatggcctgacctgctactgacgtgaccctggcatgcctttactgaccacggcgcctgtggacgacacgggctactggacgctctccgtgcgaccgacgcgcacacccttgctctcacgtacgcctactaccgacacctgtggttgggctgtgccacgacggtggtgccgtggacgggttgcttgt

SEQ ID NO: 654170 - DNA, 347 bp, Homo sapiens
  misc_feature (258)..(258): n is a, c, g, or t
  misc_feature (316)..(316): n is a, c, g, or t
ctccgttacccctccaccctgtgactcagctctggggccaggaccagctaatgctaatgcaccccaccccacaggctgggagtcagggctcaggcctgtccagcatccccccgacattctacttaagacttaacctgagagctgaggacccagggggacctcctgcctcagcactcctcttacaggctgggtcccaaaaatgcagaaaggagggttggagcccaccagctgcaagtcccagggatattccctaagctnccacctcaatccatcttgcccctgcctcttggagacagttaacatccaccccaggttnggggcaggagggagcaggaggtctgagtcct

SEQ ID NO: 654171 - DNA, 346 bp, Homo sapiens
gagacagagtcctcagtgtgtcaccccaggctgtagtgcagtggtgcaatctcggctcactgcaacctccgcctccctgggttcgagcaattctcctgcctcagcttaccgagtagctgggaatacaggcgcccaccaccatgcccggctaatttttgtatttttagtagagacgggtttcaccatgttggccaggctggtatccaactcctgacctcaggtgatccacctgcctttgcctcccaaagtgctgggattacgggcgtgagccaccatgcccggcctggacctgcatttttaatgtgtgtttttaatatgcagaatatagctaagaaatgaaaaaaaa

SEQ ID NO: 654172 - DNA, 176 bp, Homo sapiens
atgaggcaagtaggtctacaagacgctacttccctatatagagagcttatacttcatgatcacgcctcataatcatttcctatctgctcctagtcctgtatgccttcctacactcacacaaactactatactacatctcagcgctcaggaatagaccgtctgactatctgccgcat

SEQ ID NO: 654173 - DNA, 627 bp, Homo sapiens
  misc_feature (28)..(28): n is a, c, g, or t
  misc_feature (138)..(138): n is a, c, g, or t
  misc_feature (151)..(152): n is a, c, g, or t
  misc_feature (187)..(187): n is a, c, g, or t
  misc_feature (200)..(200): n is a, c, g, or t
  misc_feature (207)..(207): n is a, c, g, or t
  misc_feature (213)..(213): n is a, c, g, or t
  misc_feature (224)..(227): n is a, c, g, or t
  misc_feature (241)..(241): n is a, c, g, or t
  misc_feature (247)..(247): n is a, c, g, or t
  misc_feature (263)..(263): n is a, c, g, or t
  misc_feature (270)..(270): n is a, c, g, or t
  misc_feature (324)..(324): n is a, c, g, or t
  misc_feature (408)..(408): n is a, c, g, or t
  misc_feature (449)..(449): n is a, c, g, or t
  misc_feature (486)..(486): n is a, c, g, or t
  misc_feature (511)..(511): n is a, c, g, or t
  misc_feature (600)..(600): n is a, c, g, or t
ggaagtctttcaattggtgtttgggtgncctgttcgtctagactgtggcgtgtttttcagtgcttataataaatgcactatttagccatgtgatggcatggtggtcccttatttgcttttttttgcgtgtaagaggcnggtctggggaggnngcgattctatttggttccgatatgacattctggangaaggggggtctntggcggnggtggngggtggttgcnnnngggaggtcgtgtcntttgcnggggcatgggtggggntgggggncgattgtccttttcggacttgcttagggacggggaccagattttccgtgttctngctagtgggggtggggttgcgtgggcgcgggggggtgccgttctggggcctgcctgggggtggggggtggggcggggtcggggncgggggagtggctgttgggtgctgggcttggttcctgggtngcgtgggtgatctgtataacaaacccccttgtcacgngtttacctgcacatgtaccccctgnacctaatttttttttttttaagtggttgccagggggttagggaagaaagggatgaacaggtgaagcatagagaagttttagggcagtgnaactattctgtatgattctataattgt

SEQ ID NO: 654174 - DNA, 687 bp, Homo sapiens
ccagtcttaattttctttcctggggctttataccccctcccgcgcggttggttttcgcccctcgacaccattgtatcttgttggccccgaacaattttttgtccttcccccccaccctgatatttcctttatggtatagatggtaatagttatcctcttcgtctcactagttgcttatcaccgccggcttattcttttatgagtcttttatatatctatgacggacaggccctccaccgtctcagagatagttgtgttataacgaagccgacacaacccaactgtgtttatttgcctttgtcacccccctacaacgctctttaaaaacactccctattacgccctgtgcgacgagctcgtcaaaacacacttgatgatccaatccgtctgtgcgctctgtaagagacttcttccacgcacactttatactcgcaccgagaattgtatagtttgcgccctgctcccaatctatgctccataatcgatagtatgaaacataatcgttcatacaacaccacttcttgagcttttttattgtcccttttcttgattccctcatttttcccctcgtcgtttataccctcctcaatttacatatactaccccactgggaggatttttctaaaagattcacacacatctcttttcaaaaaacatctttcgaaacaatcaccacaataacaaaca

SEQ ID NO: 654175 - DNA, 156 bp, Homo sapiens
ttcttttcttctctctccctccctcccccacttgctcatgtctccaaatttctcacttggggtcaatcaatcaatccagctttggctgcatagccaacacccttggttgcacatttaacacatgtctcgtgtgcattcagcttgagccacccaaat

SEQ ID NO: 654176 - DNA, 180 bp, Homo sapiens
tgagataccttaattgactattgaatagaatgctgaaccagcctatgaataacctgggataaatcccacttgagggtataattctaacatccctgccatatcatgactactaggtatctagatacttgctccatattctacagtacaaactagtataaatcattgccctttatatagtac

SEQ ID NO: 654177 - DNA, 321 bp, Homo sapiens
  misc_feature (181)..(181): n is a, c, g, or t
  misc_feature (260)..(260): n is a, c, g, or t
gtaagacactgatggtaatagtttttccagggttagtttttagtttatgtgttatccagaactttattgtagaatttgtccataataaatgtttaccatcatttctaaatatatatggaatgcctattaccctgaacctaagatagaaaatgctggttttttgttttgttttgttttgttnttaatgcagataacaagtgagaaggaaagagttaaaagatgtgcaaattagttcaggccagatgaattgcccctatatnaggcaaggttggtatctgcagtggtgaaattgtggcagtgccatcatagttctcagtagtt

SEQ ID NO: 654178 - DNA, 232 bp, Homo sapiens
ctcctcttgcaggtactcaagtccactggggtgctccctttatctttatcaagaccttggaaggacctccctgctggttttagaaaaagagaaactataattttacaaggaaaaatttgaaagaagaaaaatgttacttcagtgggatcagcacttcaaggacagagcttaaaatgaaatttactaatattttagagagctcatttttaatgaataataaaagtgaattatc

SEQ ID NO: 654179 - DNA, 989 bp, Homo sapiens
tgctccgtcctgtcggctggccactgccctcctacggtgccaccatggaccctggctgcactccggtccgcgtcccccccggggatcgccgtcgatcttccatccctgggcctcgccgccccggtctctgactccagcagcaccagctcctggtggaccacatgtggaaatgggacgctccagatcccattctgggagtcactgaagccttgaagagggacaccagtagcaaacagatgacgtctgggagttggtgcctaccggtgatgatcattggacagtcttgcgttctgcctagtcgtccgccaggcagaggcccagcattggcggaacgagatctggacgaggaatatgctgcccattgggggactgggtgaatcttgcaatggcatctgcatgaactatccctgggtgagaacagcgaagtcttgaagagtggccggttgtcactgtgcagaccatttctggaagctggagccttaaggatcggagccagttttctgcaaagattttttaagttcagccgagatgtctttctgcccaaaccagacctggggaaaccacacacccatcttcagggatgctggcattgcagctacacggttatcggtattatgaacccaagacttgcggtttgacttcacaggcgctgtggacggatatttccaacaataccagagcgagtgttcttctctgcatgcctggggccaccattccacgggagtggacccggggtccggacggggagcattgcaccgtggtgtagaaagggactcttgcgtctttgctgcctccaggtttgccggtgatggtacggacctgggggggcccactgcggcgttgttggctgcacattgcgagctgggttttttgggggaggctaatgtggaggacccgcggacgaggtgctgcgggtcttccccatgggggtgataccctaagcagtgcggtgtcaagcgcctgtgtcccgtctcgttctctttctctga

SEQ ID NO: 654180 - DNA, 441 bp, Homo sapiens
  misc_feature (162)..(162): n is a, c, g, or t
  misc_feature (189)..(189): n is a, c, g, or t
  misc_feature (195)..(195): n is a, c, g, or t
  misc_feature (227)..(227): n is a, c, g, or t
  misc_feature (282)..(282): n is a, c, g, or t
  misc_feature (284)..(284): n is a, c, g, or t
  misc_feature (346)..(346): n is a, c, g, or t
  misc_feature (361)..(361): n is a, c, g, or t
  misc_feature (381)..(381): n is a, c, g, or t
  misc_feature (383)..(383): n is a, c, g, or t
tgtttatcgatgccaccatcatgcatcaacatgatggtggggagtaaatagcacaccaggttaagtgtctgattctgcatatgcttgtctaatcaccacgaaccatgatatgcatgcagagcactcaaagcttttttttttttttttttggaaatagggttncgctttggtggcccagtcgggagtgcnggggcnccatctgggctcacggtaacctcggcctcccnggttcaagcgattctccggcctcggcctcccaagtagcggggattacgggtgccngncaccacactcggctaattttggtatttttagtacagacggggtttcactatgtgggccaggntggtctcggactccngacctggtgatccaccctcntnaccctcccaaagtacggggattataggcgtgagccatggtgcccggtggtggcatcga

SEQ ID NO: 654181 - DNA, 108 bp, Homo sapiens
gcggccgcctactactactactgctcgaattcaagcttctaacgatgtacggggacatgtaggttgtctaaaaataaaatgcatttaaactcatttaaaaaaaaaaaa

SEQ ID NO: 654182 - DNA, 729 bp, Homo sapiens
agctggacggtgcggcgcctcgggattactcgtggtgcgcgctggcttttggctcccgtgccatctgaactctgtctcagcgtcaaaagctgctgcgacgaacctgtctgtagcactgaaatgccatacctcgtcggggtctcctgtagcctcgagggctcccacacggtggcttacggaacccacaggtcttgtcgcgtcagccgccccggacatggtcgctgacaccggtgtctggagacagggatggtccggacggcgcggatgaggagagtaaggtcggctcgcgactgactgcacgctacgtcatgtctcggtcccgcttgccgggaaaggccctgactgtggacgtgattggaaaagcaggagttgcctccggattacgggaaaatcgctggcgcgaagatcgagggtgtgttaccctcaaattggtcatttaccgtacacggaagaaccgccacttgtaggagaatagccgcaaccaaggggaaacctttgtgcgttgtgcgaggacgaaaattggtacagggaagttaaagtaagtatttccaacgttgaggacccaagacgacgagggaaattgagcacgtaatagaaaggtgcacaaaacgccatggcataccttgacgattagtaagtagaggaccacggtcctactgcaaaaaccagagaacggtgccactggaacactgaagtgaggtcaggaactagtacaagccagtgtcaccc

SEQ ID NO: 654183 - DNA, 240 bp, Homo sapiens
  misc_feature (7)..(7): n is a, c, g, or t
  misc_feature (124)..(124): n is a, c, g, or t
gaccccncttgtccctcctccctcccctgttgtctggccgtcgtcaaccccaccttaacgctgtgttgagcccgtccttgggctctggtccctgcgggcagactctcccgggcccacggcggancgctgcataccaatttgccctgcaccgcctgtcccggagacgagcccgaagcctgccatgcggctgtgtcgaggatgcgtggcactgcgtggcggacagcgtgggcaggctcattt

SEQ ID NO: 654184 - DNA, 258 bp, Homo sapiens
gattgtgctgctgtatatgaggcttatgtgcaaaaggtgtgagtttgaaaatggcgtcagatctactgaagccatgttgaattcacagtgctgtttcaacactggggacataagtttttcagtcttggggacatctgctctttgttgaaaatgaaattctatgtgtccacacagtgactgcacatgtagctttatgagtcaaagtaggtctagttttggagaagtgcacctggtgtgagggtttttggaactggagat

SEQ ID NO: 654185 - DNA, 429 bp, Homo sapiens
ggctgaagttctgacgatgcttctctctagctttatgtgaagatattcttttccaccgcaggcctgaaagcgctccaaatgtccacttggaggctctacgaaaagaatgtttcaaaactgctctatgaaaagcaatgttatactctgggagttgaacacaagcctcacaaaggagtttctgagaatgcttctgtttactttttacgtgaggatattcccgtttccaaagaagtcttcacagagttccacctatccatttgcagatgctagcaaaagagagtttcaaaactgctccatcaaaacgaatgttcaactctgtgagttgcatgcaatcaacacagagaagtttctgagaaggcttctgtctagattttacgtgaagatatagccgtttcgaacgaaggccacaaagtgctccaaatatccact

SEQ ID NO: 654186 - DNA, 497 bp, Homo sapiens
attatggccgggggccactggggctctgtgctggtacacctaatccctgcacccaggggcgctggcattgtttacgcacccgctcctaagacgctgttgatgatggttgctatggacgactgctacaccttaagccaaagctgcactgtcaccctgggcaactccgctaaggccacctttgatgccattggtaagacctacagctacctgacccccgacctttgaaaggagactgttttcaccaagtctgcctatcaggagttcactgaccaccttgataagacccactccagagtcttcgaccagagcactcatatctcaggtgaggttacaacatggggtctttctacaagaaaaataaagtgaattaagcgtgtgaagccttctctttccactagatcatgccttgtggcccgtctaagctgcgtccactatagactttgacatgcttatgcatgcggtcaaattagggcttacttggcaaattcgccctattt

SEQ ID NO: 654187 - DNA, 177 bp, Homo sapiens
actcgtggcaggcgtgaggcacgagaatcagttgaacctggaagcggaggttgcagtgagccaaggtcggttgccatggcactcgcgagccaggggcagacagagcagatgaaacgaaaaaagacagaattggagttttgggaccaggctgttggatgggctctatcccgtggtaag

SEQ ID NO: 654188 - DNA, 104 bp, Homo sapiens
tctggagtgtaggttgccgtgagctgagttcgctacacttgcattccagcctgggctaaagagtgagactctaatctcgcagaacgagaagaagcgaatataac

SEQ ID NO: 654189 - DNA, 162 bp, Homo sapiens
  misc_feature (34)..(34): n is a, c, g, or t
  misc_feature (115)..(116): n is a, c, g, or t
tatatatgtggtaaaattatacaagaaataaaangcaagtaagtactggttggacaaagtgggtcacgcctgtaatcccagcactttaggaggccaaggcaggcagatcagttgnngccaggagtttgagaccagcctgaccaatatagtgaaaccccatct

SEQ ID NO: 654190 - DNA, 118 bp, Homo sapiens
aattctaggcagcagccattcttcattctgggggaaggtggtcaggaacaaggagggagagaaaaatgtatagcatagtagctagcagtggtccgagcgtgatcaagagtgttttcaa

SEQ ID NO: 654191 - DNA, 869 bp, Homo sapiens
acttggaggaaaacacaccccggtctcacattaaagaagccgggacgtgtcggcttcaaagagaaaaggcaacatcctgttcacatggccactgctctggcaaaaacccacagctccggagcgaagccccagccccggcccggaccataccagggcgtccgtgtgaaggagccgagtgaagagaactgcgtgaggaggaagcgaggccacgccagcagtggggcagcgacactgcaccatacaggcggtggtgctgcacaccatcagcacccatggacagaccatacaccatcgagatggggtccttcctgcctggacatggaaggttctgtgatctgcagtgacagaggaggctggcctgatgtgccagtctggttctcccagccacatcccgggacaaccgtgcagaccgcacgtgagtcgccatgggtagcattacaccagagtatgtgcgcctatgaagcctgtcaagatgaccctcatactcgagattgagatgtagtgtgcagcacggggtgacctccagggtaacacggacgagggagaggacacctgccctgaagtgattggaccaattggaacattctaacggcaatattcaatcaagcgaattgtgccgtaacaaagagggccttcggaacaacagactgggagtgaggataccaccagattgcgacggagcgcaggaagacaaacgaggaggagactcatgactgatatatacgtccgatgacccatcaaggcgccgcttgtccaaaaaataaccacacacataccaatacagtatcagtatcgaaacgtccgggaccccaaggcacatagctcggggcctcctagaatggacaatgatacagaatattcgaatgcat

SEQ ID NO: 654192 - DNA, 646 bp, Homo sapiens
caccctcacgctcctttaaaaggtgatcaaaagtaacggaatcgagcccagctgggcctgagtgcccatgtgcagcgtcccacaaatacccgctataagagaacgaaaccaacatcgctggggtgcggcccatcatagaaggtaatccccggggtcagttgttggaagagatactcctgctttagctagtcagctgggagcaaggcatcaaatggctctgggcaacatgttgtcggcgcatcagtgatgtttctagttccacaatggcccttttccaattgcagacttcaatctgatagatcacaggatgcctcattatcatgctaagaacaaagggtaaggaatctgcgttcctgaagtgctcagtttaagccgtgtcttcggaaagtaatggacaggctaggcaagtgctttggctaacctcacctgtagctagcatggatagtgtaagactcaatgtggggaatcctgcggcttccctgagagaatgcattttatacaaggcccagttgtttcaaggtttcggctcgttcacagggtctggtggaccaggcatgtggccaaacccggcggttgggttttacagagtaggaagccctcgctcagtaataaagcgtatgttatgtagaacatcatcgcccaaaga

SEQ ID NO: 654193 - DNA, 162 bp, Homo sapiens
ctgggtgacagagagagactgtatctcaaaaaaaaaaaaaagaaaacatggatataaattggtatggaaagccagatggttgcagatttgttgatttccagttctcccatagattttatagtgctcatgaccagcctgggtgacagagagagactgtatctc

SEQ ID NO: 654194 - DNA, 1346 bp, Homo sapiens
  misc_feature (1026)..(1026): n is a, c, g, or t
ggcgaacgcggagagctcgccatgaatggcctcgggcacgctatgagagtataaggtagtggggtcgcgtgcctgtcgcacctcccttaatatgcgcataagccgcccctctaccagcaatgctgaattcttagcggcgcttaatccatgtccgtcgccataagtccccgtcttcatcggtcactattgtatcgtccagctttacaagcaaggatgacatgaatgtccttccagggcgacgcattagtcatacatgagggcgggctcgtgagacgacatgtcacgcctcactcgtgggctgatagaagtttgcagggaatctcgtgcatgcgtcgttatgattacgccagtgagcggagatcaccaagatatatagtacctggtggatacacggtggagccctgaatccacaccgccaggaggcattgggcatactcgacgtgctaaactgacaacgataggtcgtatgcacgctggggagactgagcccaaagaatggtacattccaagttccaaggccattcttggtacaagggtatggcagtgagagtccattcaggggcaccattgtcaacatgctttgccccgagccaaggcacacggagggttcggtgcggataagcctaggtttttccaagcaagtagactccccaaagatattcagaggatgtgcccacgacttgccacaccgctaaccgtgggtgtggcgcatatgtgggcccagctgaaagtcgactaaagggcttaacgtgccatatgcagggctaaaccaaatagtaaggcggccccacgaagaaaacacccttttatccacttctcctaaaggggtgtggccaaggggggcccccatcggaatagcctgggagggctgtggttgccccgcccaaaggaatttagacccctttgcatggggaaacctcggccgcaataaatagcatcacataaagacaagtaatacaagaccggccatcaggaaagggaacaccattacgcgatcacacagagggtagagtcacgatcgttgcnaaaaacagggacgacacgtggtcatgataattcccacgagagggacggagcccaccacagtgtggttgagcaccaaggagtaggagtagatgacgttggcccgcctttggacagacccacgggagcttgtcaaaactctggggagatcaacctgacacacagaatgggcgaacaacaacacagctaccgtcgggccagaaggccacccctccctcaatagccagtgagaggggacccgggcacgaagaaaatcaagacgttgcgggacacaaagccggcactcagtgggtctaccaacagcgggcgacactatcaatgga

SEQ ID NO: 654195 - DNA, 104 bp, Homo sapiens
gagttggtgggttacctagactatagtgcttagtattcgcagatggactatatttatgtctgtagaaagctaacccagcagttgctttgtgggctcaaggctca

SEQ ID NO: 654196 - DNA, 369 bp, Homo sapiens
tgccctgtgacacgaggtgtttgtgttttgtgaggacaccttctccagaggaagagagggatgctgtgttccaggtggtgtcgccgtgggtgtcgcctgtggcctctccggtgtctccccacctctctcttctccacccaccccccactgtgtgtgctctcccttttgcccccatcttgtgagagtgctgtgagaggttctccctgtgttgtggggtgcagacactcggagggtgtgtttgtgtgggtataaaaaaaagagagaaaaggcgttttccgtggtgtgggctttttgcccaacaaaaaccttttacctgtgggaggtattttcaagctcccggaaaagaggccccaccaaccaagttttcca

SEQ ID NO: 654197 - DNA, 411 bp, Homo sapiens
  misc_feature (255)..(255): n is a, c, g, or t
  misc_feature (283)..(283): n is a, c, g, or t
  misc_feature (287)..(287): n is a, c, g, or t
  misc_feature (304)..(304): n is a, c, g, or t
  misc_feature (308)..(308): n is a, c, g, or t
  misc_feature (330)..(330): n is a, c, g, or t
  misc_feature (337)..(337): n is a, c, g, or t
  misc_feature (356)..(356): n is a, c, g, or t
  misc_feature (358)..(358): n is a, c, g, or t
  misc_feature (375)..(375): n is a, c, g, or t
aggctccaccaggagatcaagcaagggctgcctttcaggagtcacctcctgagccacttcagagttctggaagtgaccacggaccagggtggaggaatagacttctagttcattctgggacacttgagccagagagttgaaagcttggaaagaccagataagaaacctgccctttgtctccctagggacatgagacaccacattccatttgtgctagaaaaacctatccactgatgagtctaactgttcaaacgnctccacctggtgtgcacagctgcctggntcanttgtacttgggggcatnaggntgtcctccgattttagtggagnttcctgntttagagtgtcctagctgntnactggctgggtgggcantaggggtacccttgcgttccttcggaaaagccagag

SEQ ID NO: 654198 - DNA, 88 bp, Homo sapiens
aaaaattacggctaggtacgaggccgcgtgtttggttgtatggctccgcctgggcaggttagagaaagaagagggccaggcaccacgt

SEQ ID NO: 654199 - DNA, 273 bp, Homo sapiens
cttcctgactcagcaggatccctctacaggatcctgccaagtcagaggatcgccacgtacagtggctcacacctgttatcccagcactttgggaggccgaggtgggtggatcacgaggtcaggagatcgagaccatactggctaacactgtgaaaccccatctctgctaaaaatacaaaaaatcagccgggtgtcgtgactggcgcaagccttgcgagctactcgggaggctgacgcaggagaatgacatgaacccgggaggaggaacttgca

SEQ ID NO: 654200 - DNA, 99 bp, Homo sapiens
gacgccaggtattactgcgcgagagcgtgggaagtaagaattgaccatcgttacttctttgacctatgggggcagggaactctggtcaccgtctcctca

SEQ ID NO: 654201 - DNA, 120 bp, Homo sapiens
gcgcaagtaggtctacaagacgctactctcccctatcatagaagagcttatcaaccttcatgatcaagcctattatcaatttccatatctccttcctagtcctctattcccttttcccta

SEQ ID NO: 654202 - DNA, 273 bp, Homo sapiens
agaaatgatgacaaaagaaggaaggttttccaagaagaaacatttttttgaaagaattctttggtgggtccggtggccagctactttaccagcttttacagggtaattcactctacaagcagtctcacacaaaagactacatattgtatgattctgtttatatgaaatggccagaaaagggaaatctattgaccaagcaaattaatagtttgctaccgcccaaggattggcttccaaaaggcttcaaaaaacttttggaagaagggaaaaaat

SEQ ID NO: 654203 - DNA, 208 bp, Homo sapiens
actcacccccgccacccggccgtcgctgtgctcgcagtcctcttcccccgaacctgccccgcctccccagcccgcccattggccccacgcccgacgcgtcagtggaggcccaggaccaatccacagcgacctgcacgttcagagcccgccccaccctcccgccgactgccagccaatcaggcgcgagcctggccggggcagcccaaac

SEQ ID NO: 654204 - DNA, 115 bp, Homo sapiens
gcaagatggcagaagtagagcagaagaagaagcggaccttccgcaaggtcaactaccgcggcgttgaccttgaccagcttcttgacaatttctacggacagcttgatgcagcttt

SEQ ID NO: 654205 - DNA, 296 bp, Homo sapiens
cggtaccggatcggaagtaggtaggtctagaaggtcagttgcagtttgatttggggctggggtatcctgggcaagtgtcttcagaactcatccaagtgacgagacggaatagactgagatcacctcgttaaggttttcccttagtgacgaccaaggggatttatgtaatctctgagtgaactacatccctattcgcagccgctgatgaatatgttctccaggacaaggcagcattaaaaggaaatactgttcagtagtttcttggcatgccaaaaaacctacctatttcacaatcg

SEQ ID NO: 654206 - DNA, 160 bp, Homo sapiens
ctgtgccatggggtctgtatctatctttatgtgtgtgtatgtctctatatatgtatatttttctgtgtctatcggatgtcccctttatctctaggtaggactctgtatgtcgttgttatcgtctccctgtgtgtccaatggctgttctctgctagctgga

SEQ ID NO: 654207 - DNA, 345 bp, Homo sapiens
gactgcctgaagggacgaacatgctcgaatcttgagtcccatcaacacggtctcttcgaatcctaaagtcagtttacattcccccgagcagatactgagtataattaacagattcttagcagacatcttacaatttcaaacaccagatactgctaatagatttgcatgatttaatatcgtattacacttaaatcagaaagcaaaaattaaatactgctaagtatttgccacgaactcaaaggtgaataatacgataaaattcacgccaggtgctccagcagccaggttgtatgaaagcaagaatgtctttactggggagattacaaaaggtcccgcaggacacta

SEQ ID NO: 654208 - DNA, 2161 bp, Homo sapiens
ttcgggagccggccgggagagtcccgacgacgtcgcgaactcggagagagggcgcagggggcagacgactcccctgccgacagaccccctgcacctcgggctcggctggctgtggcccgcagccgaagggtgccatgccccagccaagccagaaggcagcgggcaccgcgccagggcagcgcttgctccgaaggcgaacagacagggtatggggcaatcaacaacccataccaacagggccacaggcacgcatctgacggcagcacataggaagggcaacggcccaccagaaacatgggcattggcccacagagggagaatcagatccacgcgggcattggaacccaggggaaggagattacaggcaagcacaaggcaggatggcatggggcggcgggaaacgcggaggaacaaccccaaccacgacagggaaccaaggaacagacaaataggcgcagagaagaacacctgaaaagaccacaccagaaacaaacaggagaacacaaacgcaaagacgggaacagcaagcaggggacgacacgcgcgcggacaagagccaacacccagacgcagacgacaacgacacaagaagaaaaacagaacgaacaaggcgcgcgaacacaccaaaaaagaagaaacagagaagacaggaagagaaacaggaaagagagagaccacaaagcaaaaagaagaagaagaaaaaagagagagagagagacaaaaaggaaacgaaaagcggcacgggggcgcagcagacccgaggacagagaaagcacggagcgacgagcgacacagaggaggaacaacgaaaggaaaggcgcacgcgcgcggcggagacgagcgggacagagacaagccacaagagaagacgagaagagcgcggacacgcccggagcagggcacaaggcacaccagagggcagccaaaaacaacaccacgagcccaggcaacagagcgcggaggaccgcagcgaacaaagcaacacgcaaccacggcccagggagaacccgccacgaagcacacagggcgggacgacaagaagaacgaaagagaacaaacagcggagcacagaggcaagcaaaagagagaaagcggccggacaagcgaaccagaagaaaacacaaagacgacgaagagaaacaacagaggcaaagacacgggagcaagaggagaaaaacagggaagaggaaaacgcaggaagaggagaaagcgaccgaccgagcgaaaaacaaacaagaacaaaacgagaaggaaaagggcaagaagacaagagagaagcaaggcggagagagagagagacgaacagacagcgacaggccacggaggaggaaaacgcaagaaacaaacgcgaagcaaaagcggagcggaaaaaggaaaacagaacgaggaagaaggaaggaaggggaagaagagacaacagaaacacacaagaaacagaaaaacaaacgagaagcagacacacgaacagggagagagagaggacggcaagggagcgacagagagcagaaccgcccacagaagaaggacaaacgaagaagcaaagaccaacaacgaaagcagaaacaaggaaaggaaggaaaagagagaaacgaaaagagcgaaggagaggagaggagagatgaagaggggaaaaggaggaacaagaaaaagagaaagcagaagaggggacaaggagaggaggcgggaggagcgagaaaagcggaagagagagacagacaaggagaagaggacgacagaggagcaaagagcgaacaaaggacgagacaaagagagagaaggagagaaggagaacgagagaaacagaggggagaagaggcgcggggaaagagagaaaggagagcaggagagagagcagaaggagagagaaccgggcagacggcaaagaaggaccaagagagcgcagagcagacagaacaagaaacgagaagagcaaggacacacgaggacagaggagaggaccgacaaggaacaaagacaacggaaggcgaagaggcagcgcaaacgagacagacacgagggacagcgagaggcggagcagcgagcaaccagacggcgccacgacgaacgacagagaacgaaagagaagagaggagagcgaagacagaccagagcggccgaggacagcaagcgagagggggacaagaaaggcagagcggcggaa

SEQ ID NO: 654209 - DNA, 1257 bp, Homo sapiens
cactacagatgtcgccgccggtctgcctgcgatagccccggaccatggctctgtagcctcgaaccccatttgtgcccccggcccgatcatccggagctcaccacgaccatgcgctcatccgcatcccaccttctttcttcagaccgaggccgcacgaccgacctcatccttgacatgcagaccatggcagtcttccactattcgcacattggatgccatgtcttcgccacaccatgagacatccatccagagaccatcgatgccagcatgcatggatgcagcactcatccatgattgccactcaggtgcccagaaacctgatgctacacgccatgatcacatcctggacgaccctgggagctggagctggacagggaccctgctccacagactagtgggactgggatggctcgatagactatgggaacactccaccccggacccatgcaccaccacatggcactcccatacagaaggataccattgagagaggacgccacaagagaagggcgcagggcatacacacgaagagggggcagcagaccccagggaccaggagagaatggcaatcatctgaaaatggaataaaaatgacggcggcagattatgacttcttcaacaaagcgtcataccattccccagtcatggcacgcgccctcgcccacataaccgacgacacaaccaaacacagacagcccaacacacagaaaccaccaacaccaacacgacacccaccacaaccgaaccaacaaacgaacacaaacagaagcccccaccaaacacacaccgcagccccaaccccagcaccaccaaaaccacaacaccgcaaaacaccgacccaccgccccccaacgcacacaaccacccagaaacccaggcaacacccacaacacagccaccaccaaacaatacaacgacacaaacaccagcacccaacacacccacaacaaccaccaccacgcaaagccagacagacagaacagacgacacaagaaacagagcacgagaaagaaacgaagcaacgacaaaccaaccaaccaacacgcggaccagcggacgaagcaggcaacggccagcgggcaacagcacagcacgaccgaggagccgccccggagccacgggcaacggacacagcacaaaagcgaaagcacgaagccacgagaagcaccgacgacaagaccaggcacaacagcagcacgacggacccggacggagtaacacgggcgcaagaagaggactcacaccgaacaaaaaaga

SEQ ID NO: 654210 - DNA, 425 bp, Homo sapiens
ggggtcagaggttaaaaaaaaaaatttaaaaaaaaaaaaaaaaaaaaaaaaaaaaaaaaaaaaaaaaaaaaaaaaaaaaaaaaaaaaaaaaaaaaaaaaaaaaaaaaaaaaaaaaggaaaaaaaaaaaaaaaaaaaaaaaaaacctgggggcccgcttggcccaagccaattttaaactggacaagcttaatcctggggcccgaatttgggcctaattggccaatttccccttatggggggccgattaacattcaagggcccggggtttacaacggttggaatgggaaaaccctgggggtccccaatttaaatcccttggaagaaaacccccttttccccagtgggggaatacccaaaaggccccgcccgaacggcctttccggtgccccaccctaatgggcaatgggaatggggcttttttttt

SEQ ID NO: 654211 - DNA, 956 bp, Homo sapiens
gcctggctggactcctcgtgatagttcccggcacgcggcggccgacggtgacccaggacattgtgctctgtgtgccggcgctgcccgctgcggggaagcacgcgggtagcggagccatgggtgcgacgctcccagtccctgaacgagcaaacgtgcaccttatctatcccggaacctgacaggaggttctgtcggtgcaatgcagcaagctgaacgcgagatatctgcaaggagcggtcaacttaccaatttactggcgtgaacggtcaaccatcgggcaaatccacatgtgtgcttactattgtgcccatgtctaaagattgcaagaccttcgttaagaggcaggggtgtagagagtaatcaagttctagcttaatgcgtgaacctccacggcattatctggatagcagttgaaatgccccatgggaaactttcctagtaacttccgacgtcagattagcttgtgagaattgtcgactcaaatgccaatagcatggagacgcaacttgcgtgtgcccctatggagaagcttacaatgtatcagtcaaaagggcacttgatttaccaggctcaggcatacaagatggtacaacgactaagactgttgtacaggactctcctcccgtgggtcacaccaagcagcgacttccaagaaagtgctggaatgctgagcgtggtaaacgacaggtggatgacaccctttagctagagcttggcctcatatataacctaccgggaactgccagcggctattgcgaatcgaaggaacgtactaatagaggaaaggtacacagattgcccaacaattttgggcaacacgcgataaagaatcctcaataacatagctttgtccgcagcctttaggcagaaactaggttaccaaagtccaggcgaccattgcgcatacgtccaggcaaggggagtccagtcatgcatgaagctcctcatggcctcca

SEQ ID NO: 654212 - DNA, 1599 bp, Homo sapiens
gacaatgctctgaggctctatttgttcaccggcagcatcacgcgctgtctcggtttctctgccgttctcaataaacagagagagatacgcacgcgtcggtatacatctgcactgatgtgcatcaagaacggtgctgacaaaaagtcttgggttatgcgtgaggagacagactgctccccgaagaccagtgactcttccatctcgcaatcggttgagctgcgcccaggactaatatggacgttgactagctggcgcgaagcagcccatcacatcgtaatccgtcaggttggcagcagatgacagtccctgaggaaatctaaaggccgatgtgtccattcccttagaggcccttggagaaggtacgcgcacaattaggagtcacttggacagtttcgttaacaccaactcggggcgcacggaacattagggaggaacacgaatactaggacaaccaacaagcactatcctgaacaggcaccggaggacttggctgtcggtagcgccgcgcgcgcgaaggaaagcaacccgcattggtcgtcgttggccatagaaagcgccgggaaagggctctccccccaccatcggaaaaaacgcaacgcaaaacgatggcctaggatccaccgtatcaagaaagaccgacattggaaagttttcaaaagcgattccaatagctatctcgaaacatctccgtattcgaggaacgaacacccaaccagggacaccaagtcgttcaaccggttaggggctcgaggttcggcaattcttggccccggtagccgcgaagggcttcgccgtaactatttcgccgaacctcgttacgtgcgatgagcggtactgactccatcttggtgtggcaccttttgggatgcgacttgagtgtgaacttttcgtggagaaaacgacaatgtgggtggtgggtatttccaccctcatacgaattgggaattgtcacctccaagaatcggtagcacgaaaggggggtgccactatgaaagtctcgtcgtagtcaaccccggctccatacagaattccacaatcccagttggacacagaggttcaatggttgacccccgtcgggacgttgaggtcccccggcgcgtttaacccccttaggcaccgcggtatacataacctcactgcgaaattaggaacacgcaaaatccgcgttcgggaccattttagggcgcggaaggggcgcccttaggcgattggcgattaacaacctcaattccaagcgtgagcctgacttttcgggagacaggacctctgtaataggccgaaatcaaattgcaatatcgcggagcacgaagccattgttgggcgctggatggggttccagaacatgcattggcgaaagaatctattcgccgttaccacgtgtccatgaatgggggcctccacgcagggatcgggcccaatacgcgtcttccggttaccattatactgtgctgtgagacagtgacactgtaaacggcatacacgctaatggcttctggcctcgcaaatgttgcgcccatgtgtatcacattgttaccccagttggtggtggcgaaaagtgaataactgtggttacgcgagtgagagtatccctgggactgg

SEQ ID NO: 654213 - DNA, 828 bp, Homo sapiens
ggcccggcccccccgccccgttgccccgcgttcccccgagtgggggcccccgcgccaaactcagacaagaacacgtcccgcgtgagagaggaaacgagtggtgcgcgctttgtggtgacaaaacgtcggatgaggtgccccccaacatctccagaagtgctccgggcaagcacagccccactgcgtcgacaaaggggtccccgacgcgcaaacgccacatagcctaggggagcgacgactttccccagacaaccacaccgccggcggacgcccggtcagcctgctgggtcaatacatgtgaagcacagaaccgctggtcaggtcagggggctcaccgaccaaagccctgggacacaccacaggggccactcgaagactagctccacgattacccacaatgctgccccaccaaacgtccacaacgggcagaatactgcaatgatgccccccaacagccgcccgcccccccctctcgcgagaaccacgcgcggggagaacaggcgattccccgggaaccgagtctcgctttcacacatggcccgacatgacaatgcctatactcagataagagggcaaggggtttacgagaagacacggagggcctccctgcaaaactcactacgacgacagaatagagagcaagtagttgttggagggcccccgtagtgtatctgtgtttctgtgacgagccacgcgttgatatgagtacgagttcctatataaaccccacaacgcgtcttttatggggtaacacacctcggcgaccaacacatgtgttcccgcccgactttggcggccgccgctataaaaaacagaaaaaccaaaaca

SEQ ID NO: 654214 - DNA, 429 bp, Homo sapiens
actccgcttgatactctcctttgctcttttcatgtttaggagaataaaagtacttcttcaggaactggcaagccagggtttcaggagagtactgttgcaaagtcctgtccacatgtccactggtgcttttgatcttagaattcaatacattcaactccaaacataatgttgtcaattcagccaggtcgttccgaagaccacttgcaatggcgcatggagaacatatttgaaacaggtcatccaaagactcccttggactccttacacattcacatgctgttttatcaacagattcttcattgcctaaagagacccttttttctttttcattatcttcatctaatattcccttttttgattcattaactaatagcacatccttggtcaatttaatggatgagttgtcagattctgaaacaccctgaaaag

SEQ ID NO: 654215 - DNA, 138 bp, Homo sapiens
  misc_feature (3)..(3): n is a, c, g, or t
tangctcattcatttctctaacaccagtaatatcaataattttcatgatttgagaagccttcgcttctaagcgaaaagtcctaataatagaggaaccctccataaacctggagtgactatatggatggacggatatat

SEQ ID NO: 654216 - DNA, 177 bp, Homo sapiens
  misc_feature (152)..(152): n is a, c, g, or t
agtaaagcaggtgcttaacacaagtgtatcctttcacgtcttactactctccaaatcggagtcatcacttcacttcagttattcatcattcatcattccttttgattctttgaatgcattaaggggttcctctacagctttcctaggaggtngtatagtcttctgatgggacgaaga

SEQ ID NO: 654217 - DNA, 231 bp, Homo sapiens
gtacgcttcaactcacacgacgtgtaaaaaaaaagtggatgtgaaaaaatgaaaacagatcctgggagggggcgggaaatacaaggcatattttttaaaggaggattctcataagtgaagccatgacttgtcttgcgggggataaaaaagggcttgggagattcatgcgagtgttcccatcggagacaaaagcagtttctctccaactccctctgggaaggggtgacggtg

SEQ ID NO: 654218 - DNA, 230 bp, Homo sapiens
  misc_feature (121)..(121): n is a, c, g, or t
  misc_feature (145)..(145): n is a, c, g, or t
  misc_feature (156)..(156): n is a, c, g, or t
  misc_feature (217)..(217): n is a, c, g, or t
  misc_feature (227)..(227): n is a, c, g, or t
gccagaactgttatgagattaacatttctattgagaagcttttgagtaaagtactgtatttttccatgaagatgactgagatggtaacacttcgtgtagcttaaggaaatgggcagaattncgtaaatcctgttgtgcagatgtnttttccctgantgctttcgtattagtggcgaccagtttctcacagaattgtgaagcctgaaggccaagaggnagtcactgtnaaa

SEQ ID NO: 654219 - DNA, 116 bp, Homo sapiens
agcggctccaacttcagttttctcagttttaaaaataggaataaaataggcgttcccgtcatggctcaatggttaacgaatctgactaggaaccatgaggttgtgggttcgatccc

SEQ ID NO: 654220 - DNA, 314 bp, Homo sapiens
tccgggtggtgtgctgtacacggttctactggacgtcgacaacgctgaccacgcttgatggcagagatgaccacccaagtgttctttgtcgccaacgaggcgcgcaacgtgctgaccgctcccatcgccgctctgcaggacggccagcaagccgatcggccacaagtgcgcgtagtcgccagcgacggcacgatccagacgcgcgaggtgcgcaccgtgcatcagtgaccgtgctgcgtggtgcagaattcctcgaacggcttagaattgacggcgacccatctgctgattcggtccttgcttgacgggctgcc

SEQ ID NO: 654221 - DNA, 315 bp, Homo sapiens
  misc_feature (56)..(57): n is a, c, g, or t
  misc_feature (73)..(73): n is a, c, g, or t
  misc_feature (78)..(80): n is a, c, g, or t
  misc_feature (100)..(100): n is a, c, g, or t
  misc_feature (107)..(107): n is a, c, g, or t
  misc_feature (114)..(114): n is a, c, g, or t
  misc_feature (135)..(136): n is a, c, g, or t
  misc_feature (147)..(147): n is a, c, g, or t
  misc_feature (166)..(166): n is a, c, g, or t
  misc_feature (188)..(188): n is a, c, g, or t
  misc_feature (207)..(207): n is a, c, g, or t
  misc_feature (217)..(217): n is a, c, g, or t
  misc_feature (265)..(265): n is a, c, g, or t
  misc_feature (297)..(297): n is a, c, g, or t
ctcccttacagctcgctggtgtgaatactacaacacatatgcatgctcagctgganntctgcactactataanacttnnntccccccaagaatatctctngggaaangtttttngtacgttacttaactttattnngctgctaattngcgcattagccggtaactngcaagtctggagaccacttacngttgagggtagctggaatnttagaccctnggcagtatttaagatttagacatttagccttgtgaaagttaccacagngctccatgtgattcattgactgtgagcctgtngtccatcgcacttagaca

SEQ ID NO: 654222 - DNA, 137 bp, Homo sapiens
atactgcttgtcaggctggagtatccactttaatactgcttgtctggcttatgatccactttaatactgcttgtccggctggtttgcatccttagagtattaaagtggatcatccagcctgacaagcagtattaaag

SEQ ID NO: 654223 - DNA, 829 bp, Homo sapiens
  misc_feature (4)..(4): n is a, c, g, or t
  misc_feature (85)..(85): n is a, c, g, or t
  misc_feature (91)..(91): n is a, c, g, or t
  misc_feature (100)..(100): n is a, c, g, or t
  misc_feature (103)..(103): n is a, c, g, or t
  misc_feature (106)..(106): n is a, c, g, or t
  misc_feature (118)..(118): n is a, c, g, or t
  misc_feature (138)..(138): n is a, c, g, or t
  misc_feature (143)..(143): n is a, c, g, or t
  misc_feature (146)..(146): n is a, c, g, or t
  misc_feature (151)..(151): n is a, c, g, or t
  misc_feature (175)..(175): n is a, c, g, or t
  misc_feature (188)..(188): n is a, c, g, or t
  misc_feature (192)..(193): n is a, c, g, or t
  misc_feature (201)..(201): n is a, c, g, or t
  misc_feature (265)..(267): n is a, c, g, or t
  misc_feature (271)..(272): n is a, c, g, or t
  misc_feature (276)..(276): n is a, c, g, or t
  misc_feature (303)..(303): n is a, c, g, or t
  misc_feature (312)..(312): n is a, c, g, or t
  misc_feature (323)..(323): n is a, c, g, or t
  misc_feature (333)..(333): n is a, c, g, or t
  misc_feature (342)..(342): n is a, c, g, or t
  misc_feature (345)..(345): n is a, c, g, or t
  misc_feature (355)..(355): n is a, c, g, or t
  misc_feature (375)..(375): n is a, c, g, or t
  misc_feature (402)..(402): n is a, c, g, or t
  misc_feature (408)..(408): n is a, c, g, or t
  misc_feature (428)..(428): n is a, c, g, or t
  misc_feature (434)..(435): n is a, c, g, or t
  misc_feature (471)..(471): n is a, c, g, or t
  misc_feature (474)..(474): n is a, c, g, or t
  misc_feature (496)..(496): n is a, c, g, or t
  misc_feature (502)..(502): n is a, c, g, or t
  misc_feature (520)..(520): n is a, c, g, or t
  misc_feature (528)..(528): n is a, c, g, or t
  misc_feature (717)..(717): n is a, c, g, or t
  misc_feature (752)..(752): n is a, c, g, or t
  misc_feature (806)..(806): n is a, c, g, or t
cggnctgtgcattatcttgcaaccccaatgcccagtataataaacgattaagagaaaaaagtgattgggattattcctgattcanacagcnatgattacngcngcngtatcacctganatgaaaatggttaccaagcncaccnctnaagtnggaacagtaatttaaatgtaaaanaattatgaatggnatgnntcccccanacttttctactatagtgttagacctcttttgttgtaattatatattcattacatcagtcttatnnncccnnttcntttttagagaccaagtctcactatgtngtctaggcnagacttgaacncttgatttcnagtgatccnccngccttggccncccgtgtagctgggcctgcnggcatatcccattgcgcctggcacatnacattnatttttaagagtcgcagagnatttcnncataatatgggtaataatctgtttaaataattcacnatnttgggcattcatgtcgatttcnactttngccattatacacaaagcngtgatgcntgccggtatatctttgggaatgtctatcacttttagaattaaattctttagaagacaaatttctggtcaagggtatggcagagactactaggtatccaccaaattctgttttctccttcctacacatatggctgccctaccgatcaacatttcccagccttccatgcagataggtggtgtgcccatgtnactacatttttaccaataggatattagtggaaganatgcatgccatttctaggccagatccttacaacactggtcataactcctctgtnttatttttcctcttcttgccagc

SEQ ID NO: 654224 - DNA, 364 bp, Homo sapiens
  misc_feature (259)..(259): n is a, c, g, or t
  misc_feature (267)..(267): n is a, c, g, or t
  misc_feature (358)..(358): n is a, c, g, or t
gacagagtctcactgtctcccatgctggagtgcagtggtgtaatctcggctcactgcatcctctgccttctggcttcacacaattctgcctcagcctcccaagtagctgggactgcaggtgcccgccaccacacccggctaatgttttgtatttttagtagagacggggtttcactgtgttagccaggatggtctcgatctcctgacctcgtgatccgcccacctcggcctccccaagtgctgggattacaggcgtganagccgcgncccgacatctgtagacatatttattacccagcatttaccatggcagttgtggactttttaaaatcacttatattaggcacttagttgtttncctgcc

SEQ ID NO: 654225 - DNA, 426 bp, Homo sapiens
tcccagcctcccaaagtaactgtaggtgtaactctcaaggtcacatctgaggtcgagtcaggcctggtcatgtaatgtaaatgccaaacaaaatcctaggtgattttaacacatggccaaagttgagagtggtgttaaggccctccaacaacatacaaggaactagagggaagtgtttttaaacactaaaatgaaaagaactcaccgggcgcggtgggtcacgcctgtaattccagcacttttagaggccgaggtgggcggatcacttgaggtcaggagttagaaaccagcctggtcaacatgaagaaaccccatctctactaaaaatacaaaaaattagccaagtgcggtggcggatgcttgtaatcccagatatgcgggaggctgatacatgagaatcgcttgaacttgggaggctgaggaggc

SEQ ID NO: 654226 - DNA, 155 bp, Homo sapiens
gactccctccagtgattggtagatgcccttgttacctgttcttgtcggactccttggactggtagctccatctaccttaacacttcagcgacactgagagcacagtgatctcacatctccatcgaagactggacggggacacctgcgtatcctca

SEQ ID NO: 654227 - DNA, 181 bp, Homo sapiens
ggatatttggaggtcgggtaaacaaagacatttgctcctgaagaaatttctgccatggttctaagtaaaatagacgaaacccttgaaggcttatttcgggaaagaagggttacccatgctagttgttactttgaccatcctattttcaatgatgcccaacggccaaggcaaccataggacg

SEQ ID NO: 654228 - DNA, 373 bp, Homo sapiens
  misc_feature (33)..(33): n is a, c, g, or t
gcgactttcctccccgtcctcctccattgggcntttcatgggcgtaatggcataggtggtgcttggtgggatctgaacggtgtagtccactgggttttcgttctttggtttcttgtgcatcttggaaggcacattgtccatgcctaggactttatgcagctggccggagtcatcgatccgcagtgcgtaatgcgcactctgtgtcagatctttccgatactgtgtgtgtagatgccctatagcatgagcggcttatttttcgcatgggtcagagctgacagtaccgtgtgacatccccacgtcatgttgccatactatctggcactcaaacagggtctctagggtcacggggggtcctctagagtctccctgg

SEQ ID NO: 654229 - DNA, 699 bp, Homo sapiens
  misc_feature (1)..(1): n is a, c, g, or t
nactgggtcttttgcaaattagggatgattatgctaatctcactcccaggatatagtgagacacaagtttttgtgaagatctgacagagggaaagttctcatttccgtactattcatgctatttggtcaaggcctgagagcaccccgggaccagaatatcttgcgcccgagcaccagtacctagatattaaaaaatactgtggacaagtatcttgaggatgtaggttcttttgaatacactcgtataccccttaagagcttggagcttaagcctataacagattgatgcacgtggtggggacctgagctagtagccctagtaaacacttaagtaagatgttccaagaagaaatggataatgttaagccattcttgattggacctcatagcttattttagttaatcttttttttgtcttttagccggtgaccacctggttgaaaaaatttgttattctcccgagaccagtaaataggtgagtaggggtggtgcaagtgaattcgttttcatttagagagccccctctgtaccagataatccaaattcaaagattgaaaggaatcacaaagccagccccagtttatgtaggtcttgatttgaatgtcataattgcagtgacaggacattgccccccactttatcctactaccatcaatgttgtgtttattccgtccaattaaaaagacttgcttcccggga

SEQ ID NO: 654230 - DNA, 315 bp, Homo sapiens
ttaacctgaaaactagttcaggccatgatgggaaaggggaggtcagacatgtctcattataccttcctcccttttggaattcagaaaaacctgaccagcattaacaccaatacagatcttaagtctaatagaagagactctttcaatcgtgataagaaacatttacaatctagtctctcagaagcctgatatcttgacggtttcatctacttaataaacccttggtctccacaaccccttatcttaaccgagggattcctttctattgatcggaagcctttagacaattacttaactctcccaatagcgaatctg

SEQ ID NO: 654231 - DNA, 1267 bp, Homo sapiens
  misc_feature (916)..(916): n is a, c, g, or t
aaaggttgtcaacagagtgtaaagagtggcgccacttgggaaaagccggaagaaaacgtgcggggtcacaaagaaaaagagcaaagtcccgggcacccttagaaggccccccggcgccccttgtattttcctttaagcacccagggacccggcaaacaaggggaaaaaatgcgccaaaagaaacagtggaatttttagggcgcccccgcaacacagcgccacaaggggacacccgacgtgcccacaaatggggaattggggcccctcccctcccactggggtccatagaacccttcttcaagggcccctggacaaggcccaaatgttttcgggtttttttttctctgttggtgttaaaagactggcgcccctgcccttcctctcgggaaagaatgtgagagtttttcttgaaggacccacggtgttaatccagagttccagagggacatttggcacccaagaggaattcccagatgttcttggccttttttgtctcctcttgggaccccccaaacctgcccctgggggaaaagaggttctctctcgcctgttcacacaattggcttggcgctctcttaagagggacaccagaacaccaggtggacccccccagagtataagccatttcccaccccgaataccccagaggctgggcgtctttgccaccttaagaagaaaaaatttgcgcacattaaaatggaaattttcgtgtctcccacagaggaacatgagccccccttgttccagaccgtggagacccctgggggacatgtgttctcccaaaagaccccagatgtgaaatagttgtaagaggataagatgggggctctcttctctggggcggagatagcttctcccctcagccttctcagaagaggagagctcttatacccctgcgtcccctgtcttttggctntgaaggggctcttgggagaacaaaaacttggcaaccttttttctgtggtggagatctttgccaccaatttcttgaatcaagagagggtggacaccgaaacactttcccccgaggctcttggcctttgcacatttaatttaaacacagtgccttgctcggcgcccacccacccccctcaaagccccacagcacagccctcacacacacggccccgggagagggaaagtgtgaggcgccttggtatgacttataaaattggaaatgtcatctaacccttaagtcacagtgtgaacaccactaaggaacgtgtgtaaaaaagtacacatttgtctttttataaaaagtaaattg

SEQ ID NO: 654232 - DNA, 160 bp, Homo sapiens
taggaatgggaggatgctatgctcgtatgtttctcgctggaatatctgcgctcgtcctcttgctcatccacatttttggaatatgccaaaccccagtcaaatgtccgctacctcctccagggagctcccagtcagaatggttctctctcccgagcaccag

SEQ ID NO: 654233 - DNA, 109 bp, Homo sapiens
gcggccgcctactactactactactgctcgaattcaatcttctaacgatgtacggggacatgccactacactaatgcctggcgacagagcgagacttggttccaaaaaa

SEQ ID NO: 654234 - DNA, 293 bp, Homo sapiens
  misc_feature (5)..(5): n is a, c, g, or t
  misc_feature (122)..(122): n is a, c, g, or t
cgtantgtcgagagcagagactggcactatcgaaagagtctggctcagcatatcattccaagctcctccttacaagagagagcaagcacgggaatcctttgcactgtgcatgctcctgctgntttaaaccctatcttgtctccagttttccagaagaaatctctaatggcccgcagcattattatagctaccgggaaggtggcatgtacatgtctcttttccacgtagagttcttacataaaatctgatcctgccatcattgctatcatactggcttaatagacattagtaag

SEQ ID NO: 654235 - DNA, 860 bp, Homo sapiens
  misc_feature (494)..(494): n is a, c, g, or t
tctaaaatgacaggaatggtacgcttggacccttacctctgctacagtgggttagatacaaatgacgatagtaacattcatagaaagagaggtgtttcacagtatttgtctgatattagaaaactccaagagagggcaaatcctggtttctgatcccagaatacagatgacatattgattgtaggcacatgatgtgaatatacagtgaaggagtggtggcttgaggaatttgttgcagaagtttcttggcttgtgttttaaggctgaggagtggaaaacattcctgtgtgaaccatctagagagacttgtggcaggggtagatttctttggcatttgcgcaccggagtccgaaaccaatgatgtccatagcatttggctgggctaacgtctaaagtcgttagctttagacgagtatgagctctcactctgtgttacctggtgaggtccctgtagggcattgttgagttccagtcctgaaacagagccactgagnccgtgtcacagatcccaggttcgctaagctcaggtttagccatgttatggtttatccgtttctccaaggtccattccacaaactctcatatagatacgaattaatttcagcgtacacacatgggggtcctctattcttcagatacctaagttgtcatatctggggccgggagacccttaaaatattggagccaaaaatactgcagaccgtgtatctaacttttcaatctccttttcttcttacagtccagagcttttagcctccccattcattcttccaggcctcctccaatagcacccttagcgcgggctgaaagcacttcttcagtatcgtcaaccaattccttgagcgcagcaccactccaag

SEQ ID NO: 654236 - DNA, 164 bp, Homo sapiens
taaaccaaccaaaaccctggggggtatccttaaaaaagtggcttaaaggatttggttttaaaaggaaaggtaaaagaaatgtgccagcccccaatgtcccattaaaattttccaaataagggaactaagcccctggggtattaaatttagtccttttttttcca

SEQ ID NO: 654237 - DNA, 223 bp, Homo sapiens
aattttcatgcagtcacttaccaattttttctttcatgaatcatgcttttggtatgtatttaaaaagtcattgccaaactgaaggtcatctagatttttcttctatgttatcttctaaaagtttagtagttttgcattttacatttaggcttattaccaattttgagttaatttttgtgaggggtgtaaagtctgcatctatattcttttttttttttttttt

SEQ ID NO: 654238 - DNA, 667 bp, Homo sapiens
aaggcaaagttggcaaactgtggcccccccactgtcatatttgttaataaaattttattggaacacaatcaaaaaaaaaaaaaaaaaaaaaacccacgcttccgtgcttcaacttgggggtaaccctgattctctggctggggcgggcgcgttggcccgccgcactcgctgtggtttcgaacccggcgggggtggtgggggcccgggcccattatgggccggggaaagccgggccccggtattcccgaattgggggaagccgggaagggacggggaagctgcaggaggtggagagtgtcccgggtttctcccgggggccctcaagtttgaaagcaagggcctccgtgccccgggcgctccaagggcgggccccttgtggcgccgggtgtccttgccggtgtgtgccgcagcgggcccttgtgttccttctacccccgtggtaccgggcgcgcacgcgtcgggtgtccagccgtcccctggggaccagctgggtcccttctaattaaggggacgtattccatcgactcaggttacagaagagtccgggcattgcttatacagggcagggaaattggtcctagggtgtaacgcttcggggtgtccggagcagctcttaagccgggcaaatgtggccggtgttgcccttggcaatccaaggagaacaggg

SEQ ID NO: 654239 - DNA, 308 bp, Homo sapiens
  misc_feature (25)..(25): n is a, c, g, or t
  misc_feature (231)..(231): n is a, c, g, or t
  misc_feature (248)..(248): n is a, c, g, or t
  misc_feature (265)..(265): n is a, c, g, or t
cattttagaaattatgagggttttnccccaatagaggttttaatgtgagttttgcaaaaaggctagacagctaattcgtctctcaaacaacactgagaactgtggatttctgaaagaagtgaccccagattcactcacttaaccacttctagctcttaagtaacttaaaattgacaaagtacggtatcaaaatgtgaacagtagcagatagtaagatattttatgaatgancttggtagaaggtaganaaaatattccattagancatcttctcctttagcaaaattatactgtttattatactaaat

SEQ ID NO: 654240 - DNA, 1093 bp, Homo sapiens
agcggtcctgtcttccccagcatggtcaatgggctgcctgaccactatcacacgggcctggccttcagcagctcttccgaggtgggggtatttttacgcttcctactccaatcagtgaaccgctttccacatcactcgtctttgccagagcttccacgccactttttgggaagggagcagggacccagaccaccaggccgttctcctctaagcatttagggagaaatgaagtctacataaaagtgctccccgccttaaaaaaaaaaaaaaacaaaacaaaaaacaaagggcggcccatacccgaaagtgtgtaagttctccggggcgagatatttcccagtgggactttttcccaaaaaaggggtcaacatttgtggacccttaaaactttaagaggctttccataaagaacttcccattattcccgcggtccgctttgggagccatggtgttatcatataaaaccgcgtggaattctcttaaggcctttgcccctaggcgtgggtcctaacagtattccttaagcattttcccttcgtggggctctcaccacattagccatttgggcccgtaaaataatttccactcccccataactggcgaagggggcgggcatactctctcgggctgcagaacaaccttttatagcctttcacacggcgttcatcccagaatgggctcttaagccaccttttttcaacccaactaggaccttttccaccattgctatctgttccaacaccaccggggggtccccccctgtgtggcccccagggcgtggggaagatgccccaggggagcccaacaagggagaaatccctggtggccatcacaggccccccctcgaggattggtgccggcgcccccaccggggcgtggccatccaacagacgcccgggggggcgacaactttctaacaagtttttggtcgtcacaacgacgggggctcgtcgccccaatattgggcgccaggggttggtcgccacaaaagctgcggggaacacaagacgaggcccctccgggtataaggcccccccccaacgggtgggcgaaaacgccgaggcccccacagagagggcccgataccccacgt

SEQ ID NO: 654241 - DNA, 343 bp, Homo sapiens
  misc_feature (30)..(30): n is a, c, g, or t
tgattttttaaaatgtattctgatacacanaatatataagaatgaaaaataaaaaatttggccgggcgcagtggctcatgcctgtaatcccagcactttgggagactgaggcaggtggatcacctgaggtcagcagtttgagaccagcctgaccatcatggtgaaacccccatctctactaaaaatacaaaaattaagctgtgtgtgatggtgcacacctgcaatcccaggtactcaggaggcttatgcgggagaatcgcttgaacctgggaggcggaggttgcagtgagccgagatcgggtcactgcactccagcctgggcgacagagtgagattccatctc

SEQ ID NO: 654242 - DNA, 686 bp, Homo sapiens
agaggcataaattcaaactctccagaggcctctaccctttggtcgcaagccgttaccggggtctttgccatcggccgggggtttgttgaagtgtcataagagtccctttaggaccctgtgatgcctcaggtttgagaatacaccatactgggggtctcagataccgaccttgggaacccccatgagtgtctcccatagtgctcccggcggcactttattcgtaaagaagctgcttcccaatcttgcagagttgtagccaggagttattgaacacccatagacagatggatttcctccgtcgcagtaaagattcagctttaggagcaaattcacccctgtgacctgggcttagcaatctgtggtgtctgggaggccacgtacgagagccctcgccttccaccggtcatggctcagggtcgtgcacagagcctgcctgtgtacaggttactccagcagccgtcagctccgttaagctctgcccacacagttgcgagtccagcatcatgacatgtgtcaagttcctgtcagtcatgtgccaccccccattcgatgtggtcagcctcaaatagcctgaaaattcagagtcagcatctcctcagcagctttccttccttcatggagtttttatttcagaacaagggttctgattcccccacagcgcttaaagtgataaatctataattaca

SEQ ID NO: 654243 - DNA, 113 bp, Homo sapiens
cgaacgcggccggaaacttgcgccatggcccgatgaagccaaggcctcaccaatgagcacaatccgacggtcaaggcctatgcggtcgtgcagttgcgtcaggataatgcgct

SEQ ID NO: 654244 - DNA, 533 bp, Homo sapiens
tagagatccagacacctctcttctggtataggaacaattgccttttccgtaaggatcatctcaatgtggcagagaggagctcatgtataggtaaatccgaccatgagctctgtaggtccggcggcgcatcttaggtgctatagttcaacttggatatagctcaatgaccagagaatctacatctaaacccttaagttcagcattactctcagcgttattaagcatgtgcagcaaaaattaagcactctttttgggccaccgaccttgtattcagccccattgcttggcctgcgcacacctgccaactccaccattgtaacgtcggaatggtacacactgtttctgtaaagtgacatctttcagataacttcgtggcttttcgtatattcatacccttgatggcctgagcagtttcacgagtgttcttaaagtgaacacgaagattggaacctcttgatttgcatgatttcgaggggttctccgggtcaagtgaatagcgaaccattttcacagatcacctcaggctgcttagg

SEQ ID NO: 654245 - DNA, 110 bp, Homo sapiens
gtagattgatttagacacactgaggaacggtactatttaatatcatctttaaaaatggaaatagccttaatgatatatactatgaagttattacctatttacagtaaata

SEQ ID NO: 654246 - DNA, 825 bp, Homo sapiens
  misc_feature (498)..(498): n is a, c, g, or t
gacttgttgtcgtgttcgcgtcacacaccaactgtgggtggactcgcctcttttcccgccgctttgtttccgtagctttttcggtggcggggcggggtttttccccgcgcctgccgcgtgtgtgtggtattcgtgacacctggcactcctcgggggtgttggctactcccccgtcgtggtcttcctcacgggtggtttgaggaatactaccagggtgggttgaccatctttcggtccgcgcggcatcccctctgtggtttggtgaagcaccccgtgtctctcgtcggtggttatatagtcggcccgccggtgtcccgggggggctagatggggccgccgccatggtgtcgcttgtgttgcccttctcgccccccgtggggggggagaccctttgcggcgcgtttgcctgcctgttgtgggtggtggttttccccgaaagacggcgttggttgcggtggtaacaacttcgttctcgtgacacagaagatttgtctgtgnggagatcaccacccatgtctcatgtttttcttgggggtaaacaacgtcaatggttcggtgattggagtgtggcgtaatatatatagcgcaaggtgtattatgttttatccgtcttaagtaaaccctccatccgtcgttgggccaccgtgggggtgaccccggcgtgggggccccacaacaattggggccgccccgcggagagggggaggtagatgatctcttagagagaccttcttgggtgtgtaagaacacgcctctcgggccaatgtgttcaaatccccccccaccaacaggccagcaatccctgaacccgacccacaaagacga

SEQ ID NO: 654247 - DNA, 778 bp, Homo sapiens
ggacgcgtgggagtcggtggatttacctgcttcaataggtgcttgtgacggtaatcccggcgctcgttccccaccccggacggtcgcccatagccagccctccgtcacctcttcagcgaccctctcgactggcccaagagccccgaccttgccacgtctccagcgccgaggcgaggcaccggcgcagacgacgcctctccttagtcgccgccatgagtgaccgtgtccactctctgacgatggtgcgccagaactacacactcgaggatctcagaggccgccatcaatcgaacagatcaacctggagctctacgctctcctacgtaaacctgtccatgtcttagtacttgagaccgcgatgatgtggttttgaggaactttgccaactactttcttcaccaatctcatgacggagcacggcgaacattgctgagaacccctgatgaagcatgcagcaaaccaacgatggttggcccgaatcttcctttcaggatatccaagacaacccagacctgtgatagacttgggcagagctgggctgaaattgccacatggagtgtagcgataaacatttgggacacacaaaatgtgaaatcaagtcacttactggaactgcaccacatcttggcctactgtacataaaaatgacctcccatattgtgtgacttcatttgagacacattacccttgaatgagcacggtgaaacgccatcaacagaagtagcggtgaccactgtgacccaaacttggcgcaacgataggcagcgccacgaaatcg

SEQ ID NO: 654248 - DNA, 608 bp, Homo sapiens
caaattcaatctatgtttcagaaagatgattaggtggaactttaacaaacaaaaaaacaattttatctagactaaaacaaatgcaagaattagaagaacatgctgaaaataacttcagtaattacaccaaaaaagaaggtgtattgatgtctaaaaagcttgctaagttacaaaaaaacctaaatggtattagaggattaaaattcataaataatgataaattaattatgttagtagcagatccaaataaagatattattgctattaaagaagctaaaaaagcaaaagtaaaagtaataggaattatggactctaacaccgatcctgctttattagattttggaattccagcaaatgatgattctgtaaaatcaattacattaatttttacagttttagcagatgctattgctacagctaaaggcggaaaagctttatttgcttaccaaccaacagaaaatatagttcttccagaagttcctgataaagaacacaaagcattaaataaatttagaaaagtaagtgcagaagttcaaaatcaagtacatcacaaaagttttgtggctaaagcaaaaccagaagtaacttctcaacaaaaagaagaaaat

SEQ ID NO: 654249 - DNA, 141 bp, Homo sapiens
cagggctcagcagagcgttagaggtgaccccacctgggcccccacccgggaacagtgtcgtgtgctgggtgaatcattagagcatgttcttggaacatggaataaaataagttgaaataaagcttatgacatcctttaata

SEQ ID NO: 654250 - DNA, 726 bp, Homo sapiens
  misc_feature (290)..(290): n is a, c, g, or t
  misc_feature (317)..(317): n is a, c, g, or t
  misc_feature (341)..(341): n is a, c, g, or t
atgttcaaactagagactgtgaaagataaaccccaataggagcccaccacctggacggggtacttcgtgaaagtgctcatggcctccaccagctacctgccttcccaagtgacagaaatgttcaaccagggcagagccttcgccacggtccgcctgccattctgcggccacaaaaacatctgctcgctagccacaattcagaagatcccgcggttgttggtgggtgccgccgacgggtacctgtacatgtacaacctggacccccaggaggagcggcgaagtgtgccctngatgaagcaagcaccggtctgtgacgngcagtcatggaaacgaccaatagnagattcttggacttctgccctcttcacgactagcgcccctatagatcactacagaacaatacgtgcgtcatgctgcaaggaaaaagccctaccacaagacgactctggtgtgtctagtgaggtgggcgccctgtcctaggagagacagagagccaggcgcccctgcgctctggaatgaaggacaagcgaggcacccgccacatagatttcttcgagacatgactagaaccttagacactgttgaccctcttgaacccggaggaagcaagagtaacacttggtcttctacagaaggacatttgtgcatatgactagctaatgacacttctgaccctgagtcgtggggaggatgagatgtgcaagagagcttctattaaaagaaaca

SEQ ID NO: 654251 - DNA, 115 bp, Homo sapiens
cactgtaaagctggaaaggaacgaactggtgtaatgatatgacaataatatacctaagaggtaagaaactaagttatattggcagaaatgaatacaaaaaccactatagctgggc

SEQ ID NO: 654252 - DNA, 293 bp, Homo sapiens
  misc_feature (23)..(24): n is a, c, g, or t
  misc_feature (41)..(41): n is a, c, g, or t
  misc_feature (146)..(146): n is a, c, g, or t
  misc_feature (154)..(154): n is a, c, g, or t
  misc_feature (218)..(218): n is a, c, g, or t
  misc_feature (226)..(226): n is a, c, g, or t
  misc_feature (276)..(276): n is a, c, g, or t
ttgctgctggtagaatcagggtnntaaaaaaacccccgcgngcccaaagtgccagtctgcgattggaaatttccagccactttaagccagtgctgagtagggcttctgcagagccatgtttgagccaaggtcttggaaggcattgncccatggntcaaggtgactcggggtggagtgagcacgtctgcagggccctatcatacacgcctgaggcagangcagcgtncccccgtgaaaagccaaccttcccgaagctcctgcgtttttttgcaaaanttgggtttccccccagg

SEQ ID NO: 654253 - DNA, 1124 bp, Homo sapiens
  misc_feature (392)..(392): n is a, c, g, or t
ggtgtgcttgttccctcgttcctccctcttccctgtgcctctgtattctcgctgtccctgctctaatagtaccttctcatctggctctttaatattgactcagcgcctgctttcgtacacgtgctcgtctcacgcgtgctcagctctatacatgcaacgccacgcttgcataggcccttctaagaagctcttgctaatgtgcatacattgtcgtcataccattatggcacgtctatagtcactactcagagaactcttatacagtactctccgcaatatgcggcatggaactgcgtagttcctccaatagacctattaatcttgactataccgtcatgttctgaccagctcactacaccctagcatatttttttacctcatatctcctcacntgtgtacatcatactatattgtggagatccgctacacaccacaatgcgaccgcacatggtcgccgaattcccccgtgtgttgccctcttgttacaccagtctttcttcaatcactcttgccatatcgcaccgatactatatgcgcacccgaagcaaaatataacgcaaagaccttcctcgagactgggaggtctgcccagcaaatcttttggtttttgaacagagccgtaaaaaaacaacaaggtggctcaagggttttggcttcatgtggtcaatggttgagggacggcgtgttccccaagcgagacctcataggggcttatctaaccagatgaagaccccatctcctggggaagaaatccaaacagctcgcgaacgctaaagtccaaggacctggaagtggagcttaacgatgctcatcggagctccttcagtgccttgaactacccggccctgaaatcagggagacccttgcttggattaatccattcaaccagaactggcttggttggacacgggtccgttgggaaggatttgaccgcagaccgcagggtacacccccgaccagctaggggagaatgcaaggcttgtcttggggctttccctgggctggggggccagacaatcgaaaaggcaggagaaacttgtctccgtcttcccaggaattagtctccaggttgtggttggaaccgtccaaaaatcctggactaattgatgaagtgcgacgaaaag

SEQ ID NO: 654254 - DNA, 107 bp, Homo sapiens
ctttgtcatcaaagctccatgagagcctctacagcaacactggcaggatcagcaaaagaatggcctctagagctaactgagcctgacgtcagtacctgctggcagat

SEQ ID NO: 654255 - DNA, 115 bp, Homo sapiens
gccaacactactgtgctgctattgcagtgaggacacactgatgttctaaggcctgaggctccttccattcactgaccagagctttgggggctgccattgggcggctgccattggg

SEQ ID NO: 654256 - DNA, 711 bp, Homo sapiens
taaaacccccctccaaaaaagggaaacataaaaaaatatcaacccctcttttaaaaaaggccaatttacaggggggggtttacaaacccacaagtgttttttgggtttataaaggagaatattatttagtgtgcggcgggatacaaccatctattctagttgaggcagacattgttacacccccccataactgagacatgtagaacctccggggggcaacgcctttgttcttgttcaccacaaatatatgtattggcacgccgtgaaatatcgccgcgccggaattatggtgtagaaggagagaaccctcacgagatgaccctacgtcgacggtgttattagggggggtgtaaacatatagacaaaaccaccccctacaccaaaatattgtgtgtctatatcaaccagccgcgtgtgtctgtaatatatttactttgtggtgtgtcacgagagtgggtgtgttctctcttacttgacagcctctatagtgtgtgtgagcgcgtctcccgtgggtggagtaatgtgagatatcatctcctcctgtgtagtggggcgagaactagtaacactacacacggagtatgtgttgtgtgttcaacgagagagtgtgggcggatgctcttctctcgtggggagtggtattttcacgcggggggtgatgagtcgctcctcctgtgtgtgcgggggcgcgcccaagtgggctccacatta

SEQ ID NO: 654257 - DNA, 265 bp, Homo sapiens
aaaagagcaggcatccgataaacctccatctctgagaaggtgctggcctcagagaagacatctctatcagagaagatagcagtgtcagagaaaagaaacagctcagcagcaagcaagtctgttctagcaacaaaaccagtgtctctgcagcaagtcgctaggccccaagtggcatggcacttgggctccaggaaaggcaggcttggttgtcttgagcaaagcttccgatcatctttgcagcaaggccacttggcctccagagcaa

SEQ ID NO: 654258 - DNA, 563 bp, Homo sapiens
gtcgtgtgggctccgtgcttgcgtgcggagatgagctgggtccctcggcctgagctgcggcggctctgctccgctgggtgtgcgctggcgcggtgcggctgtgtggcctattggggtcctgggctgttgctggtgccggctggtgctctgtggctgctgtggctgtgcaggcgagctcaggacgagaagacagtttagagacctgcgctagggtgaaaggacatggcacaaagggttagtgataggtacatatcgcgtacaacatgtggtgagaaacaggcccagagacggcgaagaagcgcacaaagattggcggaggccttatacatgggacgaaacgcaggcgccctggttggtgataggcccaaaggcaatttaccccttttgaccaggttgagtccatttaggcacacatatgggggcacgaggataccgcctgccgaggcaacttttagaaaccggagtcctggctgccctcgtgaaacccagaagcagggatatagcccttaaggggcaaacactggaaaaccccccatgtaggcacaggcgcgtacctcctgcaa

SEQ ID NO: 654259 - DNA, 473 bp, Homo sapiens
  misc_feature (76)..(76): n is a, c, g, or t
  misc_feature (79)..(80): n is a, c, g, or t
  misc_feature (86)..(86): n is a, c, g, or t
  misc_feature (137)..(138): n is a, c, g, or t
  misc_feature (172)..(172): n is a, c, g, or t
  misc_feature (174)..(174): n is a, c, g, or t
  misc_feature (298)..(298): n is a, c, g, or t
  misc_feature (301)..(301): n is a, c, g, or t
gttgaatctagaaccgtagccagacatgggactggaggacgagcaaaagatgcttaccgaatccggagatcctganctnnaggaanaggaagaggaggaattagtggatcccctaacaacagtgagagagcaatgcnngcagttggagaaatgtgtaaaggcccgggagcgncnagatctctgtgatgagcgtgtatcctctcgatcacatacagaagaggattgcaccggagggagctcttggacttccttggcatgcgaggggaccatttgcggttggcccacaaacttctttaancanctttgagaataaatggtggtggaccttaatttcacccccagtcttccatcatctgggcatcagaatatttccttatggttttggatgtaccatttggtttcttatttgtgtaactgtaagttcacatgaacctcatgggtttggcttaggctggtagcttctatgtaattcg

SEQ ID NO: 654260 - DNA, 747 bp, Homo sapiens
ggtgctcgatcaagccttgccaggagggaggcgtcttccctcgggctcggggggccacctcggtaccgacgcgggtccggggtctcagcagcaagcgtcccgtgcgcggggctcttgtggttcttgggcgccgggatcccggcccccgcaaggcgcgctcggcccggctccggcctgcgggcggcaagttttctccagcgagtgggacgagaggttggaggaggttcggagctgaaggtcctgcaggatgcggagcgtgtgcttgttgggccagcccgcgtcgccggcggcggaggaggcggccgggggctccccggggcggccccgaacctgggcccagccgggcgcggccacctcggcggcgggctgcgcgcacgaacagccgggctcccccgagggccgcgcgccgcgtcgctccagcctgggcagcaggtccagggcgatgtgcagcgcgcaggccaccaggaacaccatcaggatgagcacgcggaaccggcgcaccagcatcatcttcatggccgcgcgggccggcccgggcctggagcgcgttctgcccgcgcgcccctctagctgcagctgggcacgagcgcggcgccgcctcgcgggtcaaggtccatcggtgccgggcggctaccagctccggggctgtccccgggcccgggccgcgtgcagggcgcccgccgccggagcgctgggtccccgcgccatctcgggcccgtccccgctcggcctctccggagcggccgc

SEQ ID NO: 654261 - DNA, 505 bp, Homo sapiens
tggtgtaaagtggcgcgctcagctaaagacagatggggccgcgccacagaccgacattaactgtgtcaggtgcctaatggccaaacacttttatcctacgtcataccatttacatcatctgatctaaaaagcctgttatttacagataacgctcataatgtaacacaggttaggcaacttgtccaaaagtcacatggccagctacgatatccagtactgttggacaccaaaggttcagtatctatccataaagaggtgatacagagtgtgtacagtcagtagtatggctgatgcttgagggggtggttaagaaaaacccagactaggaaatcacttggtgcacaccattgaaagcccttgaatgccagggaggcagaatactacttctctgcccctaagtacccttccatataatgggttccttgtgcaggcataaaatgagataacccgtgttgtcaactataatataccaagattaggttttaaggataatgaatagcctatg

SEQ ID NO: 654262 - DNA, 127 bp, Homo sapiens
cgatcgagagcatcctgggctcacacggtgacatcccgtctcatactaaaaataaaaaaaaattacgctagcatgtggatggcggtgacgcctgtaagtcccagactccatagagaggctagaggca

SEQ ID NO: 654263 - DNA, 368 bp, Homo sapiens
  misc_feature (123)..(123): n is a, c, g, or t
cccataggtggaagggacttgcccctgtctcggatgagactttgggacttgggactgtggactttttgagtaacacttaaaaataattaatgctgaaatgaattaagactttgggagacggtngagaagccatgactcattttaaaatgtgagacatgcctttcaccttctgccatgattgtgaggcctctccagccatgtggaactgtgaacacacagtgttcatcccctcaggaggacacagcttttgaggtaccatcttggaagcagagaccagccctcactagacacaaacttcctggcacgttgattttggacttcatagcctctagaactgtgagaaataaatttttattatttataaatta

SEQ ID NO: 654264 - DNA, 728 bp, Homo sapiens
  misc_feature (655)..(655): n is a, c, g, or t
  misc_feature (662)..(662): n is a, c, g, or t
tgcagtggctcatgcctgtaatcctagcactttgggaggctgaggcgggcggatcatgaggtcaagaaatcgagaccatcctggccaacatggtgaagccccgtatctactaaaaacacaaaaattagccaggcatggcggtggcagacgcctgtagtcccagctaatttttgtatttttagtagagacagggtttcatcatattgctcagactggtcttgaactccagacatcaggtgatccactcgccttggccccccaaagtgctgagattacaggtgtgagccaccacatccagcctatttatttatttttgaaacagggtcttgttctgtcacccaggctggagcacagtggctccatcacagctcatggttcactgcagcctcaaactcccaggctcaatcaatcttcccacctcagcctcccaactaactgggactacagggacatgccaccatgcccagcattttttcttgtaagcaaagatggggtcttgttgtgttgaccaggctggtctcaagctcctgggctcaagtgatcctcttgcctaggcctcccaaagtgctgggaatacaggtgtaagccaccacgcccagcctttagtctcattatttctcttctgatttctagaacttgcttcataggtcacttntctaggnaagactcttgattagacccagggcatccaaccttttggctttccttggccacaatggagctgcttg

SEQ ID NO: 654265 - DNA, 806 bp, Homo sapiens
gggagatcccggggtcgcgcgagagccgcaagcggagttggtgggctgctatgctatcacccgaggcagagcgatgtgctgcggtaccttgtagaagtggaggagctcgccgaggaggtgctggcggacaagcggcagattgtggacctggactctaaaaggaatcagaatcgagagggcctgagggccctgctgaaggatctcagctctctctgaagcatgtgatggttctgcttcgggtaacatgtttatcaagatgcctcaccctgagacaaaggaaatgattgacaaagatcaggatcatctggataaagacatagaagaactgctggaagtcgaacttaatagtgaatggtcaaccgccgtttgcgaggcccaaggcaaaccggagctgaagggttttaccgttgaaccccctcaaccaggatgagcttaatacgctctcgagggtcatcttgcaatacggcatgacgactcaagaaccaatgatggggtgaccagcgatctcccagtgtcatggaggacccagtgaccctccaagcttgacacctgtaaggacaggatctgccctgtaaggggccagtcgtcaggaatctggccatgaaaagcctctgtggtagtgcttgggttactctgtgatggcaggagcggaaccttcagccctgtctggggtgctggacctggtacctccagggctcggtggacaccagatctattgacggggccttgggtagccatccagtgggttgttgttggggccgtgggcttgcgggggtgtacggactgactgccacaggcaccttcca

SEQ ID NO: 654266 - DNA, 1252 bp, Homo sapiens
ggtttatctcccgcggcgttgttgagttgtgtacgttcctcttgtggtggttgatattgtggtggcgtgcgttgatagtatcgcctcgctgttggtgatattgaagctgtctgttgtgttgttggcgggttattcgtagttcattcttggtgttgtttcgggggtattttttttgtggggtcacgcccccactttgttttgtgtggttcttggatattgtgtgttgttgctgcgtcgcgcgttttttgtgttcgttgcttgtctggagataggatgtggggggtttttgtctcttgccctggggtctgatgttgttttgtgtattggttttgcgcgcctctatcgtctccgggggggcgacgtattatggtgactgttgttgcttcacttggggtttttgtggactccctcaggtgtgtagtattgtcttatgttgtttttgctctcctgattggtggggcttggtatggggcgcctcttttttgttttgttggcagtgtctgcttgttgctttagggggtttgttggtgttgttaccactggcctctcagtttttcttttcgtttgggcgtgtgctattgtttcccatatgttgggtttctcttacaatgagggggcgggttttgtggctcctctactatgtagagggggcgcttgcttttcgtccgggtttgtccctccctggttttggtgcgggaccccgcctttgggcgcctcacgagtactcgtcccacgacgtatcttgtttgttctctgtcttgataaattttttttgggggggaaaaataaaaaaatttttgtttccccacacaacatttttgtgtggggcttcttccgggagataacccgcgcgcccgttttattgtgggagtgcgccccgcgatgtagataccacccaccctgaaatatcttctctgtttttttttggggcgatttatattttttttattcaccccgcggatatatataataaagaatttttctgttgttgtgtgtgagaagacactctttcttgttttgtagaggcagagaaaattttttatatatatagaagagtagagagacacacccccctaacccgggggggagaaaagaaggagggcgccccccccccctcccgccaccttggagagaaccccccagaacaaaaaaaaatagagagacacacacacaaaagagagagagagagagggcggccccaccccacaccggggttgtacccccccccccgggggccctttttttttttcca

SEQ ID NO: 654267 - DNA, 117 bp, Homo sapiens
  misc_feature (78)..(79): n is a, c, g, or t
gggagggacccacgtgggagcctgggagcgggtggtcgtagctcggtagtccagttgtgggaaatcgtcttagatagnncctgttcgagagagctcggcggatacggctgtctttta

SEQ ID NO: 654268 - DNA, 158 bp, Homo sapiens
agtcaagaaagctgtggaaaggacctgcccacataaaaggataagccaagatggctgtaaagcacagagcatataagctgccacacttggagcacattgactttttcaaacagccagctctgtcagagaaaggaggtgcatgttatgacgcagctctt

SEQ ID NO: 654269 - DNA, 804 bp, Homo sapiens
tcagccttccgaaagcaccgaattttttggtttttaacaattagcaagtttagtcccccctgaaattcgttttcttttactgcatgattttggaatcttgttttcacattgatattttgacataccttataccctgttcctcccagtacccatcttttcccacgggcaacatactgtcacagccgtttatctaatgctcaagggacccgactatgcgtgaccctgtactagttcctttcttagtactgaaggggagacatgttgaaccactgccaccccccctggagtacttcgcgagtttgggcaatactcgagtatatttctcgaggcataaaggctggccttgagcctcacacccggtatagttgcagacacactgcgctatctttaacctggtcctttcctagcctgtaggccacgccatcaccacaacttgcttgtggataaacgagtgctcttcctcgatgacccaggatgagacacgatggctgctacatccacgactggaggacacgcaccccgcaggtatctgaccaaaccccagataactgattagtcttctttaaccatatacattacccttcgcccgcgcgttttcctgcctcctggaacgcctaacaatctagctttaccttcgtctatgttcacacttgtgtcctgtgcaatgtattctttgtggaagatgccatatagatccagagcattgtcaagcccctacttggtgtttaccttttcattgagtctttctcccgtgctgatgtacgttgcatatattaattgaattacttgtttttctccttgtta

SEQ ID NO: 654270 - DNA, 484 bp, Homo sapiens
agatacatcggtgacgagcgtcaaccagaactgcacgttcttgtgtgatagtggctcacgtgacgtgcgtgtagatctccttggatgtcggggggcttattcaggtcctcaaacttactcgggatgtcgctggctgcctcatcatatttgtaggcccctgatgtcctcaggaaagcacatggtcagggcactgtgtgtgatcttctcctcaaacaggtcctacttgtcgaggaagaggatgatggccgtgtctgtgaaccacttgctcgtcgccgatgctctcgactagcttcatgctctcatgcatgcggttcatctcctcgtactcagctagcaccaagtcataggcgctccaggctacgcataagatgatggctgtgacgccctcacagcagtggatccacttcttccgctcagaccgctgaccacccaaatcaaacatcttgaagtgtcggtcctttaaggtgacgtgtgtctccacgat

SEQ ID NO: 654271 - DNA, 124 bp, Homo sapiens
  misc_feature (1)..(1): n is a, c, g, or t
nagcatcatgtctttggaaccacttgagaatctagtttgcgttgatggagggtgttgagtcagcatcagcatctcttccaaattatgtctggtctgttgataatgacagtaaagcaggctctga

SEQ ID NO: 654272 - DNA, 556 bp, Homo sapiens
tcattcatctcactctgctttcaggtacccccatcagtcttacctttctcccttctttcataatcccataattctcagaggttttgttcattccttatcattcttttttcattattattttctacctctcttatttcagaaagatagtcttcaagctctgagattctttcctccacttggtctattctgctattgatacttgtgattgcattgtgaatttctcttgtgtttttcagctccattaggtcagttatgttcctctctaaattggctgttctggctatcagctcctgcattgtgttgttatgattcttagcttctttatattgggttagcacatgctcatttaactcagtaaagttagtgattacccaccttctgaagccttatttctgccaattcatgtatctcagcctcagcccagttgtgttgaaatcaattggaagaggagaagcacactggctttttgagttttcagtgtttttgcatttattccttctcatctttgtgggcttatctacctttgatctttgaggttgctgacctttgagtgggg

SEQ ID NO: 654273 - DNA, 422 bp, Homo sapiens
gaaagcacggtcatctacgcttagacagatgtcctctggaattcccagattcctcttttgatctgtagtgacatatggactagttggttatatgaggatcattataaaacgaacatccagtaatagaatctcatccagattatgcattagaggatctacgactagatgagccatttcctgaactgagagaacattttcagtcctataatttggatcatatggaacaaaaggaccacagtcatactccatggattgtgatcatagctaaactatttagcacagtggtatagtgaaacaaatggacgaatacctgaaacgtataatgaccaagaggacttcagagatttgattagacaaggaattctagaaaatgaaaatggggctccagaagatgaagagaatttgcaagaagcaggaactgg

SEQ ID NO: 654274 - DNA, 185 bp, Homo sapiens
gctcctacactgtaggagtccctgctatgtaccaagcactctgctagggactgggaggtggtggtacagaaaacctgtgtcccaagcccctcatcactgacttcctctatcactaactccaacaacatctttccacctcctataactattatcattcaccctacccactagtgaacacccacaga

SEQ ID NO: 654275 - DNA, 156 bp, Homo sapiens
cagagattggctggagcaagaagaacagctactaccctctgcctccaatctgcagcagtgaccccatggcagacaggaaaacagtagggtggaacgtgaggaaggtgatgcagacttcagcaccctgtggggagccctgtgtacagcccccaataa

SEQ ID NO: 654276 - DNA, 406 bp, Homo sapiens
  misc_feature (341)..(341): n is a, c, g, or t
  misc_feature (366)..(366): n is a, c, g, or t
  misc_feature (378)..(378): n is a, c, g, or t
  misc_feature (402)..(402): n is a, c, g, or t
cctacagaaatagacaaagaaaccaaaatttatatataaggttggtgcaaaagtaattgcgtttttggaccattaattttaaatcactgtaactagactcagacacatctttattaatcaaaataggaaccactgcaatcaacacatttttgccactgagaaataagtttgtttattcctgtagcctaaaaatctatgcttcagggattcgacaaactcttgggaaaatattttctggcatcctgctgggttgtggggaaggcaccttcccctggttaaaaagttgttcaggtgcttggaggtgggtacccggggttggccgagagggtcagggtggaacngggccgggttgaggacggaaactcntgttggtccaantttgttttccggcagctttccggnaggt

SEQ ID NO: 654277 - DNA, 1695 bp, Homo sapiens
gaccccatccgctggctctacacccctcggagacgctcgcccgacagcatagtacttgccgcaccagccaacgcccgcgcgccagccaccatgctatggtaacaagcgactggggctgtaccggactgaccctcgccctgtccctgactcgtgtgcctgggtgcgctggccgacggcgtacccctccaagccggacaacccgggcgaggacagcacacagtcggaggaccatggcccagatactactacggcagctgaagacacctacatcaaccctcatcaccaggcagagatatggaaaacgatcacagcccagcgaccactgaatttcacgacctcttgataacgacgaacgcccctgaaccatgttcccaagaacctcggctatgaccgcactccttgccaaatgtggatgcatgggcacatgaagactcgctctccatggaccttataccgtacttcttcagaccacatatagtcatcgtgtacaacagagaatccacaccatcctaacaatgcatggcagccaactgtgctgcactcctgcaatgttaaccttggtcagcactcggcacacccctgcgcggtgcacataacagcagcccggccatcccgaccgacaccacaaaaacccacacaccacaccacgctcgcgccagcaaccgacaccagactagctagtccaaaaccacaacgacagacagacaagacaccacacagacaaacacccacacgcaaacaaccgatcaccaagacacacacgcgaacagacgagcacccacacacacaagccccgccaacacgcgccacaccccgagtgtgcagatgacgacacaaggacaccgagaaagaacaccgggcaaagacaaacacaacaccgacaccacagctgcaacagaccccatatcccacggccgaacagaagagcaaagaatacagcgcccaacagaacgaccacaagagacaaaccaaaaagaaacaaccaccccacacagcacgagacacaagccagacgcacaacgaccgaacgacaccaacaccacaaccaacagacagcgccccacaccagccaacgcagacacagatcacgcagaaccagccggcacgccagagcggagcgccggccgcgacccgacgaggccagcgccccctgcggcgcaggctgagcacggccgcagcagcgacgagccccgacgcgcagacggagcagctgggtgggagcacggaggggaccaacaggagacgggagagcggcggaggcagacgcggcggagacgcggcaggagggacacgagacggagcgagcggcggcggcgggccgggggagcagcgcgaggacagcacgaggcggcagacggagaggagaggcgagaaggcgccgaaacggagtggctggcgtagagacgagcgggcaggcggggaggagagcgggagcagaggacgagggcgaaggagagcaaggggagagaagaggagcagacggagcaggaggacgacagacagcgcaggcggacacgcagcgggaagatggcgaacaggcggcacgagaagatcgtcggggcggcgccgcaggagcagggtggaatcagagaggagcacaggggcgtagacgcagagagcgagaagcgggaaggcggcggcagagagaaggtggcccacagcgagcgaaaacgcctgacacgaagagcgagacaa

SEQ ID NO: 654278 - DNA, 164 bp, Homo sapiens
gcgggttcctcccttcttccgagcctttcctttggccgccgcgggaagaaaggccgagatggcagatgagattccaagtctcaggtcgtctcggcctggtggcgacacgatctttgggaagatcatcccacaagaatataccacccaaaatcatttttgaggat

SEQ ID NO: 654279 - DNA, 1367 bp, Homo sapiens
  misc_feature (168)..(168): n is a, c, g, or t
  misc_feature (293)..(293): n is a, c, g, or t
  misc_feature (474)..(474): n is a, c, g, or t
  misc_feature (1367)..(1367): n is a, c, g, or t
cccaggcagaagccagcgctcgctgggtgccggtgagaggcacatcctttcaaagttgcatgtcagatggggccataactcggtccgtcaacccaaggtcgtgagtcaagaggtacatgcgtgctacacgagagtgggcacgagatacgcgcctcatctgtgcgccanctagtcaatgtgctgtgaacacacaggaaattcctccagtagagtcttcgatcatggacacaatgcatggtatctcgtgtgtcaatctgtcctcagtgtatgtcatgtgtgcaaggtatcccagntccaggaaggtcgcgtgggtcatgagtggaacgctggtgaccctccatggcggttgtaccctgtttcgcacgcatgcacatcgttgcgtgcatacatggcgctcccagtagtgcctttcatatgcgcatagcaaacgcgcggaagcatcgtacgcgtcccatttggtacgcatggacaccngcgcatatgtgctgccatcctcgatccatgcccgtgtccctatcaaccctaaacccactgccaatgcccgcatgctatcgctgtctcatgttgaccgcagttgaatttcgtgcaccctccccaagaaaagcctccctatacacccacacgggcacactcacttgaacttccctcactcgcaaacgccgcacaggtgccattccctgtccccctctcctgcacaggcccccggctcctctcgcgcacctgtccccttgttccccctcttacctctgacctcgtcccacgcctccctctacgcggcccgtggcgtccccttttacgccccctttcaacccttgccacgtacgcgcgcacggcagcgcaccttattctctcacttcccaccacccggaccacactgcacgacacgggtatctcccaatgcctcacctcctcggttcacaacaccccttctcccttcgtctgcccaaacgcaaaatgtttctagttccacagagcaacgcacggaacttccacacagttggcaccctgtgggtcccttcacgcggcgttggcggacaccctcggtctcctctccttcgccaccctccacttctctccttccacacccatcgcggctgcgcctcaccccttcttgtcacacggcttggcccttcactcacgccccctctactttcagcagcttcccaccggccttctgccgcgcagcacctctgcccacaacacttctctggctcacgccgcacacccccatcccccgtcttgcgtcaccccacaccctcattctgcgcgctcccccgccttggtcccaccccccacctccggctgccacctctctttccgcccctcacccaccctcgctgcgccccccacgccgcatgctcacacgn

SEQ ID NO: 654280 - DNA, 392 bp, Homo sapiens
cccaagtttttgggggtgaaaatataccctttgcccttcacgtctttgccaaggggagggccttttttcccccttgggcctttcccctttggggggcccccgggtgggcccaatttttggccctggggggttgggaaagtgggccccttgtccttaaagccgaatggctccggcccccgtttgggcctagttaatggcttttttttcccccccccctttttttttcccccttcccctttccccccccgggccccgggggggtttttcctgggggtccccaggcgggttgggttttttgaaaaaatttttttcccccttgggttttttccctggggttatggggggttttaaagggatttttttatggggttttttaaaaatttttccaaaga

SEQ ID NO: 654281 - DNA, 513 bp, Homo sapiens
  misc_feature (51)..(51): n is a, c, g, or t
  misc_feature (61)..(61): n is a, c, g, or t
  misc_feature (83)..(83): n is a, c, g, or t
  misc_feature (109)..(110): n is a, c, g, or t
  misc_feature (165)..(165): n is a, c, g, or t
  misc_feature (239)..(240): n is a, c, g, or t
  misc_feature (258)..(258): n is a, c, g, or t
  misc_feature (271)..(271): n is a, c, g, or t
  misc_feature (309)..(309): n is a, c, g, or t
  misc_feature (478)..(478): n is a, c, g, or t
  misc_feature (484)..(484): n is a, c, g, or t
  misc_feature (492)..(492): n is a, c, g, or t
  misc_feature (503)..(503): n is a, c, g, or t
ttgttgattatcaaacaaatctaggtacttcaatacacattgtttctttgnaaaataaagnctgaaggcataattcatttcanaaagtcacaggttagacaaccaattnnccttctggggctcattttagcaaatcctccaagtgttcccaaatcttttaaaaangctacatcccctgggggggggccctttccctgtagccctcttgctctgacaccagcagccctgcacccttcggnnaagtggctccctgcaggncggtgctgttgcngggcggggatggccctccatggcaacctccagcgggcnggggctcaccacctgctttctgcaaactcactcacttggctcagctattctgcaatggagaggaagtttccttagcagccaaagtattctaagtatcacattttccagtattttccagatccgtagtgtgctcagaaagccagagctgtatcaccaggcttttagggangattancacctgcncatctgggtgncctttaacag

SEQ ID NO: 654282 - DNA, 301 bp, Homo sapiens
ttaagcagatgcactgactcatgcctgtatctcagcactttgtggaggcacgggggggcatcccttgcggttccggagttcgaaaccagcctggccaacatagtgagctcctgtctgtataaagacctttaaaacttagccagctgtggggccaggcacagtgtctcacaactgtaatcccagcactttgagaggccgaggcgagagactggtgtgaacctgggcagcggcgtttgcagtgagctgagagaatagaccagttaatactcggcagtgggctactcttcgtgatatggccata

SEQ ID NO: 654283 - DNA, 98 bp, Homo sapiens
  misc_feature (44)..(44): n is a, c, g, or t
ttgtttttctcccttttgggtgtaatgttttagcaaatcccttntggcctgaaaacataatatgttaattgcccttaaataaattatatagaaattct

SEQ ID NO: 654284 - DNA, 238 bp, Homo sapiens
catcgctattactataatcctaactactaccgcctacctaatactcaacttaaactccaacaccacaaacctactacaatctcgcaccatgaaacaagctaacaatgactaacacccttaactccatccaccctcctcaccctaggagagccatgcccccgcatacaccggctttatgcaccaaatgggccattatcgaaaaattcacaaaaaaacaatagccacaacacaccagtca

SEQ ID NO: 654285 - DNA, 149 bp, Homo sapiens
gccctgtctctatagcgcatactacttccatcccgtgcttccccaaccttccatgaccctccctatcctcttacttacacctctctcggagtgagtgtgtagcacagctgtctcactctctgattctttgcagatcgacgtaattaaca

SEQ ID NO: 654286 - DNA, 710 bp, Homo sapiens
gtcccagctattcaggaggttgaggcaggagaatgcttgaacccagaaggtggaggtgtagtgagccgagatcatgccactgcactccagcctaggcgaaagagcacaactctgtctcaaaaaaaaaaaaaaaattatttccaaatatataatatcctactttataacgggacttactaaagactactttcgggactaacaggtcaatgggccttaaattctttctaaaaagatcattagaagctcccagggtagaacgactgggactggcgggaatataaacacaagttagctctatcaagggccttaccaacttaagggaatgggcccctatgattattattaacgcgtacctgggatcagcaaataattctataacccggtaaaattagcctggcttcacactggtcatttactagcaccatcacctaccacagattactatgtcagaaatgggcctgttcggcctctaatgaaattcaaccaggatcttagaaccttacttgaccatgcatgtatgctcgaatcccctgtataatccgccaccttttcttctttctcaaaactaccaggttggcgcatacagagattccctgggcgcaaaccacctattacactccggggaaacacgccgttttagaacccaccactccacggggactcaccccattttccagaggggaaacccggctcgggggacatttctggcg

SEQ ID NO: 654287 - DNA, 121 bp, Homo sapiens
taacaaaaagaaaactgacagagaatttaaaggacagacacaccctgtctccccaaattagaacaaaacatcactagctctattgggcagggactctcctattaaatggtcagaggtatac

SEQ ID NO: 654288 - DNA, 660 bp, Homo sapiens
acagagcctgacaggggcagatgcactggaaggaccctgtctgggtttagcaaccaagcagccatcctggccccacaggtgtgggaccagcaaccaagcagccatcctggccccacaggtgtgggacttctgggtcttctcctggctggcttcttgctagaggatttcaagagacccagcaagactgtattgtcccactgaatgctcaagatattggttagaagtagaaaaggggagggggcagtatttagcctctgtccccactaaaaattattcccaattgtcatttgtgtcatctgtttagcttacagttttaatccttgtcaaaatgatcatttgccagggtgcataaaacaccctatttgatgagaactggttttaaaggaaaatggggccatcagaaggaagccggttggtgtgaagagacgtctgggaagagcccctggcgagggccctcattccactgggtggcccagaaggagaaaaccgcgatggcgcttctcatttgaaatgttttctttatggacagtgtttagcaattgttataatgtgtacttttgttgattgatctgtatacatatgtaacaaataatttgttctctgagttaatttgttggaaccaaagactttagtgcttcctacattaaaacattttactgc

SEQ ID NO: 654289 - DNA, 641 bp, Homo sapiens
  misc_feature (302)..(302): n is a, c, g, or t
cgacgaatactcgggtggttgatatgattgctacgattacaagtgctatatgacttactgatgaataggcgattaaggattttaggtcggtttgacgtaagcagatagagctggttatgattatgcctcatatggaaagcatgaggaatggataggctatgtagtttgttagtgggtttagaatagtagtgattcgcattatgccatagcctccgagttttagcagtacggctgcaagtactattgaacctgcaatgggggcttctacatgggcttttggcagtcaaagatggagtccgtanagaggtatttttactatgaaggctatgatgcatgctaatcatataaaaatgtttgatcaagagttggataatgggtgggatcagtaatggataattaagaagtttagtgagcctgtggtgttttggatataaactagtgctactagcagtggtagggatcctgctagggtgtagaataggaaataaagtcctgcattgagtcgttctgtttggtttcctcagcgtgtgatgataattagtgtgggtactagtgttgcttcgaataggatatagaataagattacttcggtggcggtgaaggcttattattaggactagcttgtagtagaacttcgtatc

SEQ ID NO: 654290 - DNA, 793 bp, Homo sapiens
  misc_feature (78)..(78): n is a, c, g, or t
  misc_feature (764)..(764): n is a, c, g, or t
  misc_feature (769)..(772): n is a, c, g, or t
ggggactaggctgagagtgaaggcgtaggatacggtggttttaacgtagttagggtaaaggttagttttgtagatgtntgacgttggatattataattgggatggttagaatagttagtgtggttaatgtgagtgaggcgaatgggtttattacttttatttggagttgcaccaattttttggttcctaagaccaacggatagctgctatcctttaaaagttgaaaaagccacatttttaagtgtggaagcatgagttagcagttcttgcaaactttttcggtagataagaatatttaattttctattactagattcacaatctagggtttttattaaactatatctacagtaaaggggtcctaggattattttagggtttaaggtcagtagtagtagtggtagaatatgtagggctatgagggcgttttctcgtgtgaatgagggtttgatgttgttaatgtggtgggtgtattttcctcgttgtgtaataattagtatgtagagagagtagagagctgtaattattatgtttattcctatgagaataattgtgatgttggatcatgaaaatgatgctgtaatgataaataattctccgattagattgatggatgggggtagggctaggtttgtgaggcttgctattagtcatcatgttgctatgagtggtaggagtgtttgcagtcctcgggctaggattatggttcggctgtgtactcgttcatagttagtgttggctaggcagaatagtatggaggatgncgacnnnncaggtctaattcgggtgtgat

SEQ ID NO: 654291 - DNA, 906 bp, Homo sapiens
  misc_feature (78)..(78): n is a, c, g, or t
  misc_feature (795)..(795): n is a, c, g, or t
ggggactaggctgagagtgaaggcgtaggatacggtggttttaacgtagttagggtaaaggttagttttgtagatgtntgacgttggatattataattgggatggttagaatagttagtgtggttaatgtgagtgaggcgaatgggtttattacttttatttggagttgcaccaattttttggttcctaagaccaacggatagctgctatcctttaaaagttgaaaaagccacatttttaagtgtggaagcatgagttagcagttcttgcaaactttttcggtagataagaatatttaattttctattactagattcacaatctagggtttttattaaactatatctacagtaaaggggtcctaggattattttagggtttaaggtcagtagtagtagtggtagaatatgtagggctatgagggcgttttctcgtgtgaatgagggtttgatgttgttaatgtggtgggtgtattttcctcgttgtgtaataattagtatgtagagagagtagagagctgtaattattatgtttattcctatgagaataattgtgatgttggatcatgaaaatgatgctgtaatgataaataattctccgattagattgatggatgggggtagggctaggtttgtgaggcttgctattagtcatcatgttgctatgagtggtaggagtgtttgcagtcctcgggctaggattatggttcggctgtgtactcgttcatagttagtgttggctaggcagaatagtatggaggatgttagtccgtgggcaattatgagagctgtggcncctatgaagcttcagggggtttgaattatgattgctacgattacatagtgctatatgacttactgatgatgaggcgattaaggattttacgtcggtgttgacgttacaata

SEQ ID NO: 654292 - DNA, 751 bp, Homo sapiens
  misc_feature (78)..(78): n is a, c, g, or t
ggggactaggctgagagtgaaggcgtaggatacggtggttttaacgtagttagggtaaaggttagttttgtagatgtntgacgttggatattataattgggatggttagaatagttagtgtggttaatgtgagtgaggcgaatgggtttattacttttatttggagttgcaccaattttttggttcctaagaccaacggatagctgctatcctttaaaagttgaaaaagccacatttttaagtgtggaagcatgagttagcagttcttgcaaactttttcggtagataagaatatttaattttctattactagattcacaatctagggtttttattaaactatatctacagtaaaggggtcctaggattattttagggtttaaggtcagtagtagtagtggtagaatatgtagggctatgagggcgttttctcgtgtgaatgagggtttgatgttgttaatgtggtgggtgtattttcctcgttgtgtaataattagtatgtagagagagtagagagctgtaattattatgtttattcctatgagaataattgtgatgttggatcatgaaaatgatgctgtaatgataaataattctccgattagattgatggatgggggtagggctaggtttgtgaggcttgctattagtcatcatgttgctatgagtggtaggagtgtttgcagtcctcgggctaggattatggttcggatctaatgcggaaagtgggatcctctagaatacgcgcagc

SEQ ID NO: 654293 - DNA, 728 bp, Homo sapiens
  misc_feature (78)..(78): n is a, c, g, or t
  misc_feature (686)..(686): n is a, c, g, or t
  misc_feature (692)..(692): n is a, c, g, or t
  misc_feature (700)..(700): n is a, c, g, or t
  misc_feature (704)..(705): n is a, c, g, or t
ggggactaggctgagagtgaaggcgtaggatacggtggttttaacgtagttagggtaaaggttagttttgtagatgtntgacgttggatattataattgggatggttagaatagttagtgtggttaatgtgagtgaggcgaatgggtttattacttttatttggagttgcaccaattttttggttcctaagaccaacggatagctgctatcctttaaaagttgaaaaagccacatttttaagtgtggaagcatgagttagcagttcttgcaaactttttcggtagataagaatatttaattttctattactagattcacaatctagggtttttattaaactatatctacagtaaaggggtcctaggattattttagggtttaaggtcagtagtagtagtggtagaatatgtagggctatgagggcgttttctcgtgtgaatgagggtttgatgttgttaatgtggtgggtgtattttcctcgttgtgtaataattagtatgtagagagagtagagagctgtaattattatgtttattcctatgagaataattgtgatgttggatcatgaaaatgatgctgtaatgataaataattctccgattagattgatggatgggggtagggctaggtttgtgaggcttgctattagtcatcatgttgctatgagtggtaggagtgttcctgnccgggnaccgctcnttcnnggtgacaccggccgtctcatgta

SEQ ID NO: 654294 - DNA, 401 bp, Homo sapiens
  misc_feature (9)..(9): n is a, c, g, or t
tctcatgtngactgtgaacatgaaaaagccaaaaacccagatttgggagacgatgtggggagagagcgtgctgggagccacagtagcctggactcctcctggtagtaagggggatattcagggacctcccccgggtcctgggcagtcgccggtgcccgagggagccccatcgggctctgtgccttgcgggcagaacttggggtcatatatctgccggcccaggccgaagacctggccgctctggttggcgccctgcgtgtagcccatctgcagggacatggaggagttgtcacacttgtcggttcccagcttggtatcatagatgtgccgccgggtcccgggagccgtcatgcccacctggctggcgcacttgttcgtgcccatctggaggctgatggtcg

SEQ ID NO: 654295 - DNA, 355 bp, Homo sapiens
tcttagagtatccccccccgtccccgggctagctgaaacgggtgctggcaaccatgtgccccgggtagtgtttgtagacttggaacccgctgctcattgatgaagttcgcactggcacttaccgcccgctcttccaccctgagacaactcatcacaggctaagaacgatgctcgcctgttactatgccctgacgggctctacaccaattggcaaggcagatcatttgcacctccctgttggtaccgatagtccgcgggcctgtctgaccagtgcaccgcttcttcagggcttcttggttttccccagctttagtagggggaactagttctgcgttcacctctgctgctcatggaa

SEQ ID NO: 654296 - DNA, 1014 bp, Homo sapiens
  misc_feature (302)..(302): n is a, c, g, or t
  misc_feature (985)..(985): n is a, c, g, or t
  misc_feature (990)..(993): n is a, c, g, or t
cgacgaatactcgggtggttgatatgattgctacgattacaagtgctatatgacttactgatgaataggcgattaaggattttaggtcggtttgacgtaagcagatagagctggttatgattatgcctcatatggaaagcatgaggaatggataggctatgtagtttgttagtgggtttagaatagtagtgattcgcattatgccatagcctccgagttttagcagtacggctgcaagtactattgaacctgcaatgggggcttctacatgggcttttggcagtcaaagatggagtccgtanagaggtatttttactatgaaggctatgatgcatgctaatcatataaaaatgtttgatcaagagttggataatgggtgggatcagtaatggataattaagaagtttagtgagcctgtggtgttttggatataaactagtgctactagcagtggtagggatcctgctagggtgtagaataggaaataaagtcctgcattgagtcgttctgtttggtttcctcagcgtgtgatgataattagtgtgggtactagtgttgcttcgaataggatatagaagggtcctaggattattttagggtttaaggtcagtagtagtagtggtagaatatgtagggctatgagggcgttttctcgtgtgaatgagggtttgatgttgttaatgtggtgggtgtattttcctcgttgtgtaataattagtatgtagagagagtagagagctgtaattattatgtttattcctatgagaataattgtgatgttggatcatgaaaatgatgctgtaatgataaataattctccgattagattgatggatgggggtagggctaggtttgtgaggcttgctattagtcatcatgttgctatgagtggtaggagtgtttgcagtcctcgggctaggattatggttcggctgtgtactcgttcatagttagtgttggctaggcagaatagtatggaggatgncgacnnnncaggtctaattcgggtgtgat

SEQ ID NO: 654297 - DNA, 259 bp, Homo sapiens
aaccttcgtctcgggggtgccacctggtagtttctgttctaaatctagtcccaagaattgccactgtgcaaaactgatgagctaagtcagcatgctaagtgcacttactccagagcagataaccaacaacagtctgatccagaagacttgtttgccatggattttgggctgcattaggctacggaaaggatggctcgtgaagcaatcatatatgatgagcccactaccaaaggtaagcacagctccacttcgtgggcag

SEQ ID NO: 654298 - DNA, 981 bp, Homo sapiens
  misc_feature (302)..(302): n is a, c, g, or t
  misc_feature (952)..(952): n is a, c, g, or t
  misc_feature (957)..(960): n is a, c, g, or t
cgacgaatactcgggtggttgatatgattgctacgattacaagtgctatatgacttactgatgaataggcgattaaggattttaggtcggtttgacgtaagcagatagagctggttatgattatgcctcatatggaaagcatgaggaatggataggctatgtagtttgttagtgggtttagaatagtagtgattcgcattatgccatagcctccgagttttagcagtacggctgcaagtactattgaacctgcaatgggggcttctacatgggcttttggcagtcaaagatggagtccgtanagaggtatttttactatgaaggctatgatgcatgctaatcatataaaaatgtttgatcaagagttggataatgggtgggatcagtaatggataattaagaagtttagtgagcctgtggtgttttggatataaactagtgctactagcagtggtagggatcctgctagggtgtagaataggaaataaagtcctgcattgagtcgttctgtttggtttcctcagcgtgtgatgataattagtgtgggtcctaggattattttagggtttaaggtcagtagtagtagtggtagaatatgtagggctatgagggcgttttctcgtgtgaatgagggtttgatgttgttaatgtggtgggtgtattttcctcgttgtgtaataattagtatgtagagagagtagagagctgtaattattatgtttattcctatgagaataattgtgatgttggatcatgaaaatgatgctgtaatgataaataattctccgattagattgatggatgggggtagggctaggtttgtgaggcttgctattagtcatcatgttgctatgagtggtaggagtgtttgcagtcctcgggctaggattatggttcggctgtgtactcgttcatagttagtgttggctaggcagaatagtatggaggatgncgacnnnncaggtctaattcgggtgtgat

SEQ ID NO: 654299 - DNA, 302 bp, Homo sapiens
  misc_feature (60)..(60): n is a, c, g, or t
  misc_feature (73)..(73): n is a, c, g, or t
  misc_feature (77)..(77): n is a, c, g, or t
  misc_feature (79)..(79): n is a, c, g, or t
  misc_feature (102)..(102): n is a, c, g, or t
  misc_feature (127)..(127): n is a, c, g, or t
  misc_feature (131)..(131): n is a, c, g, or t
  misc_feature (134)..(136): n is a, c, g, or t
ttaatcgagctcggccctgattatacgtgtccacctattttcaacgctgtctgttaagtnacacaggtccttnttgnangcaggagtacgttagctcatttnccctcaagcgggttgtgacgtcgtngaanttnnnatgctcaaacttccaacacttgttatacacttgtaacccagctttggtaatgagacacgcatcaaaatcagatgaacaattgacggctgtttagcagtcagcaggtgggttaggacagttgtagcactgcaggctatgacctgaatggcagaagacagccaggacg

SEQ ID NO: 654300 - DNA, 541 bp, Homo sapiens
  misc_feature (512)..(512): n is a, c, g, or t
  misc_feature (517)..(520): n is a, c, g, or t
gaggggtggtcctccttttctggtttacaagaccagggtattttatatactacaaagactcttcactttaatagatgtggattgtagatagcgaataactcatccgtaatttacgacaatccacatccgccggtcagtagtagtagtggtagaatatgtagggctatgagggcgttttctcgtgtgaatgagggtttgatgttgttaatgtggtgggtgtattttcctcgttgtgtaataattagtatgtagagagagtagagagctgtaattattatgtttattcctatgagaataattgtgatgttggatcatgaaaatgatgctgtaatgataaataattctccgattagattgatggatgggggtagggctaggtttgtgaggcttgctattagtcatcatgttgctatgagtggtaggagtgtttgcagtcctcgggctaggattatggttcggctgtgtactcgttcatagttagtgttggctaggcagaatagtatggaggatgncgacnnnncaggtctaattcgggtgtgat

SEQ ID NO: 654301 - DNA, 663 bp, Homo sapiens
  misc_feature (78)..(78): n is a, c, g, or t
  misc_feature (621)..(621): n is a, c, g, or t
  misc_feature (627)..(627): n is a, c, g, or t
  misc_feature (635)..(635): n is a, c, g, or t
  misc_feature (639)..(640): n is a, c, g, or t
ggggactaggctgagagtgaaggcgtaggatacggtggttttaacgtagttagggtaaaggttagttttgtagatgtntgacgttggatattataattgggatggttagaatagttagtgtggttaatgtgagtgaggcgaatgggtttattacttttatttggagttgcaccaattttttggttcctaagaccaacggatagctgctatcctttaaaagttgaaaaagccacatttttaagtgtggaagcatgagttagcagttcttgcaaactttttcggtagataagaatatttaattttctattactagattcacaatctagggtttttattaaactatatctacagtaaaggggtcctaggattattttagggtttaaggtcagtagtagtagtggtagaatatgtagggctatgagggcgttttctcgtgtgaatgagggtttgatgttgttaatgtggtgggtgtattttcctcgttgtgtaataattagtatgtagagagagtagagagctgtaattattatgtttattcctatgagaataattgtgatgttggatcatgaaaatgatgctgtaatgataaataattctccgattagattgatggatgcctgnccgggnaccgctcnttcnnggtgacaccggccgtctcatgta

SEQ ID NO: 654302 - DNA, 400 bp, Homo sapiens
  misc_feature (371)..(371): n is a, c, g, or t
  misc_feature (376)..(379): n is a, c, g, or t
agctcggtacccctttccgattagatgagggcgttttctcgtgtgaatgagggtttgatgttgttaatgtggtgggtgtattttcctcgttgtgtaataattagtatgtagagagagtagagagctgtaattattatgtttattcctatgagaataattgtgatgttggatcatgaaaatgatgctgtaatgataaataattctccgattagattgatggatgggggtagggctaggtttgtgaggcttgctattagtcatcatgttgctatgagtggtaggagtgtttgcagtcctcgggctaggattatggttcggctgtgtactcgttcatagttagtgttggctaggcagaatagtatggaggatgncgacnnnncaggtctaattcgggtgtgat

SEQ ID NO: 654303 - DNA, 301 bp, Homo sapiens
  misc_feature (1)..(1): n is a, c, g, or t
  misc_feature (217)..(217): n is a, c, g, or t
  misc_feature (262)..(262): n is a, c, g, or t
ntgatctagaggatcccaggggattggcagggtcacaggacaatagtggagggaaggtcagcagataaacaagtgaacaaaggtctctggttttcctaggcagagtgtgtgtgtccctgggtacttgagattagggagtggtgatgactcttaacgagcatgctgccttcaagcatctgtttaacaaagcacatcttgcaccggccctttaatccantttaacccctgagtggacacatgcacatggtttccagggagcacnagggtgggggataccaaagggggggtaccggagctcgaa

SEQ ID NO: 654304 - DNA, 474 bp, Homo sapiens
attaaaccgtttcagactgccagactgtcttggctgcaccattttacattcctatcagcagagtgtaaaggttccaatttcttctccacatccttaccaacactttcttatgatttttttttaagacagaatctcactctgttgccaggctggagtgcagtggtgcgatctcggctcactgcaacctccacctcccaggtccaagcaattcttctgtctcagcctcccgagtagctgggcgcgtgccaccacacccagctaattttggtattttcagtagagatggggtttcaccatgtgggccaggctggtctcgatctcttgacctcgtgatccacccacctcggcctcccaaagtgtggggattacaaccgtgagccaccacgcccagctgtccatcattcttttacactactgagatttagggtaatttgttatgtggcagtagatcattgacatacgcccaggtacgca

SEQ ID NO: 654305 - DNA, 289 bp, Homo sapiens
cacgaggatcatgttgaagatgagcgggtggcagcgacagagccagaataacagccggaacctgaggagagagaacctggtccacgtgcagtcatggcagctgagtccctgcctttcaccttggagacggtgtccagctgggagctggaagcctggtatgaggatctgcaggaggtcctgtcctcagatgaaattgggggcacctatatctcatccccaggaaacgaagaggaagaatcaaaaaccttcactactcttgaccctgcgtccctagcttggctgacagagg

SEQ ID NO: 654306 - DNA, 1077 bp, Homo sapiens
  misc_feature (540)..(540): n is a, c, g, or t
ccacggactgtccgcacaacgtgcgtgcagacgcacgcgatccgactcatatgtagcgccaaagctaatgtgcagtgacctgcctagtgctcttatgcgatcgggatacacttccgtaggctcatatacaacctactgtccatggccccaacgtagaatgcgccttacgagggtattatactagcctctttcggtctcgcacgactgagttagacatacctcatatcactagaaggagtgttcgtaaaaaatcacggcgccggacgagtcgtgaccgagtcagccccatcgtactttgcaccaggcaccccggagctctgtgaggctcctaccatgaatcgcaactcctacgaatagtgaacacccactcttagcggtacgcatagacgctggtacaccgtcgagttgagcggctccttaattgaatgccagccatctgtctagggcataaagacccggctcttgggtgctcatcctcactttgcctcgacatcgacgtggcggttcggttcggccaagtgcctatgccacccctttcantatgactcttaccttgtcccacccgcaccatcgggcgagacagccctgtctgatgccctagctgcgtccccttcaatcatacctcatgcatatctctgagaggccctcccccgcctttatgcccactccacaccttacttcacttctcaagcacgaccttgctaaccaccccttactcttacactgctgcccctcgcttcttacgcacgcgtgcgtggtcgcacccacgtaatcagttactgcaccgcgtcgcccgtaaccgcccactccctcagcaccttttcaccttccctttcgccgcgagttccctcgcacgcgccttttgggggcctctttccactcgcggccttcccaaatcgtggcccacagggccagctcgagccaagcagcccaatctccgcacaacgcccgccttttccggcgtgcttggcgcacgcactcgcggtggctccctccacgcgcacctcatctcctcttgctcctcccgccacccgcccccccagccctctctcggccgcgatcccgccccttcacgtc

SEQ ID NO: 654307 - DNA, 117 bp, Homo sapiens
atagctgaagatagggggaagatcttagaccagggggaggacttcccagcatcagagagtacagggatcgccaggctgatggagaaagaacaagaatgagtaaccatttcgagaagt

SEQ ID NO: 654308 - DNA, 450 bp, Homo sapiens
ccgggcaagcgtcggctctccactgcaagcggacatgaatctggaccgtaggcacgggtgccagccttggggcacaccgctccaccgggtaccgctgcagccactgtgttactgtaagccacactgaaacttctcttaagcagctgatatagctttaatatttctgcatgaacggccttggatagcttttgtgcccacatggacatggtccaggcttcccatgtgatttgtggtctggtcctgggatgaattgggattgcctcatgtttttttctttttctctttctttcaggcttcctcatggtttttctttgtttctgtttacatgtaagttccactcgtgaagtacaccaaatctctctcacacaaccaccctattgaatggttttcactttatttttctaatctacatttcaaaggatgtatgcataaagtgaaaataaattttga

SEQ ID NO: 654309 - DNA, 163 bp, Homo sapiens
  misc_feature (8)..(9): n is a, c, g, or t
  misc_feature (31)..(31): n is a, c, g, or t
gctagaanngaatgatgtctgaaaaggtgtngttgcagagtgctggccagcttccgaccgtctctccctgaagccgccccgggggaaaggtgcggaggacgcagacagcgggcccgagagccgcagcgtgggcgaggagaccagcgtgtgcgagaaatgctgc

SEQ ID NO: 654310 - DNA, 906 bp, Homo sapiens
agcgggctttcggcgtcggcctaagtgcgctgtcgagcgcgcgcggaccgacgcacaggcggcggagccggtatgggcccgcctgggcccatgtggcgccgtgaccgacgagcaccgagctctagagccaggatctgaagacttcaagatgggtgatcaggaccctgcgggacataagtcgcccctccagcaaatggtggcctcaggcaaccggggcctgtggttacctctgctcttacatgacaccctctggacggtggtgaagggttcagccatgcgagtctcagcggcccgtccatggccgagcgagtctgatgccattccgtccaggacgtgtggagcctctcctatacgcaagattgcccgtcctctctccaatccgacaggggaagtgccgtcctgtattgcacatggtgtcctggagcctctgtacctgtgcccaaatggtgcccgctgttgccactctggtttcaagaccctacccgcttcactggcaccatggatgccttcgtgaagatcgtgaggcacgaggggatccaggaccctctgggagcgagctccaccgtacaccctgtgtgatgactgtgccagtctaccgccatctacttcactgcctatgaccaactgaaggccttcctgtgtggtcgagccctgacctctgacctctacgcacccatggtggctggcgctgctggctcgcctgggcaccgtgactgtgatcagctccctggagcttatgcgggacaaaggctgcaggctcagcatgtgtcgtacccgggacttgggtgcctgtgtccgaactgcagtggctcaggagtggtggcgctcactgtggtgggctggggcccactgcctttagatgtgccttattcaagccctgtactggtgaactataagctggtgaaa

SEQ ID NO: 654311 - DNA, 176 bp, Homo sapiens
taatctcagcactttgggaagtggaggcgagaggattgcttgagcgtaggagtttgatatcagtctgagcagcatagtgagactttgtcactgccaagaaatgaaagaaattagctgggcgtggtggtgtgcttctgtagtcccagaagctggggtaggaggtttgcctgagccca

SEQ ID NO: 654312 - DNA, 907 bp, Homo sapiens
ctatagagacatagcgggtgtgcgaaagaagggtgttgggattagaacagtgtttcgcaaaacgcggaaccctataggccgtggcacagttgggcgccgttcctctcatgacccatggggcccacagatgaacttctagggtaactgcaaagccgctttcctgcgaacgcacaaaatcttgcgggggccccacgccctaagtcgttaacgaggggttctgcccatagtgaaccgtgattttccctacacgcccctggtaaatatgcgcgtttctttacgacggtcaaatattctaaaaaaggttggaaggtaacccacaaaggcgtgaagggaccaccgcccccgtccgggagaaattgacacttgggaaagaaggtgcccttaagggtccccggtgtactactgctgcgcgaaaacactgggggcacaagaaggggtaacctccccgcgggccagaaattagaggaccacaagtggtgggtctctggaacactctgcaatctggtggacgcccctggaagatggtgaaaaaactccggggaccaaactaaaaaaaagggcgcaagttctgtcacacagaagggttctttagagatttctaaaaagggcgaggactctactaagatgctcgggacccgccccacgatgaaatgttagaaaaaagaagtgttctgccgcaaggagtgtttgaatgcttgaggaaaagagcccgcaggggagcccaaataacgttgctttctttgtagaagagaatcccccaagagttgattcacttcttgtaaaggccacaatgtttgaattctcttaaaacggggccacccttgtggaaaaacttttacaaaacccccaagatgaaccccttggaatctttggggttccaaaaaaaaacccgggacccccaaaaaaa

SEQ ID NO: 654313 - DNA, 1254 bp, Homo sapiens
agcgggccgagcggttggccgccgacatccctgtctttccctctcctactgtgctgcggaacctgggccgtccgattctagtgtgaaacgcggcacccagccctgatgcttcgacgcgcccgggcctcccgtcgcatgttctgatatgactgctgcgagcgtcctgtccggtgcgtgctcacgtcatcaagacccgttgacgtcatcccgtagatgccgctggctgtgtgcaggtgcactcggtggcatggttgcctggttccgtgagcctttgattctgagcattgcgcaagaagatcgtttccacagccgaactgcgtcgaggagttgcgattttggctggagcagtacgggaccaacccatttgactcggcagacagtgcttagtcctatggagaacgtccatgataaacgtgcccacggcgacacccggaagttagacttgcgactagggaggcaggatagacatccggggaggcgccagtagtaaaataagtagccactttcgtagcacccccggctgcgtgttacccacaggttgcggtatccacgaaatagaaccgttatgacaccggcctatgaacatcacgtggcgttccgtagaaaagtatccataaagcttatatctaacacacaccggagcattctcccacaagggccaatagcggaaagcctaagtaacatcacggacgggaacaccatcccagcgcacaaagcaacatggtaacaccttaacaccgtcaaccaccgttgaacttgcgcatcacacgtgcagtcaacccctccgttgtcacttgtatccctaaacacgcataggttccacattactgactcaattcccccagcacaaaggcggtacaccgccatcagcatttcccgcaaatcaatgctgacaacacgttaggcatctacacttgcatacacagattgtgtggcaacacacaagtaaagcacaatccctcatctagactgatgcatgttcgacagagtacgctgacaattttataagcgccctgagctgggtaacgctcacatctgcatacccacgccagtgcctcgtgtgagtaccattcgagagacaacgcgagtgatacatcgtgaacaacacaacaggtcgaatcaacacaacggggcgcacttgtgctatatatgttaaagagacactatcttacaccacaagagggagtgccaactaatacctgcctcaacacccacactacacgcgcaaaccagattacaggacacaacaaccac

SEQ ID NO: 654314 - DNA, 168 bp, Homo sapiens
agacaaagtatatatataacagaaaatgagtaacaaaagggtatagtaaatactttcctgtaacaatacttgaaaggtgaatggataagtcaccaatgaaaagatataaagtgatgaaatggattttaaaaaaatcatcacccaactatatgctgccagctggctcag

SEQ ID NO: 654315 - DNA, 1079 bp, Homo sapiens
ggtgcctcactatcctacaacgagcagcctgtggcattgttgccttgggctgctcctcatggtccggtttcacgtgatcaccatcagcccctgaggatgcaaagggaagcgtagtcaaggtgaacatcgtatggcgaagcctggtagggtcttcctcatactcgtcgagggcgagtgatgcggcgcacggaattgatgaggcactgtctgcatgtgggtggtggtatgggcatgacttagtaacgtgccagtccatggccctggccaggacagactctgtgtgcccactggcgcttgctccaggggctggtggccagcctagggcgttgcccaggggtctcaggacgtgggcccgtgcgttcatggcattgcatcttgtccagaggccgtctccctaccttcgtctgtacgtagcctctcgaggctctgtgaggtcgtgctcttgcattcgccccattgggtttcccctctcgctgccccgtgggactcatactcgtctggtacgattactctgtggatgcacctaggggttctacatagttaccctttgctcggaacgcaatgagtgattagccttagtttggttgctgcaatgtcgatgcctccttggtagttcccattgggtgtttgaagtgcaaggcgaagacttcgtgtccgttgcaccttggccccattcccccagtgctgagtaggcattgctcggtctgggcggggagtaagggagaagcccggcaggtgccttgcaaatggcgatacccttgtcgccaggtgccgcgttagcgacccgccggggcctaagacagtgccacccgtgaagggggtcaccggaggtttggccatggcaaggagcgcgagttctggtgcctggggtggttgcccaaattggcaagaagaccacgcctattctggggtgcatccactggcatgtgcatgaaaaggcatgtggggccacattggttgttcaagggggcctagatcacggaatggattgctccccagcgaaaacatacacatccgatgggccgttccattcctacgttgtggacaacgacctataggtgggggaagagcgccaacag

SEQ ID NO: 654316 - DNA, 829 bp, Homo sapiens
gctggagctagccccatgtccactccaccttacgaccaggacaagctgagccggaaccattgaccgcaaataaagtataggcgatcggaattgatagtgcgggcgcaatctccagactactagataccgcatggggaaacagatgaccaagagttatgagacccaagcgatgacctaggagacaaggagataacccccgtaatagctgcggcatagaggaagtgacacgtagcaactaagctgtgcaagggagagcgcaaaaagctaaaggaatccccgcgaaaagcagaacgagctacgcgtacaagaacagactaaaaaaagtagcggcaccccgtcataatgtagcaaaaaaataggtgggaacgattccataggtacgaggcgacaaacctaacgagcctggttgatagcgtggttgtccacagatagacactcttagttcaacctttacaattggtgcccacagaaccctctagatcccctttgtaaatttaacctgttagtccaaacgaggaacagctctttggacactaggaacaacaccttgtagagacgagtcaaaaatctaacacgccatagtcaggcgtaaaccagccaggccacgccaattacgacaaggcgtccaaggctcagacacccacaaccttaacaagaatccccaagcgccacaatccagccaccaccaaaagacaaccggtgccgcgccgaccgccccgcggaagacctgcaacacacagagtagggagacggccacaaatgacgacccgcggcaaggtggtgccaagaccggcgacgcaggccggggagacaacacaaaagccgggga

SEQ ID NO: 654317 - DNA, 144 bp, Homo sapiens
gctcgacctcataaataaacccctaagatgacaacacttttggagttggcactacaagatgcatgagaaatacagttgatcctagaacaacacaggtttgaactgcatggggtccacatatatgtggattttcctccacctttg

SEQ ID NO: 654318 - DNA, 763 bp, Homo sapiens
ccatacccaccccctggtcaaacctcaaacctagtcctccctattattctaccaccctttagcctagccggtttagtcaatcctctgatcagggtgagcatcaaactcaaatacgccttgattcggcgcactgcgagcagtagcccagaacaaatctcatatgaagtcaccctagccatcattcttactatcgacatttactaataagtgggctcctttaacctctccgcccttatcacaacacaagacacctctgattactcccccctcaagagctctaggaccatacatgatggatcttattatccacacctgtgccagatgagccctagcgcgaaccccacttcgcagcctgtccgaacggggcagtccgagacctacgtggtccagcggattccaacactcgcagagtactgctcaggcagtgccccttcggccctggttttcaaaagccgcaactaggaccaacacgattatgtatcaattagaccaccctctacatgtacaatattgctcgggacaaaactatgacgccattttgccatgagctccgcaaaacacagggatgtcactcagagaccactgacttcctatacctgccctatttatctagaatttaaacagcatacccaggattccgcacgcacaacttaaaccccttctatgaaaacatccaacactcaacatagcagttaattatatgataggtacccaataccattacgatttccagaattccccctctaacctgataatataatca

SEQ ID NO: 654319 - DNA, 133 bp, Homo sapiens
acgtacgtgctgcctcactttcgaccctcgactctcctccacgtgacgcgtcccttgtgtctccggacactgacccttaacctgacggacccacaccgcgactcaccgacgtgtttacccactgggggactcc

SEQ ID NO: 654320 - DNA, 143 bp, Homo sapiens
ggcgacattcaagcaagcagatggttaattgctgcaacatcaacaaagagagcatgtggatgtagaaggtgtgtgagaaaagtgaatcagaaaatgggaagctgtacacagcaagacgttgagttacatgttcagacagattt

SEQ ID NO: 654321 - DNA, 969 bp, Homo sapiens
  misc_feature (604)..(604): n is a, c, g, or t
ctacaatctctgttagagcatgtgctctcgccttgttcttcttcaagtcacttggcgagtcgtggctctttgtagttttatcacttttttttagaatcagcttctcagtttctacaaaaagccccattgggattttgcttataattgatctaatggatcaatttggaaagaatagggggcagtatttttaatattgagtcttttacccagtgaatttggtatctttatgtaggtattcctgaagatctcttagtaaagttttatcattcttaccataaggtaaaatggtagaaatgataaaactttgctaagatatattgttgacagaaacatatttgatttttttacactgattttatatccatcaactttgctaatgatttacaggttatgttgtgcattttctctttctttctctctcttttctttctttttttttttttttttattgagacagggtctggctctgtggctcagactagagtgcagtggcacaatcttggctcactgcaacctctgcctcccaggctcaagcgattctcaaacctcagcctcccgagctagctgggactacaggcctgcgccaccacgcccagctaatttnggtattttggtcagacatgttgttcccccatgttgtccaggcttatctcaaaattcctgagcttaagctatctgcccgcctcggcctcccaaagtgctgggattataggagtaagccatcatgctgggccttattggcgatttctttttgcctttgtcttgttttggagatgggaccctcgctttttccggccaagcttggattcgagcggggaaacctcaggtcactggaacgccccgcccccgggttcaccaagttccctggtccccccctccagtagtggtataagggccgcgcaagaggccacatattggcttcctaagaacgggttccatttcgcggggtgcttactcgtccacggtccc

SEQ ID NO: 654322 - DNA, 278 bp, Homo sapiens
atgtatggacgactgagtctcaagagaccgatgagaatcaaccctcttatttcatgtggcgctattcacatatattctcatgtgttatgggaaaccatttaagcaagggatagacatgattggcgtgcagcagttgaaacagaaacagtcctccaaaaagtgtcagtactatggcaaaccggcaaccttatgccatcgctagccacgtctcgggaactacaactcttcacatatggcacacatgatcctttctacaaaacagaaacgaatcgtggacc

SEQ ID NO: 654323 - DNA, 1596 bp, Homo sapiens
  misc_feature (288)..(288): n is a, c, g, or t
  misc_feature (1439)..(1439): n is a, c, g, or t
gcggagacacgcggcggtgttctgtgttgcgccatggccgactacctgattaggtggtggcgcacgttctaccgtgccagacgacgtgactcacatgcatcagcacgtcctcttcgaactcgcgcgaggatcggcactctacgctacaattgactattcatcattctccctgaggatacgatcagacttctagcttgccaggacctcacggctgtgcaccccatgtaggctatcatgacctcgtgtaccccaatgcaacagagtcaccatcgttaatgaccgcgccantgtggcattgtccttacctgcgccacttggcaacacacagtgtccaccatgcacgaggcatcgggcacttggacccaataggaccaacttgcgtgcgcttatccagggcccgcctattttggcctatccatttcccagcccacaaccttggtatccatccgttgaaaagttaccccatggacccaaatttgccaactgtctccctgcgactagcacgtccgaaaacgcacacactcattccgacagcgcaccgtgcgctattttcgaatgcaaaactcaatgcaaccaacgttccgctcgagttccccctttcctatgccgccacaaataagcgaaattccctgcctgtttcggctggggggacatccgtcttctatctgtggaacgttgggccccaaccatggggcacccccctgttgccacactttcgaggtgttgtctccatttggcccgttgggtcaattcccttccaacatttttccaacccacgggaacccaaacgaatggagggcaccccgcgagaaattccggaggcgcacgaagaggcccccggcccttttctgtcggttccggtgctggcccacgctttcaaatcgttcagttatccccctttccccaaaggggtgggcggcaaaacccacaagctttctccgtacagccattctatgtcgcttctcattcccaagtatcacactgaccaagggacggacccgctcgggaacaacccctacgtgtagaacacccgtttggggtgtcttcgtgacccttctctggtcgagcacagcgggacagtggaacgtttcaagacgctttcggagaccatcaaactactgcacacctgtgctcagaaacaacgtgtcaaacccccttctcgggcgagcattgtgcagcgattaaatacggccacccccccccctgtgtgtctcgcagctgctccccagtttttccacagcgcaacgtgctctgccatacaacgcctcggatcacgatcgctcgcccgcgacccgtttggtcacccaccgtggtttacccttagtgccagaccgcgcccggcgccgggttgtcccccccgcgcgtccaccagtccggtgtggccaacacacaagctgctggtgtgtggaccccccctcagccgtttgcgtgcgcttccnctctctcttgttgagtcgttcgggccccttttcacgtccgtcataacggcccatctctcggcgcattgcggcgtgtgccaccatcctccacccgttcttgcgcgtgtctccccggcggtctagtagtcgagcggtattgccactctgtcccctgctg

SEQ ID NO: 654324 - DNA, 670 bp, Homo sapiens
gacccgcgcgtggcgggccgccggggcagtcgctgcagccgccgcgggaggcgtccgtgacaaagatgaagctcatctatcctggagcactattctcaggcgagcgagtggggcggttaaattacatcagggaaccgcatcaatccaggtttaaaccccagggcccaggagaaaggtactttccaacccttgggggccttcccaaatggggagaggagattaaccccaatttggggcctgggcttaccaaagggaagcgcctgcactgggaatttaccttacttagacgaactgggggggaacctcgtgggtcctttataaacatctttattggtagaaaggaaccttttcagagccatttggaattgaaggataccggtggaggcccttccatccggagaacacagcccgggggacgaggttaaaccacaagtctcccctttttcccagtggtttgggcacaaccaaagtttttccttctccataggcccaacatgttgtggcaagatattttccataagcccaagaggaaagagagagcatacccacagacaatttccctgggcgcaatgtgggggacacatggtgccgaggttcacggacctctgttaaataggggggccagggaaatctgggtggagtgtggccccttttgggaacagaaagcaat

SEQ ID NO: 654325 - DNA, 703 bp, Homo sapiens
agtaatgcctttcttcccaagcaaatcaaacctctccctatgtaaaagttgatagtgtaccaagagacacaataccactggtgggctggaactagctcgttctgatgcataaaagttgataattaaagtaccagaaattttgtaagctcagttgttcaaacattacccattcattcaacatcatgcacacattcataaaaccaccagtggcacatcacatttaaaaacccaatgtaataatccaaaacatacctacttccccaattattttactaccttatactcatttcattcagtcactcttgcagtctcatttaggtctcattacatctttcacagtgcaaacacaggatacaatattgtgctcactgtgggtctcttcctgactgcagattcagtaacatggtgttcgtagcttgaaacctgtccacagtgggagtatttacaccatagaaactggctggcaaatgctacaaactagccaattttaattcctggaaaaggcgaattgttgagacatttaccagcaccacaatgaatgccatattctttttttcttgtattaggaacatacaattatcggaaggcagataaaaattatttcaccaaagtcatccaaatgccaatcccttatctcacaggactggcctatacattggccgatataacaagtgcaggtattaacccttctttcaagactcct

SEQ ID NO: 654326 - DNA, 445 bp, Homo sapiens
ggtcgaccttgagatcaggaatttgagaccagcctagtcaacatggcgaaacctcatctctagtaaaaattaaaaaaattagctgggcgtggtggcaagtgcctgtaatcccagctacttgggaacctgggaactgtggaggttgcagtggcccgagatggcgccactgcagctattactccagtttgaaaatactagaagttgccaatatatattttttccattgccagacttgtctgcaatttgtactggatctgatagagaaaccatttccatgggtctatatgaaaatgtggagccgggggtagtggctcacgcctgtaatcccacaacttgggaggccgaggcaggcagatcacctgaggtcaggagttcgagaccagcctggccaatggggtgaaatcctgtctgctacaaaaatacacaatttagccgggtgtggtgg

SEQ ID NO: 654327 - DNA, 614 bp, Homo sapiens
ctaacgggacgacgacttacgactactgaggacgacgtgggaacgcaagaaggtcatgaagtctgggtcatttcagggcctaatagaaatgattttctcgcattagtttcaagaacattagcaattacttcacgggcataagcacagttcacaggaatttctggcaaggaataaaactataaaaattagtcaaatggtcaaacatcatcagaactgtgtaaaagcatataaagtttcatcatatctttctttggaaaaacaaaccaaacacttcatgtactagccagtagctacatagtgatcagttgatgaatacacctcatggtccacgcatataaaaattttacaccatgtctagtccataggcattagtgtaggagtcagaataccaacctgaattctgtacgcagcttcgtgccttgtcgataaagcagtggacatctctccacagggagatatgtttcctcccgtgatatagaggatgttgattcactggtctcctctctattccgaaaagctgctctgaagattagtgagaacaattagctgtaaacgctctttgcacggtatacaacataaatcatacacagacatactggcatgagaaacgctat

SEQ ID NO: 654328 - DNA, 1301 bp, Homo sapiens
actctttgcgatggaccccgtgtgtgctggccctggggtgagtgctggccgatggctggctggcggcgtgctgtgcctggggtgcgacatggctggagtgatgcatgtgacctaatctggatgtgttgtgatgctttgatgcccctgttgtgtgctctgtgatgtgatgcccctgcttgccgttgttcccctgtgtggatgctgctgcccgtctgctttagtgtgccctgactgtgctgtgcgtgctggctgtgactcgtgtgccatagctgatgccatgccctgtgtggccatgtgctgatcgcttggtgcagagtggttcaatcgaaggtgaagcatgcatgtgacttggctgaaggctgtgactgagtagacagaggtttcccctgttgttgcattcctgtcgatgtgccgtgtacaggccacatgtggttgcttcatgctgtgactaaactgatcttgtggactgcttgtggttgcgccaattgcccactgttggctagctgttcaaacctgtgtccagctcagagcaagaatggcaagggacctgcgactggtacaaatgctgtgaccacgattgagactgcgctttcgagttgagttgttgcgtgctcatgtgcaatgctgcgtgcaaggggagagggcgtcagcttgtggaccctatgttacccccatgcgaaccattgcaagcaaagcgtgctatgaggcatccatggcgaagtgacctcgccttgtgtgcacaaaagacatctatgggaatggtggcttttgcttttgagagccgcagacagaggttgagacaacatggcgtggcagccccttttacaagtactggaaggtggaatggtgctttgagtgacgtgagggctttccctggtaaatttgccaattgacaatcaaaactagaacacagtgaactcaagacccctggtggaaacttatccagaatggttatcccaatgcgccccccaattgtgcctggtgtctggtgaacatcagaacaccctgcgggagggaactaaccggtgcctctgcacacacgatggtgtgacctggatctgcgagctgtgagaggtatacgaccacacgctgggaggttggggcggtgaaatgtgagcacaggaaaggccacacacgtcggttggcgggaacccctgcacacttgactcaattttcacaagtgggcaaccagtgattatacaaaaagtgaaaggctgcccacaagagttattggagacgcaccaacctcgggagcaacccccaatgtgatggcaaggggaggcgttcccacaccaaatttg

SEQ ID NO: 654329 - DNA, 1091 bp, Homo sapiens
ggcggctccaggtaagatggcggcagccgtggtgctggctgctgggttgcgcgcggtgcgcagagccgtggcggacacggtggtgcgcggggggcacggtccgaggagctgcaggtgtgactgatgggaatgaagtggccaaggccctagccaggcaaacttccttggtggtgagcagtcctccaaaactatctttctctccagtgatccttggacaatgagccatcgccatgatgaacattctctatgaggaccagcagttgtcttgtgttgccgtgatgtggctcgcttcagtgctccttggtgcaatctttccttgggtctagtatccttaatgaagagcctcatttaccgtctgcgcatttagactcgcgagctgataggaacgaacgtacgcaagtcatgcattcataggggacacccatacatcccattggttgagccagtgcagacatgccacaaggggcttgagggcgccctggggacggatcggattaccgaacctttcgtagatccacaacgattgcggaacgcgtgggggttgcaacagatctgttgtaatcattcttggcagcagttaatggtaccttggaggtgtgcccggcaggctctcgggctggggctcccaagagttgaatcctgacctgctgggttaaagggaccagcagaactctgggattgcgttgggaatggacataggtggaaaaagaattgggaatgcgtggtgagtggctaaattcaggagcttggtggctctcgtttaaagatgaaaataaaatgaaacggagtagagagaaataaaaagagtattggaggaactatagtgctattcttgaagaaagagaagaaattgtgtggagcagaaattggaattcacgtcctgttagctcatggagggaaacgaatgggtgacgtagatagtaaaggggagtcgacacacgtattgtgacacaaacatttattaggcttctagatatggaaggagaagaataaattatgtgacatatagtggattaaaggggcaaagcggtagtatgcatgggttagctgagggagaacacatagagtttgagtgtgaattgtgaggggaa

SEQ ID NO: 654330 - DNA, 884 bp, Homo sapiens
ggatgaggagccagctaggggagcctttaaggggagcctgagtctcctttaatctgtcggtgtccccagcacctaacagggtggagcatgcagtgaatgttgaatgaatgggtgcaagggtagtcaatgtcccttaactttcacatccatcatctcatggcagcttccacagggcactccaaagtgttaattatggctgcttaaccctggctaatgtttcggaactcatcagatcctgagactcagtggacagtgtttgtttcaaatagattccctaattcctcccctggaggttatgattccgtggggtctatgcacagactgggaagctatataacaaacactcttctaaaactgagaagaggctgggcacggtggctatagtgccagcctatagtcccagcagtttgggaggctgaggtgggaggacggtttgaggccaggagttcaagaccagcctggccaacatggtgaaatcccgtctttactaaaaatacaaaattacctgggcatggtgcacgcctgtggtctcagctactcgggaggctgaagcgggagaatcgcttgaacccaggaggcggaggttgcagtgagccgatatcacgccattgtactccagcctgggtgacagagcgagactctgtctcaaaactcacattacaaactattactgtgtgcgtaatgactacttgcgcaccatctttcggcacagtacgtcgactgactgggctacaacgcttcggcaaaccccgggcgttccggacaaagcagccccagacaacaactttttcccacaaccgtgtttgacccggaacatcctcctgcgtatacccgaagagcgcccaccgcgacaacgccttgagctcacgcctatacccgtcttg

SEQ ID NO: 654331 - DNA, 249 bp, Homo sapiens
  misc_feature (182)..(182): n is a, c, g, or t
  misc_feature (208)..(208): n is a, c, g, or t
  misc_feature (229)..(229): n is a, c, g, or t
  misc_feature (248)..(248): n is a, c, g, or t
gctggtaccagatcccctttcatcaaacccaaggctcaggagtcccgtcgtccccaccgaacggcatcagccccatcatggcccagcatgtgttatggatctgggactgggcactctgcacattacgccgctcctcgcaggtactcaatagtcctcccgcccagctctcctgtctgccatcntgccgtggacagcaggagagtcacanggcccggtgagacctctgcanggatggaaacgggggatcnt

SEQ ID NO: 654332 - DNA, 1250 bp, Homo sapiens
  misc_feature (135)..(135): n is a, c, g, or t
gcaaaccctgagaatcgaaaatgaacgaagattctgttcgcttcattgcattagccttccgagcatagtacctagagcctacccgtcgcagatactgatcattctatttccccctctatagatccccatgctccnataatatctcatcaacaaccgtacttaatcaccaacgcacactaatgtactgaagtctacaatcttaacgcgtctaaaacacaatggatcaccgcattcacaacactaaaggtacgaaacctgaatctcattatactaatatcctatctaggtcactttcttacttgtccacaaagctaagcctcctcgagaccctcgctggcgctactacatcagttataacatcccaagctcatcctctagacttagtcatattaatagcctttagacccatgggcctcattcacccctattatcgacgcgagtggcgtcaggatgactttaatcaaggcttctcccgtctgctattagacttatagacatagttgctcctatgctcccctagcatttacttaaccaacaaaggacgaacacgctaacaacctcgcattattcgcccaattaactaaggtttatttactccgaatatccaatcagaacttacttccatttcagagccgagaattagacgcccattggtcccaggtaacgcccttaaagccaagctacacattttatccttggcacatgggcacaggccctagacatcatgttgacaaccctaaaattgtcgagaaacggcggcacatccccaataaagtcaaacatacttcagaagcccaatgaaaacccttatcccccttcgtaccaactttttattccattccttttccagccaaagatttccttagaatcttcgttaactgttgaacgtaatttccctttaggtacagactctgccgtggttcgggccctttagatttcgcgaaaaggcccgtgaacgggttttttgatccaacacgcgtttttccgttaaagttaaaaagggctcgttccgttaagccccttggacctgcagggagccacaggcaaacattttagggaagacacagcagcgaccattctgtatacatgaagaaatctctgcgaaggggagcaacaccattatatggtgacacgcgggaggataggcgaggaaataaaacagacgacgagggataatacacgtccgaagaacagtgtggggcacacaatgtgctgggcccaataacaaggacgaggttgtccacccctaa

SEQ ID NO: 654333 - DNA, 226 bp, Homo sapiens
tggttcccttttcctgtggattttaaactggaatccttcctggtggttggttccctgggtggaaaccattccgtaaagcctcctgcctccggatggatttcctttcctggttcctgtggccttcccagggtttttcctgggtccttcccagtgttttttggtccttccccccttccctgcgaaaaaaccccccctggattaagccattaaatttggtttgttagga

SEQ ID NO: 654334 - DNA, 1301 bp, Homo sapiens
agctcctccgaggatggggtcaccagtctctgctcttcccagtctctccggcgcgctccaaggggcttcccgtcgggaccatgcgcggcctgtgagctcccgcttggtcctgctggcgctaggtcctctagcctggtggccctcggggcgcgacgtcgtgtccctgcgtgcctgccgggtcggagaggactcgtgcttgatccatagattgtaccctcgtcgctgcggaaccacctggtgcctggtgggcgtcacattcattgcgtggaacatagacgaggcacacgggagatgtccttctttcgtcgtattctcgcacgagcacgtggagacctagcaacgctatgccacgcctggagcagcacgtacgacatcagcgatgtgcccaaggaagcctgctagagagcaatctatgcgtgagtgtcatccatcaggacagcccaaaacggaggaaccgagcagaacgcgatcagcccaaccctccatacccgaaaggctcgcttggcggcagagtcgatgccaggccttctccggtagcgagcatttccatggagcgcattcaggcgaagctagacgtttccaacaggatgtctagagtatctgacacacgggcctgcagggttattggctaggcaactttcatccattgacgttcaccaacgacatatctgtcaggcgccttgaaagaggagaggggaaacgcatccgcagcccatgaagaacgcaaaggcacactgtcagtcaatgtgtcgttggcgtcctccttcttccacagacaggaaggaaccgacacatgccaatagaacgtcccccggtaaaggatgaatctggccggtttacactgtcgacacgcgagttccggggcatccgtaccagcgcatttccattcctatagccaacacaggaattggttaccgtgtaggctgagcagagacacagtagtttactcgcaccaggcaactttccgtcgggtagcgtccatctgatgccacttcccctagtagcaactgaacaccgtgtccggggggagtggcttccacaagcccaagtccacttcttgaccttgggcttctcaacgagcctacggtctcaaggccgttgttgcaacccaaattagctccgaaaaccgacgaaggtatctttgccccagaagatataacatgggcctgtagctagacattactcactagggggcttaaccctgcgtcggcgttaaaggcatgtaccagaggcgcccagggaaagcatggctttaccctatctagccacccacgcagacagaggtcgtaaaaccaccggaa

SEQ ID NO: 654335 - DNA, 978 bp, Homo sapiens
tgggttggggctctaaagggggtaaagggggtgctaataggggtaattaggggcccatattttcaaagattttaaggggagaattaattctcataggaccagaggggcatgtgaaacgtggtggttggcctccaacagatttctcaagagcattggaccgtagttataccccgcggtgtgcggtgttagcgcgggtgaaagaggggttgtgggtctaacaacgttcgcgggaaattgtgcattcgtgggtttataaaagccctataagtggtggcggaaacagtcctcagtggagtgtgcaaaggagagatcgtgggtgaagtggtaattatattatattaccagaattggggggggtttacaaatgcgggagagtgtacatacttcagattgtggctacaacggtcaaagggaaggtcagaaagggtgtggcccgggggtctcataggaaaaaataaaggggggcggaccaacgataagttgaacgggcaacgcttgcacagaatttcaaagctccgcgcgcgaaaacctgcgcgggagataacacctccgaagaagggtctcacaagaaatcacccatgttggggggggggggccaaaatgtggggcaacttgcggaagtgcgccaacacgggggaaggggagaacctccggttgaggacaccccaactcgacatgcggggcgtaaccagccgtgcatacacagagggaaagtgccgccgctctaaggcgggaccaagtggggcgccgaggggcgaccgcaacctgagaggggcaccatagggcaaatgccaaccgggcgacgggcgcccgcagcagacaaacaaaggcttcaaccagcaccagagggggcgattcaacaataattatcccccctgaggaacacggcggcatctgctgagacaaaaattggatcaacaaccaaactgcaaacacaatccaaagaaacaaggcggctgtcggcgaagaagcggtgca

SEQ ID NO: 654336 - DNA, 471 bp, Homo sapiens
  misc_feature (36)..(36): n is a, c, g, or t
  misc_feature (98)..(99): n is a, c, g, or t
  misc_feature (341)..(341): n is a, c, g, or t
  misc_feature (366)..(366): n is a, c, g, or t
  misc_feature (434)..(434): n is a, c, g, or t
ggtcgacaaattaccagccagcccagctactcaggnttgcttgcacttgggagactgaggctacagtgagccatgcttgcaccactgcactccagccnnggaaacagaatgagaccctgtcccaaaaacaagaaactcaaattatttatttaacagagatatccagtcttttggcttccctgggccacattggaagaagaatggtcttggggcacacatagaatactaaaatacactaatactgacgatagctgataagtttaaaaaaattgcaaaaagtctcataaatctcataatgttttaagaaagttctccaggcacggtggctcacacctgtaatnccagcactttgggaaggctgaagcnggcagaacaccaaggtcaggagattcgagaccattctgggttaacacgatgaaaacttcatctctacntaaaatttccaaaaaaaaaagttcgacgccggccgga

SEQ ID NO: 654337 - DNA, 203 bp, Homo sapiens
taccgaataacatctggactaggctgaagcccacggacagacccagaatcaccaacagggaaacggggcttcctcccccgagccgagcttgtgtcagactgacagcatgagaccagcaggcagagacaagccagcatggcaaaagcaggcatccccaaagcaggcaagcaagcgtgtgcggcccgtgctgactccacagtccc

SEQ ID NO: 654338 - DNA, 383 bp, Homo sapiens
  misc_feature (46)..(46): n is a, c, g, or t
  misc_feature (383)..(383): n is a, c, g, or t
caaccaagaaaaaaaaaaaagaaaaaaaaaaaaaaaaaaaaaaacnggggttctgcatagtcctagtaatcgttaacgtgcacggatcccctcagccagcatagtaggtattgtaagtgtgtgagtggtgttggcaatcgaaatgagtgggtgtgtaaaggatatagtaagtgtagggggcatgaaaaagactagagtgttgttgctggccggtagactgtggggagccaagggattccacagggtcactgttgagtttgggggcataaccatgaaaataagcatatgcctaatagtaataattagtagtgataagtaaggctgataagggagaggggatccgtgcacgttaacgattactaggactatgcatattttgggtn

SEQ ID NO: 654339 - DNA, 1003 bp, Homo sapiens
  misc_feature (280)..(280): n is a, c, g, or t
tcactaacccctaatgtttaatgtctggaagccataaagagtcccccgagtggagaccaccgtgtggaataaagcccccgttggaagtccgcgccagctggtgtagccggagtgtcaaacagagttccaaagtcgtctgtgatctcttgcctaaagacgaaacaagtaaaagaaggctcccacacccgacggtgtattacgggacacctgaaaccttggttcgaaaatgctcccaagatgcttgggccgaactctgctattgtactcgagtctacggccntgttccaaagcgagtggtgtcccttgacgcattcgcatggacgcactatgaagaacgccatgctgcagagcacgtgtccgttgcggtatacaaaggggaaccgagtccccattcggtagccctcgtatctcgcgtgccatggcaccggcgaaaggttcactgaaagaccccacaggggagcttgcccaagttgaatgtcatgacgcaactcgcggaaaaccacctatccctcgccctcacctctgcaccgctcccctccacgcacaccgcacccagtcactgcgcctccgcattggagcccaccgtagataatagtagcccgtatgatcacagttagacccaccacaatcacacgtcctgcacactggacccacggcccacggcacaagcaatcccctgcgcgtggatttcacctcaccactattgtaaccacgatgttgagtgaccaagactcatgtggccctgtatcgtacagagagctatagtagattaaactgtgacggcataaccacatgacttgtccacacgcatagggccaggcattcccctgtcctcccacaggtcggctgcttgcgcaacggctgttcagatcgtgcacttccccaagtcggcactgagtggcccagcaaccaccttagcactgccaccccactgccctcctgggccttctgagactggatgggcacctggaggggttcaggttttaacttttttaatgtaagt

SEQ ID NO: 654340 - DNA, 578 bp, Homo sapiens
  misc_feature (46)..(46): n is a, c, g, or t
  misc_feature (578)..(578): n is a, c, g, or t
caaccaagaaaaaaaaaaaagaaaaaaaaaaaaaaaaaaaaaaacnggggttctgcatagtcctagtaatcgttaacgtgcacggatccccctgatgaaagagtagggaagatcggatgttcagcataataactaccatagagggattaagtggtgatagcattgtaaaagcgatgcagggaaaggaaattacctccacttcagccagcatagtaggtattgtaagtgtgtgagtggtgttggcaatcgaaatgagtgggtgtgtaaaggatatagtaagtgtagggggcatgaaaaagactagagtgttgttgctggccggtagactgtggggagccaagggattccacagggtcactgttgagtttgggggcataaccatgaaaataagcatatgcctaatagtaataattagtagtgataagtaaggatgataaggaataggaactaagaccggtgtgatataagaagttgtggtatgcataatgttggtaatagtccctactctttcatcagctgataagggagaggggatccgtgcacgttaacgattactaggactatgcatattttgggtn

SEQ ID NO: 654341 - DNA, 399 bp, Homo sapiens
  misc_feature (46)..(46): n is a, c, g, or t
  misc_feature (399)..(399): n is a, c, g, or t
caaccaagaaaaaaaaaaaagaaaaaaaaaaaaaaaaaaaaaaacnggggttctgcatagtcctagtaatcgttaacgtgcacggatcccctcagccagcatagtaggtattgtaagtgtgtgagtggtgttggcaatcgaaatgagtgggtgtgtaaaggatatagtaagtgtagggggcatgaaaaagactagagtgttgttgctggccggtagactgtggggagccaagggattccacagggtcactgttgagtttgggggcgacacctaaatgctgtttaggattagtctgagtatattagccaggttccaggaagggctgataaggagagggctgataagggagaggggatccgtgcacgttaacgattactaggactatgcatattttgggtn

SEQ ID NO: 654342 - DNA, 325 bp, Homo sapiens
  misc_feature (46)..(46): n is a, c, g, or t
  misc_feature (164)..(164): n is a, c, g, or t
  misc_feature (325)..(325): n is a, c, g, or t
caaccaagaaaaaaaaaaaagaaaaaaaaaaaaaaaaaaaaaaacnggggttctgcatagtcctagtaatcgttaacgtgcacggatcccctctcccttatcagcctgtgtgtttgggtcatctgcaaaaatgtggttttgaagaggagcgaatagactcctanctgaagctgagagtaatgagccatggggacacctaaatgctgtttaggattagtctgagtatattagccaggttccaggaagggctgataaggagagggctgataagggagaggggatccgtgcacgttaacgattactaggactatgcatattttgggtn

SEQ ID NO: 654343 - DNA, 172 bp, Homo sapiens
taagaatataagcgattagcaacacacacacacacacacacggagatgtgctcatgatacgttagatataatataaggaaaataaagtacaagtgatttagaaagaagcgctaagtgggatcagtaatacaacacatgatccccacacagtggggaactaaagggggccccg

SEQ ID NO: 654344 - DNA, 688 bp, Homo sapiens
ggagagttggtggctggacctcctgcgacttccgatgttgcgatgctgtacttctcttggtggtgggcggctcggccatctgcagagatgtgggcagcatggatcaggatggccattgcgggctcatgcacagacgagacgcagcccgagactcagactggggaagcaaacaggggctggacaggccaggagagcctgtcggacagtgatcctgagatgtgggagtggctgcagagggagaaggacaggcagtgtcgctggccgtggaggcgtcattgccgtcagagaactgtctggcagccgagcgtgcgcgtgggaggcccgtggggtcctgtctgaacaacaagtactcggagggtgatcctggcaagagatactatgggggagcagaggtggtggatgaaattgagcatgctgtgccagcgccgggccttggaagcctttgacctggatccgtgcacagtggggagtcaatgtccgagcctaatccgggtccccagccaagctggacgtctacacagcaccttctgcaacctcacgaacggatcatggaggctggacctggccgatgggggccagtctcaaccaaggctacatgtctgaacgtcgagcggatatcagcacgtccatctatctacgagtctatgccctataagctcaaccccaaaaactgggctcattggagtac

SEQ ID NO: 654345 - DNA, 115 bp, Homo sapiens
  misc_feature (6)..(6): n is a, c, g, or t
actctngacgactccctgacgacgaccgtgttgatgtacggggaagttggtggctgcagctcagcgtggttttctcctggtgtccagcagaaacggcggcggcgcagtgttgtgg

SEQ ID NO: 654346 - DNA, 259 bp, Homo sapiens
  misc_feature (71)..(71): n is a, c, g, or t
  misc_feature (104)..(104): n is a, c, g, or t
  misc_feature (126)..(126): n is a, c, g, or t
  misc_feature (149)..(149): n is a, c, g, or t
  misc_feature (201)..(201): n is a, c, g, or t
  misc_feature (211)..(211): n is a, c, g, or t
  misc_feature (227)..(227): n is a, c, g, or t
agagagagagagagagagagagagagagaggagaacctcggcgctccggcggcgcgggcaccacgagcggnctcgcagcggctcagaggaggcaggcgagtgancgagtccgaggggtggccgggnaggtggtggcgcgcgaagatggnccgcaagcaaaggatcgtatggcaacgagaagcacacaagaacataccagcncggaacgtcncaagactcgagaaatnccccgagagaggcgtctgtagacctggttatt

SEQ ID NO: 654347 - DNA, 161 bp, Homo sapiens
gatggcgactgtatacacgtacatgtactacacatcatgcactcgatgtttagactatcggtctagccatatatatccagcacttcctccttaaaatggcatccgtaggccatctcgcataccttcctgcgtcactccattccttcaaacgttaaataagt

SEQ ID NO: 654348 - DNA, 206 bp, Homo sapiens
  misc_feature (88)..(88): n is a, c, g, or t
  misc_feature (201)..(201): n is a, c, g, or t
gccggtaccaagcgactctccacccacgcgtgggctcaacttccttcccggcttttccctccaagctcctattttactggtgtcagcnggaaggaaacctttccctctggggacctctttaccctcggtgaccggtggggttagaccagagagggactctggggtcatgtctggctcggggctggcggccgggcaggactngaacg

SEQ ID NO: 654349 - DNA, 528 bp, Homo sapiens
gagagaactagtctcgagttttcgaggtatatttttctgaggtaggcaaattgttaaatccggcccatttgcccttctgaaaccttgaaacacactccaaaaacagcacgcacttggaccgtgggtggggcaaagtgggcactctcgccggatataggtatacttacagtgttcaatataattccgtgtccatataacggtgtgctgtaatagaaattacacttataagtgtgtttcacaaaaacgtgacgagctccagcgggggctctgcgagagccacaatgcccagggcgggaactgtggggtctcaaaaacacactctccgagggcctgtgccccatatgttctcccaggcgtggcccttggagctcccggaacaattctctaataagctgtgcgccctttgtgtgacactgtgtggggcccccaaagggaatattattctcactggtggagaggggggcgccccgtacagactttgtgagaaccccaccccacacttggtgtctcttatgaggggaaatatcg

SEQ ID NO: 654350 - DNA, 160 bp, Homo sapiens
tagcggaccctaacctaaatggctggtaaccgccggaagaaaccacatagagatgtaagcataaaacctcaggctgacggcccacccgaagcatgaagacaatctaaggcctctaagccagggacaggaatctatggaaggacgtctctaggtctaggca

SEQ ID NO: 654351 - DNA, 335 bp, Homo sapiens
  misc_feature (264)..(264): n is a, c, g, or t
  misc_feature (311)..(311): n is a, c, g, or t
  misc_feature (323)..(323): n is a, c, g, or t
tcaaataaggattttgggtttttttggaaacagggtctcccactgttacccaggctagtgtgcagtggtacaatcacaactcactgcagccttgacttcctgggctcaggtgatcctcctgcctcagcctcctgaggagctgggattataggcgtgtgccaacatgtcaggctaattttttgtattttttgtagagatggggtctcaccatgctgcgcaggctggtctcaaactcctggactcaagcaatcctcccacctcagnctcccaaaatgctgggatttagaggcgtgagccacttgtgccccagncccaagtaaggnaaattttgttaa

SEQ ID NO: 654352 - DNA, 343 bp, Homo sapiens
aaagtagttgtgtctaaaataataaacacattataactacacacacagtcacacacacacacactcacacacacatacacacaaacaggcataccttctagatattgcgagtttgattccagaccactgtgacaaagccaatattgcaataaaacaagttacataaatattttagttttccagtgcatataaaaattatgcttatactatactattgtctattaaatgtgcaatagcattatgtctaaaaataaaatatacaaatctgaattaaaatattttattgctaaaagatgctaatgattattagagccttgaatgagttacagtctttttgctgatg

SEQ ID NO: 654353 - DNA, 376 bp, Homo sapiens
gacagacaggcaggtgcaggagacggggtgagcgcttttgggctctagccccatggcagcatctaggggtgtgttacaattaatgctcttttagcagttgctgtccgcggatggctaagtgttaaaccagctcagtggagagtcagggtggcagccttttacaccctgtcctcttggtacccgggtctttgtctagcatccaggaagaatcaggtcctacagacttgaaggatggtgaatacagagattttattgaatgatggaggaggctttcagcaggatggatggggagctggaaagcggatggagtgagaaggctgggggccgacgcccaagagctggagagaagagcaatcgggaaagcaatgaaaaagag

SEQ ID NO: 654354 - DNA, 155 bp, Homo sapiens
tttagctcatgactagacctgaaacagtaaatttggacaatattaaagactcaaataatcaatctccaaactgctatctaacacttgtcaaatcagattggatgcatggcaaatcaggttcatgtgttgcatctttatgtcctttggccatatcc

SEQ ID NO: 654355 - DNA, 981 bp, Homo sapiens
  misc_feature (809)..(809): n is a, c, g, or t
gggaggagcggtacctacaatgactggaaactattcttagctccgttcactgactgcaaaggttcatcaccctccgtgctttcagatttggttgagatataggctattcttcacaactcagctcttgaagagtatcaccaactgtctcagtgtgtgagttgcaccctatgcatcttgatacgctagtgccagctgaactacattctgagaagatactctcaacaacgatggtttcacccatgtactcgctcttgtactatgcatatacactaggaatggggttgtgtggaatcttcagcacattctcgctattctcatgtattccacagcagctacagtttgagtaaacaatcatggggcctggcaagaatggagtgctttccaagtgttgtaacgatggtcctaaaaggaggtacaacctagcttaatgcccgtggacttggtaattactcaactacattcaaaacaaagagtattcccagctcagtgacaagaaagtccgtgtgtttgcatcatggccatcttcttaatgtatgctaccaggcatgcaggtaagactgaatctggataatcaataccttggaattagtcaacatacgtcccacatgcccataggactgcgatctgcgaactgtcaccgttgttttagacaatcagacttgcaatgttccagaatacttggatggtgtccaccagtgtttggatcgcagaatgattccaacattggcattagtgctaaccattgacctctacactgtgagtactctgagtggttaagaattgtcagggctcaagcataaggagcaggngcacacgtcatttgggcccgaatgatacgagggggggtggtacccgtaaattttccacgaaaggacggtttgaggggaacgtcacggaggagaaggatggtcaaaggaaccggaagtaacgggaacaacactcttgtggaaacggcgcggaaaaggacaaaggaagagggca

SEQ ID NO: 654356 - DNA, 499 bp, Homo sapiens
ctacaggatccttgacagacgccacgtgggccgacagacccgcatgcgactgaccgacgatcaggccgatcaggaagatcgtgacaaacagatcgccaccgatattgcgggcgatttcataggcagccgaatcgacgttgtcgaacacgaacgacggatgagccaactgtacgaagtacgacaccccaacgaagatcaggccgccgatcagggtgatcagcatgatcgcccgcggaatggtccggcgcggatcgcgggtttcttcggtcagggtactcaccgcatcgaagcccaggaatgaataacaggcaatcgccgcgccgctcatgatcaggggcatctgcatatcgccgctgagaaacggtgccatcgtccacaacggcttgctggcgtcaccgccgatgtagtggatcgccaggaggacaaaggccaccagcaccagcatcatgaagccatagacatcatagatcttatatgcccagaaagacgtggcgtctgt

SEQ ID NO: 654357 - DNA, 141 bp, Homo sapiens
taagcatatcaggctttctctcctgctgctgaactggggcaacagcctgcagatcctggaccaggttgagctgcgcgcacggtaccctccatccataccccacaactctcctgcctcccgagccctcaactttgggtaccg

SEQ ID NO: 654358 - DNA, 102 bp, Homo sapiens
ttaaaagctaccgctctgaatgagaagtgacgaaggttatatactctgggatgcaacctatcatgttcaaatgtttgaaatcccacgatgttagaccaatct

SEQ ID NO: 654359 - DNA, 377 bp, Homo sapiens
taaagcgaggtggtcaggatacgaggatgtgaatcgaactactattttaatataatgatgtgagataaggcctctttcctttcctttccacttttgcttcatgcctatcaggacccataacaggcctgatggtcactacgtgtgaaccgtgtgaactgctcgcgtgtacaccgggctcactgtggacaccttcgcaggacacgcatcatctgtgtgatcgatgcgaccacagccattctttccctccctgcagatgagagtcgacagtgagagagagctgacccgggacgtctttcatttccataagcagcgcgcattgtggtggcactagctcctgctccaatatgtcacagatgacagagcaggttggaaattac

SEQ ID NO: 654360 - DNA, 242 bp, Homo sapiens
  misc_feature (149)..(149): n is a, c, g, or t
  misc_feature (190)..(191): n is a, c, g, or t
  misc_feature (241)..(241): n is a, c, g, or t
gcaggatggcatgggatttcattatgctactcagaatcatacacaatttaagattataaatggtttacttctgaaattttccatttaatatttttcggactgcgagttgactgcgagtaactgtgaactacagacaagtgaaaccatgngctaatagtaatacgtactataatcactaataggtagaatnnactatataagcttgttcttttcttctttttttgtttcatccgccccatgng

SEQ ID NO: 654361 - DNA, 174 bp, Homo sapiens
tatctgcaaggcagaccctgagggagacctactccagctagggaaggtgagtgtcccagaggaggagctggacgccatgctgtaagagggcaagggcccataatcttaccgtcttcctcacgctctttgggagacgctcaatggcacaccctcgaggacgcactctgagcgccc

SEQ ID NO: 654362 - DNA, 396 bp, Homo sapiens
ttaaaacttttacgatttggattatttgcattatactggatgagcatattcaatgcaaaaatctgaatactgaaatgctccaatgagcatttcctttgagtatcatgtcagcgctaaaaatgttcctgattttggaggatttctagatttttggattagggatattgaacatgtatgaaaaatgtatactgcttctaaaatattacatttttagcatgtttatttcaagacagaatgagtatttgataggttatgtcctaccagttcaggatatacaatttgaatagaggtcaaatcctgtttcagtaaattccaatgtactaaaaaccttgaaaatttaatgacagcctcaaaactacaatgcttaacattatcacctttagcataggacactca

SEQ ID NO: 654363 - DNA, 510 bp, Homo sapiens
tcagcagcggaaggctaagtgggatgaggcaaggggatcacttgaaaccaggaattcagagcagtcctggcaacagtgagaccctgtctctacaaacgaaaaaaaaaaaaaaaaaaaaaaaccggggcaccgccggtggctccagcttactttactttattcggggaagggctaagggtgggaaacccaaaatctcgcttaactatctggggatgtggcgtggagggcttgccccgggaagccccgggggtctcgcccccactgtgcccacacagcccgtggggaaaccaaaaagaaaaaaaaccccgtgctcaattttaactcaaaaaccaaataaaaattgaaatttgaaattgcaatgtgcccccgtggcttagggaaaaggtgcgttgaacagagggggaatctctctctttaaaagagtataacaaacccgtgtcagggagccctgtgtcaaagagccttgtgcgccccacgggggaccccgtccgcattatatcaaacaaaaag

SEQ ID NO: 654364 - DNA, 120 bp, Homo sapiens
gaactacgggtagtactactagttaagagaaggacataggacaaggtacgagacattcgctgcgcagtggtgcagatgccgctctagtaggagggcagctagtggcttctacggtgcccg

SEQ ID NO: 654365 - DNA, 378 bp, Homo sapiens
atttctcagtaatcatgtaaaccttttttttttccttctccactctaacaaaagtacaagaacaaaactttggctgaggtctgggacctccactactggtagtaatgtgggcctggacagcatggcaggtctgtcggcagttcctcaagtcgggtacaaaggaacgatcatcatctctggcccctcccttggtcacagctgtggtcgtgacacgatcagatatgtctgaatgcacgtcactatacactttaacaacctaggcaaagtgtaagctatcgtggcccaccgaattgcgaggtagcacacaaaacaaacacaacattgctcggttcactttagcacagacgtggaaaaggctatccaggacactccctggag

SEQ ID NO: 654366 - DNA, 332 bp, Homo sapiens
acacatcaagtgtacgattgaaatagcttaaagtaggaacagacatctaatctccatatatacctataatcaggagaaatataattgagcaccatttcacagacagttctgaaacacagaggttaagtcacttgcctggggatacacaggggcaggcacggtggtttacacctataatcccaacactttgggacgccgaggtgggtggatcatcacctgaggtcaggagttcgagaccagcctggccaacatgatgaaaccccgtctctactaaaaatacaaaaaattagccggtgaggtggcgggcacttgtaatcccagctacttgggag

SEQ ID NO: 654367 - DNA, 352 bp, Homo sapiens
catcagctcgctaccgttaaggttgtgctgggtcccagcgtctgtaggaagcactttgggaggcccaggcaggaggatctcttgagcccaggagcttgagaccagcctaggcaggatggggcaacctcttctctttagagaataataattttacaaattagccaggcgtgatggcgggtgtctgtcgtcccagctactccggaggctgaggtgggaggatcgcttgagcccaggagattaaggctgcagtgagccatggtcatcccactgcactccatcctgggtgacggagcgagaccctgtctcaaaaataatagcaatcatcatcagtagcagcagcagcacaacctgg

SEQ ID NO: 654368 - DNA, 173 bp, Homo sapiens
cgtggttagacgtggtcttgccaacaatatagtttggtgtttcggagccaagaggtctctttattactatccacgatcgagggcatattgcttcagttctcaatgcatggccagaagatgtcatcaaggccattgtggtgacttgatggagagcgtattcgtggcttgtgggt

SEQ ID NO: 654369 - DNA, 1109 bp, Homo sapiens
  misc_feature (257)..(257): n is a, c, g, or t
  misc_feature (799)..(799): n is a, c, g, or t
  misc_feature (801)..(801): n is a, c, g, or t
  misc_feature (803)..(805): n is a, c, g, or t
aggcaagatttcaatagcagatacagtgcactgaatgtccaacatcagatgttgaaaagccaacacgaggagctaaagaaacagcacagtgacttggaagaggaacatcgcaaacaaggggaagacttcagtagaacatttaatgaccataagcaaaaatacttgcagctccagcaagaaaaagaacaagaactttctaagctaaaagagactgtatacaatttgagagaagagaatagacaactaaggaaagcacnccaagacatacatacacagcttcaagatgtcaaggtaaaagaaaaccaaacgtttcactatttagtgtttgcctgctttatttggtagaatgactttaaaaagtcattccctaattggcctgctttacaaatccacgttgttattgtgggctttgcattaactagagtgtacctaatatttttaccacttcagcattgtaagctaaaagatggtctgaaaatctgaatattctcattagtactgaaattattctcatgctagttacatattaataagcttttatttataaaagtttactaataatgagaaatttgtttctttggttttgatttcattgtaaataaatgattatgatatttgggtagcacgttttagattttggaatactacataaagcgtagtgttctctctacgatgatttttaaacttaacacatgctgctacaacaacaaataaacaagcaagtaacatttgggtagccatatcacgatcagccaaagaagaatttgtcgtagaatgttaaagctcaacatgtaaaatncntnnntgtgtcaagcaacagcataagaatttactctccgagcatgaacaacttgtagtgactttggaagaccacaagagtgcactagctgctgcacaggttagaagggtagcagcctctgtgggttcttttacaagtctgcttaacatttctcaattcctttatgcatgtagtctcttacaagccaatcttcagtgagttccttaggacagagctatcctaatcctgaggatcatgcatgctttccaaattcaatcagtaagatattaacttttgattattttttgccctggtgtgcggtacataatat

SEQ ID NO: 654370 - DNA, 121 bp, Homo sapiens
cccaggggtttaaaaccaaaccaaaaccaaaaaaacccccaggggggttttccaggtggttgcccccaaccctttggaaagaaaaggggggaaataaaaaaaaattttttttccctgggga

SEQ ID NO: 654371 - DNA, 165 bp, Homo sapiens
  misc_feature (75)..(75): n is a, c, g, or t
gcttctgtggccatgcttcactagtctagctctcagcagaaggggcaaacctgtatgttgacatccaggtttggnctcccctgctacccatggaatattttatctgggacctttgttgtacacagaaaacagttacatgtgagcagtgggggcattgttacaaga

SEQ ID NO: 654372 - DNA, 280 bp, Homo sapiens
  misc_feature (9)..(9): n is a, c, g, or t
  misc_feature (12)..(12): n is a, c, g, or t
  misc_feature (14)..(14): n is a, c, g, or t
  misc_feature (16)..(16): n is a, c, g, or t
  misc_feature (20)..(20): n is a, c, g, or t
  misc_feature (90)..(90): n is a, c, g, or t
gatagaatngancngntacnctcgcgacgtgtatccctcgcgaacgtgttatccctcgcgaacgtgttatccctcgcgaacgtgttatcnctcgcgaacgtgttatccctcgcgaacgtgttatccctcgcgaacgtgttatccctcgcgaacgtgttatccctcgcgaacgtgttatccctcgcgaacgtgttatctctcgcgaacgtgttatcctctaacaaacttgcacatgtactcctgaatcgaacaacaacgtcaagaagaacacaactgcttg

SEQ ID NO: 654373 - DNA, 1150 bp, Homo sapiens
gattgcagaattgaagagaagcttatgcactataagacaaagatggtgatggaactataaacaagcgacaggaattggtgtaacctgtaaatgacgatctcttgaggcaggaatcccatgatgataggcagagttacaggacatgacttaatgaagtagatgctgatggtaatggcacaagttgaactttccctgaatttctgacaatgagtggcaacgcaaaagatgaacatcgacacagacaggtgcgcgaacgaaacttacgacgaacgcacttgccgtcgctgtttgactaacgcgatggcccacgtggggcctactacttacgtgctggcacacaccttcgcccatgttgactgaccgaaacccttggacgagaaggttaagcagattgaaggaagttgaatgaacatgatcagcggaaggcagatattggaatgggtgcatggtcacagtaaacctatgaaggagtgtggtaccaacttgctggacaggccaaagtgacaggaccctggtacccgacctggtggtaacaatttactgggtacaaaacactgggtcaatccggcccacatatccttggctcgtaacgtcatctggtcacacaggttacctccgctaacgggtccacaacacatatgccatgcatacgtacctaagggcactcccaattccccccatggtgacccaccccttactcttatggccactggtcccttaaacacctaattgacgacaacgtgcgaccagcgtacgctgttgcactgtggcgctacaccggagtaactccaaggccctctgggacattctacacctcagacggcacgtgcccaagcacggcgcaaccacgcgggcgaaccccatacaaccagccaccccaccccaagagaacgcccaacatcagaccgccgacacaccgccctaaccagcggggccatacccaaacacacccgtccaacgcggcagcacaccggcactacaacaccccacaacatacaggccgcacaacagctcccagcgcgccagcacacgaccaacacagccgacaccacagctggtcaacgaaaacaaacaccccacagccgcccgccggccccccgccctggccccacagcacccacacccacacccagaccgcggatacagcaca

SEQ ID NO: 654374 - DNA, 445 bp, Homo sapiens
  misc_feature (9)..(10): n is a, c, g, or t
  misc_feature (25)..(26): n is a, c, g, or t
  misc_feature (28)..(28): n is a, c, g, or t
  misc_feature (44)..(44): n is a, c, g, or t
  misc_feature (55)..(55): n is a, c, g, or t
  misc_feature (58)..(58): n is a, c, g, or t
  misc_feature (74)..(74): n is a, c, g, or t
  misc_feature (78)..(79): n is a, c, g, or t
  misc_feature (91)..(91): n is a, c, g, or t
  misc_feature (97)..(97): n is a, c, g, or t
  misc_feature (109)..(109): n is a, c, g, or t
  misc_feature (120)..(120): n is a, c, g, or t
  misc_feature (125)..(125): n is a, c, g, or t
  misc_feature (141)..(141): n is a, c, g, or t
  misc_feature (146)..(147): n is a, c, g, or t
  misc_feature (150)..(150): n is a, c, g, or t
  misc_feature (152)..(152): n is a, c, g, or t
  misc_feature (154)..(160): n is a, c, g, or t
  misc_feature (167)..(167): n is a, c, g, or t
  misc_feature (172)..(172): n is a, c, g, or t
  misc_feature (175)..(175): n is a, c, g, or t
  misc_feature (178)..(179): n is a, c, g, or t
  misc_feature (181)..(183): n is a, c, g, or t
  misc_feature (186)..(186): n is a, c, g, or t
  misc_feature (189)..(190): n is a, c, g, or t
  misc_feature (195)..(195): n is a, c, g, or t
  misc_feature (202)..(203): n is a, c, g, or t
  misc_feature (207)..(207): n is a, c, g, or t
  misc_feature (209)..(210): n is a, c, g, or t
  misc_feature (217)..(217): n is a, c, g, or t
  misc_feature (220)..(220): n is a, c, g, or t
  misc_feature (228)..(228): n is a, c, g, or t
  misc_feature (242)..(242): n is a, c, g, or t
  misc_feature (255)..(256): n is a, c, g, or t
  misc_feature (258)..(258): n is a, c, g, or t
  misc_feature (260)..(262): n is a, c, g, or t
  misc_feature (265)..(265): n is a, c, g, or t
  misc_feature (272)..(273): n is a, c, g, or t
  misc_feature (277)..(277): n is a, c, g, or t
  misc_feature (280)..(281): n is a, c, g, or t
  misc_feature (283)..(284): n is a, c, g, or t
  misc_feature (286)..(287): n is a, c, g, or t
  misc_feature (289)..(291): n is a, c, g, or t
  misc_feature (294)..(294): n is a, c, g, or t
  misc_feature (297)..(297): n is a, c, g, or t
  misc_feature (309)..(309): n is a, c, g, or t
  misc_feature (313)..(314): n is a, c, g, or t
  misc_feature (320)..(320): n is a, c, g, or t
  misc_feature (322)..(323): n is a, c, g, or t
  misc_feature (328)..(328): n is a, c, g, or t
  misc_feature (335)..(336): n is a, c, g, or t
  misc_feature (348)..(348): n is a, c, g, or t
  misc_feature (355)..(355): n is a, c, g, or t
  misc_feature (357)..(358): n is a, c, g, or t
  misc_feature (360)..(360): n is a, c, g, or t
  misc_feature (373)..(374): n is a, c, g, or t
  misc_feature (385)..(387): n is a, c, g, or t
  misc_feature (389)..(389): n is a, c, g, or t
  misc_feature (391)..(394): n is a, c, g, or t
  misc_feature (397)..(398): n is a, c, g, or t
  misc_feature (402)..(403): n is a, c, g, or t
  misc_feature (407)..(407): n is a, c, g, or t
  misc_feature (412)..(412): n is a, c, g, or t
  misc_feature (418)..(418): n is a, c, g, or t
  misc_feature (438)..(438): n is a, c, g, or t
  misc_feature (444)..(445): n is a, c, g, or t
catgcctgnnggtcgactctagagnnanccccagtggtgttggnggtgatggaanagngagcgaggaggaatgngacnngggcggcggganaaacgngcccggggcaanagtgagagttngcgcngagtggggtgggtagnggganntgngngnnnnnnnaagagtnttccncgnganntnnntgnagnntaggnagagttnnaatnanngtagatnggnggtgttgngaggattatgcgtnttatgtgctttanngnannntgngtacgtnngtgncgnntnngnncnnnttnctngccaccccaganttcnngtcttncnnggtgntgctgcnnctgccgcgattnagagatnanngngtgagcgtgtgcnncgtctccgccnnncntnnnnagnntgcnncgtnttgtnccgtcntcgtgcgtctcccccgtgantggtgnn

SEQ ID NO: 654375 - DNA, 690 bp, Homo sapiens
  misc_feature (2)..(2): n is a, c, g, or t
  misc_feature (71)..(71): n is a, c, g, or t
  misc_feature (95)..(95): n is a, c, g, or t
  misc_feature (114)..(114): n is a, c, g, or t
  misc_feature (118)..(118): n is a, c, g, or t
  misc_feature (121)..(121): n is a, c, g, or t
  misc_feature (132)..(132): n is a, c, g, or t
  misc_feature (150)..(152): n is a, c, g, or t
  misc_feature (154)..(154): n is a, c, g, or t
  misc_feature (160)..(160): n is a, c, g, or t
  misc_feature (163)..(163): n is a, c, g, or t
  misc_feature (165)..(165): n is a, c, g, or t
  misc_feature (169)..(169): n is a, c, g, or t
  misc_feature (172)..(172): n is a, c, g, or t
  misc_feature (175)..(176): n is a, c, g, or t
  misc_feature (184)..(185): n is a, c, g, or t
  misc_feature (187)..(187): n is a, c, g, or t
  misc_feature (197)..(197): n is a, c, g, or t
  misc_feature (199)..(199): n is a, c, g, or t
  misc_feature (208)..(208): n is a, c, g, or t
  misc_feature (226)..(226): n is a, c, g, or t
  misc_feature (231)..(231): n is a, c, g, or t
  misc_feature (236)..(236): n is a, c, g, or t
  misc_feature (241)..(241): n is a, c, g, or t
  misc_feature (252)..(252): n is a, c, g, or t
  misc_feature (261)..(261): n is a, c, g, or t
  misc_feature (264)..(264): n is a, c, g, or t
  misc_feature (267)..(267): n is a, c, g, or t
  misc_feature (272)..(272): n is a, c, g, or t
  misc_feature (293)..(293): n is a, c, g, or t
  misc_feature (296)..(297): n is a, c, g, or t
  misc_feature (304)..(305): n is a, c, g, or t
  misc_feature (310)..(310): n is a, c, g, or t
  misc_feature (319)..(319): n is a, c, g, or t
  misc_feature (325)..(325): n is a, c, g, or t
  misc_feature (328)..(328): n is a, c, g, or t
  misc_feature (333)..(334): n is a, c, g, or t
  misc_feature (346)..(346): n is a, c, g, or t
  misc_feature (348)..(348): n is a, c, g, or t
  misc_feature (350)..(350): n is a, c, g, or t
  misc_feature (361)..(361): n is a, c, g, or t
  misc_feature (365)..(365): n is a, c, g, or t
  misc_feature (397)..(397): n is a, c, g, or t
  misc_feature (399)..(399): n is a, c, g, or t
  misc_feature (410)..(413): n is a, c, g, or t
  misc_feature (415)..(415): n is a, c, g, or t
  misc_feature (418)..(418): n is a, c, g, or t
  misc_feature (459)..(459): n is a, c, g, or t
  misc_feature (463)..(464): n is a, c, g, or t
  misc_feature (467)..(467): n is a, c, g, or t
  misc_feature (488)..(488): n is a, c, g, or t
  misc_feature (504)..(504): n is a, c, g, or t
  misc_feature (520)..(520): n is a, c, g, or t
  misc_feature (534)..(534): n is a, c, g, or t
  misc_feature (576)..(576): n is a, c, g, or t
  misc_feature (578)..(578): n is a, c, g, or t
  misc_feature (581)..(581): n is a, c, g, or t
  misc_feature (610)..(610): n is a, c, g, or t
  misc_feature (686)..(686): n is a, c, g, or t
tngggtgggggggggggccccataggggcagagaggcctccctgggactttaggaggatgctgtgcggccnggcccatccccagcactcgaggcntaggaggagaggtgggctntggnagngggtgtggggngggagtgagaagaaaggnnntnaggtgnagntnaggnatntgnngctggggnntnatagttgagnangtagtagtngtggacgtaaatgagganggctnttggntgtcngatgatgagcnacaccacanagntgngttgnaatagttgaaatggaaaaagnggnnaaagaannaggcnagtgggatntgagcnatnatgcnngtgaacgcccanangngaacattcccncccncaagataaaaaggtaatagtggaagaaggccnangccaggaaaannnntnttntggcaataaaattgatgatgcaaagttgaagaatgggcttnttgnngtntttgttgcacaatttgtgcanaggggtgttccagttntgcaagaagtaggtgncagacttggagttnaaaaagtaaaggtagaaataaaggtataaaaaatgcatgagntnagnaaaggcattaaggcaggagtggaagagcnagtagaagaagatgagccagatgaggtgattggggacgccagcttcaggaggcgctcgatgatgcgtgagttgtcnatgt

SEQ ID NO: 654376 - DNA, 105 bp, Homo sapiens
cgttatgttggtagctaattcacaatttgacatgggcagcaagtttggtcactagccgttccaggatggccgatcaaagtaggtatgtaaacgtgcctgtaacca

SEQ ID NO: 654377 - DNA, 1026 bp, Homo sapiens
ggttcgtcccaaggggcgtccggcgaagaggcctctggtgccatgggtatgcggtattccgggacgctctgtggcatgggtcccggcactctgtagtcgtcgggatcgtggtccgcagccaacggggcacggggcgtcgccaagggctgttttgcccaggttggttccctggaggccggtctgtagggcctagggacggtcgctgtctcaacggcgatggggcggtgaagcgcggtggagggatggctgcaccgggctcgaggcgccccggcgggtgctatcgcgctgcaccaggtggagcagcgagcgcccgaggccaggcccgtggggcccccgtgctcccgggcaccggcctaccggtgtaacagaccgcctgtgcgtggggcctgagcacttgcggccgggcacatgtccggctcaccgcggtggtgccggggacctggcgcgggtacctggaaggtaccctagcgggccacacccgtggacagccgagctggaagggcgcacccccggctaccccagtggtgcctgcccgagcgcggcgggcctgcggctgaaggccccgacgctttgctcctggctcgtgggaaccggctgcatgagcttgcgcgtcctcacccgcgcccacggctgcgggcccagcgttgcccaggatggcgtgcagccttggcgccgctcgacgacctggactccaagaaggccaggggaggaggtctctctggagcccactctggaacccttgcctggaaccctccgtactctgacccgcgtacagacaaccaagcagctaatcccgttagtaccaagaaaggggagccaggatttagtcatggcccagcccagagactgggacctggagcacgatctgttgacttccctgggtaggacactgccacctctgggctcaggtcctcatgcgtccaaatggcatctagagtattgagcagcgttcttggctgcaggcaggcctagcctgtggcagcgggatagggccagcagagcatttggtgcccctcatgttactgc

SEQ ID NO: 654378 - DNA, 354 bp, Homo sapiens
agaccaggtaggagtgcaatggaatgtcacaagctctctgcatcactgcagccttgatctcccaggctgaagtgatccatcctgcctcagactcctaagcacatgcatagccacacctggctaatataatttatattttatattatttatatatttattataaagagacagggtctgactctattgcacagaaggtcacgaactcctgggttcaggtgatcctctggccccagcctcccaaagtgctaggattacaggcatgggccatcatccccgaccctacattttcaaatgactttctcattctccaaacccctgtaacttactcaggtgccactcaccttcagcaagcaa

SEQ ID NO: 654379 - DNA, 114 bp, Homo sapiens
ggcaggttcccgcccggaagaagcgaccaaagcgtctgaggaccagcaacatggtgcgctcggggaataaggcagactgttgtgctgatgtatggacgtgggcatttaccatga

SEQ ID NO: 654380 - DNA, 226 bp, Homo sapiens
gtaacccgtggaatcaatttttaagttgaccagattgtcttgggctcttttactttcagggggctgctatacctgggccaggctgtgtggcactataccaccctcaggcatgagtacagactggtcaaaatgtatatagcagtcaaggccaaagcctgccctgagcccagacacacctgggtccccatactggggcctggtcccctaaacaatctcttgctcattt

SEQ ID NO: 654381 - DNA, 165 bp, Homo sapiens
ttctaactagctccctctgtgtccttagaacctgtggcaggagcgaacatgctcgctcctgccaatggtgcggtcaggcggattcggcgttgatcgggatccagatttccacggtgcccgtgcctttacccacgtcgaagtcggcgctgtcgcgctcaaaatcgg

SEQ ID NO: 654382 - DNA, 1556 bp, Homo sapiens
  misc_feature (1067)..(1067): n is a, c, g, or t
  misc_feature (1297)..(1297): n is a, c, g, or t
actctggtggatgggtggtcgtgccggcgtgtcgcttgtctgcttgagcttgctgtatttgttgagctctgtgttggttgccgccgtctcgatgtggtcggtttcgttgtgtgagacatcttgtgttgtgtgttccacccgcgcagtgtttgtggttgtagtcgacgcttgcgtgctcgtggtgtttcatcattgtcgtgcttggggtcgttcggccttctttttacacgggttcttgttgtgcgccacagtatctctccgctgctgtggttttttgcccccacccgcgggttgtttttcattcttgggtgagagcctctcctctgttaggagtcccccactattattggagggggtctccccccacttgtgtttgttgggagtagttcgctctggatatggggcctgtgtgcccagaaaaaaggtgcttgtttgttgttttttgtttgcctctgtttgtgaagactcccgctgcataatctctgtgaatggtgggaagatgagccccgttgtggggatgactgtccccagggccccgtccccgtgggaccataagaaggaaggggaagaaagaacactcccagaagacaggggtttcaccaacagaataaggaggaaccgtattgttgatagtggaccccgcccttggtgaaaaaatagctttgggcttgaccggtgcgcccaattctgggggggctcggccccacacgggtggggccccacagctgatactcggggtggcactagattctttgggagcccaggtttaccctcttctgcgtggtgtctcgctctgtgctgccgccctgtggtgaacacccccaccacagaggctcgttgcacataggggcctcatatattgagaagagttgcacataatatcacgcctgctaagagatgtatatgttggaggaagacacacatattggtaaggcgcaccttatatatcacacgagttttttcggaaaatctctcccactctcgagaggtctcactctatatccgctctcggctatatagagatgacattggggttttttttgtgggatattgtagagaagggtggnctcaacccactgctgttctgcacacgtgttttccactctggtgttgagaacaccacaagagaaggtgtatacccccgagagcctctttcctcgtgaggccctcttctcgtagcgaatattctcttttggggagaattgaaggagaagccacggtccccgcgtctgtttcttgagaaccacgtatgcctaagcaccacactcccaagaataatggaacaccaccgggaganccgcctggcacgaaaggggagctctcaccgagaagtggttgtcacatggagatgttttatagccacttgttggctttcccctatcacaaacttgggccctctccctctcttggttttcccaaggcacttttattgtcttgaggttaataatgttcacctgtccccctaataattaagggaggtaaaaccggagtacccaagttgatttagtgtttttacctctgttttggctttcatgttattaaacgtatgcatgtga

SEQ ID NO: 654383 - DNA, 233 bp, Homo sapiens
ggtgctggaggactaatccaggtgatgggctgtagtgattgggactggaatgtacagggtgagactgggagaaccaagtgattgaaactgatatgaagagcctggcatgggggtagaaatgacctgaagatcggcctgagcacagtggctcatgcctgtcatcccagcactttgggaggccgaggcatgtggatcacctgaggttgggagttcacgaccagcctggcaaacat

SEQ ID NO: 654384 - DNA, 142 bp, Homo sapiens
ggttgccatacggtgtcattcgtatgtacatgaacagtgctatgtacatacaaagagtatgttataggggctgagcagacactacagcatttagtcaaagagaccaaagcccatgtcaccatccgactcctcctcgggctcc

SEQ ID NO: 654385 - DNA, 1237 bp, Homo sapiens
tagggagaaaaactttccatgtgtgcggtatcgtctttcagaatgtctcctggcatcctcacaccatgtacatcatgcacacattgggggtggggttgcacacatcagccccataacgcacctgatctatcacacacacttgcattgtcagagcaaaggcttctatatcatcctatttccaatcagcactgccgctggctctatttccatagagaccattccacataccatccatatatctatatctacacacacatattactagagactcattttattcatgtacacagtacacacatctcagccagagcacacgtcagggcttgacatccacgagactgatagacaggttaccagtcagccatcgacccagccattgaggcggtcccaagcagccatcaatattatcattaccactcatccgttaccaagtcccttgggtcagccagcacagggttagccatcagcatctccagattttgatccacaacacaagcacaggcttcagcaattcttcgccagtttccagctcgcaggttttaaactaaacacacacatgttcaccattgggtcaagtgggttaatgaggtcccagaagctcaggctcttctctcatttatgtccttcctgttcggcaatagaaaacattgtcgcattttccttccatcctgttgactggtgccatcagaccaccaggtctcatcagtattgcaacttacagtcatagtttgcaaattacctagataacttgtcaacacctgagcactactccttgctgacagttcaccactgcaacctaccagcagtacctggacctcctacacccaagcgcaatacctcaccaggcgcacaactgccggccgccaccacaggcacatacgccgcaggcgacacccacacaaaacggcaaaagacagccggcacgccacgcagccacaacaggacacacccctgccaggccgggaaagtccagaccgcacacaatggagagccagcgcctccagcgacccccgcgcaagacaccggacacccctttgggaaaccgagaacagtaactacggctggtcacgacatgcaccgtggatcaaggaacagaaacagcgggagatcaccgaccacaaacaaggcacaaaccactctcaccacacaccgagcgggcagaacaccgcacaactaacacaacgagacaacacggaacagcgcacagcggctcccccgacattgctcgtggccgccc

SEQ ID NO: 654386 - DNA, 211 bp, Homo sapiens
cgattaaccattctagggcgctcgttaggaggcgctcgttacggacgttacggaggcgctcgttaggcgctcgttacggaaggcgtccgtcacgaacgcctccgtaacgagcgcctccgtaacagcgcctccgtaacgacgcctccataatgagcgcttccgtaacagccccaccaagaaaagaaaaatcgcgatcccgaggcgctcgtta

SEQ ID NO: 654387 - DNA, 607 bp, Homo sapiens
ctgtcctatgtgcaaacttactatatgaaggcccgtgggactgtgccgaattcgccatgtactgagtaacgtagcattcgactagtggaacggtcgtcaccagaagccaagctggtaccgaagatcagccctcggcgactcgccgggacaactcccttgggcctagagccacttcgaacttcggggatctcgacctcttcctcaggatggggagctcactccgagaaacaggagaaatcaacatagcagtaacaaaagaatggtttatgattgccagtttgggcctcctcagtgccctcacactctgctacatgatcatcagagccacagctagcttgaatgctaatgaggtagaatggtttgacagaagaaaaaacctgctttgctgactgatttcgccttgacggcaagacgaacctattttgtgcatcatagaccaatcatgccacagcaagcatttatatattagtacatcatagtagcagcctaacagtagctaatgccaaaagcttgtagttacacacgaactccataataaaataaaaaaaaacacacagaccaaagagaaacaggggggaagaaataaaaagagaaccaccaaagagaa

SEQ ID NO: 654388 - DNA, 928 bp, Homo sapiens
ggacatgcgccagagattagccagtggggccggtatctacctcccttgtaggagctccgaatggatcatacagacggcactgaaccagggggttgttgaatctagactacacccgctgggaaactgggtttctcttcgaccactggaagccacgcagagttctgctcgaactaccaaggcgagctcacccaggacgtactgtccctcttgctggaggcgtgcaggattccagaaaggaagacgtagcgccgccccggtgctggacagcccggcgtgtgtcttgggctcctaaagctcgtagtccgaaattacatcgtaatgctttgatcgtgcgcgtactcttagaatccatgagtctgataccacagtagcagaaaatgacccaagtatcctcgtgcccactcatgtaagcctcaaaaggtgatgtgtgtgggacactgtacacctagggataaatgaatcgtttaactacaaagaggagcaggtggatgcatgagttggtgtctgaaagtaaaggtgcttgtgtaagggagggtgtagcacgcatgaaatgtgattacctggtagggggatcccggtagtaagatggcaatgggggattataggcccattgatctagatggctcaagttgtgaaatgaactaggggtgttggaaaggaaaccttttgtcttgacgggtgtaggtattccacactatcctgggacaactcacgggggggcaataagttctttcgcaggaggtcatcgtgaaaacccttcttccagtccttcaccccacaccaggaattgcgaatgtcccaaggaaccgtgaaaatagcgatgtagcccacattctaagagagtaagcgggagggataccagaaacccccgaggcttggtcactgtgatagtaatctccagaaattaacccagaggacctgtggtccc

SEQ ID NO: 654389 - DNA, 380 bp, Homo sapiens
tattaagtatttactgtgagtccagtaagccaaaggaccaaacaaaataggttcagggtttcattttatactcacagattctgattcttacccatatgtcatcagttcagtttgggacatgtggtgcagcatgtgtgaagaaaatattccttcaaatgtcaaaataaccactcgaaattgtccacaacactgagcacatattcgtatctaattaggctgccatacctttctgggatatttgtcaggtgctgtcgtttttataacatgatcctgaatctactatactcgttgtccctgatcatgtcacttgtaatcaggatttagaacgaccaaaccctctactacctaaaataaatatttgacacacccggaaaaaaaaa

SEQ ID NO: 654390 - DNA, 428 bp, Homo sapiens
agagagagagagagagagagagagagagagagagagagagagagagagagtgagagagagagactgacagcgccacagttagctccagacatttcactttcttcgctcttcctattcgtcattctcccgtccacctcttgtcctcttatctgtttctctgccttctctattccttgtatccccgacccttctggactctttttcgtcctgcctttttatacccgcttcttctttactttcgatctctctaccctgtcttccatttcctttttagtctcctttctctctcgttcttctcttgctcctcctgtctctccctgtatcctacttttccctcctttccttccgctcctgatttatcttctcttccgtcccctttttccgtcttcctctccttcctgtcctccctttcccttcctcttcccccc

SEQ ID NO: 654391 - DNA, 311 bp, Homo sapiens
  misc_feature (300)..(300): n is a, c, g, or t
atgcctgtagtctcagcctcccaagtagctgggattacaggtgcccgccaccacacctggctaatttttgtgtttttagtagagacagggtttcaccatgttgtccaggctggtcttgaattcccgacctcaggcaatccgcccatctcaacctcccaaagtgctgggattacaggcataagccaccgcgcccagtaggagatgtgatattatttcaagtaaataaaacctggaaacttgggcacatttgcctattttaatgtggcatcagtcatcttgaactagggttgatccgggggnttaattgaaaa

SEQ ID NO: 654392 - DNA, 323 bp, Homo sapiens
tgtttatcgatgccacctctaacccacgggcacaatattcttggacaattaataggtgtgtacagagcatataggacagtttgaggttatcgtctcttagtgaggtgaatagatggggggaggagaaatagggtgaaggagtaggtatgggggcgcacactgatatggaaggattggtgaagagatgtcagaatttctttggtctgctcttaggggaggacgagcttttgatttttgactatccagtccccttgaaaggaggctccttgctgtatagcaaagctttctcggttggcttgggcaggaggtggcatcgataaaca

SEQ ID NO: 654393 - DNA, 138 bp, Homo sapiens
ttgctagaaattctccaaaaagtattagtgggaattaaagtttgaagtccttgagagaggattatgatgcgactgtgagtgcgttcgtagtttgagtttgctaggcagaatagtaatgaggatgtgttcgttccattc

SEQ ID NO: 654394 - DNA, 409 bp, Homo sapiens
  misc_feature (322)..(322): n is a, c, g, or t
  misc_feature (331)..(332): n is a, c, g, or t
  misc_feature (369)..(369): n is a, c, g, or t
  misc_feature (392)..(392): n is a, c, g, or t
gtgccaaagcttcatcactaaccaagtggtcattctagagcacgataatcaaggagtatgggttcgtagggatccaagagtctccagctactaattcggtcaagttgttcctgtgcatgattaccagattagctccacctcgtccacctcacagcagcgaccacagctccagcgaacacagctccaaagagaactaggccagcaatgatgcccacgatggggatggtggtctggaaagacggctcccatctcagggtgaggggcttggggagaccctcatgctgcacatggcaggtgtatctctgctcctgtccagaaggcnccaccacanncgcccacttctggaaggtccatcccctgcaggcctgntctccacgagctccgtgtcctgngtctggtgagggtaccc

SEQ ID NO: 654395 - DNA, 696 bp, Homo sapiens
tatccctccgtaaaaggtgtccagtgcaaggccaagtatatccagtcacttaacgagaaggaatctcatcgcagagaccatctgccattcagctgctgcacggagttgaacttttccaagatatgctggcaaatgttaatcctcatccctacagatgaacgatagactagagcaagaaataacgagattgcagaactaaacgaagtcagcggtaaacctcctttctcaaagacaaaggggtgagggatgacggaaaggatgggggcgtgggactgagagtggacttaacttttatagcgtagattaagctggcaagtgtgaagtattttaagtctccatattagggctatagttggctacaatgtcggtaccgtggctagttgtagtaaggcctttaccagagcgttgttacagactgctcgagaggtgccccaagtcgtgccgtgtccttccggttcgtgccccacaagctcgtgttcctggatgaccctagcgtaaattattaatcatattgcctagtctctgtaaatctaaaacacttggacgctcatcgctcagatgtatagtctccatttacaggtctgtggaccgtcgtgtcatggtcttcctctagaaggtgctaccgcagaacattgatgtgtgctcctggccgtgcccatgccgagccgggctgaagtggtcactggagtggtccgg

SEQ ID NO: 654396 - DNA, 135 bp, Homo sapiens
ccggcgggtctcttccattacagacaaggggaggtcttgggccaggagctcttcttcgacatcatctagggcccacgggggatccggtcagctccaaagcttcccactcggtctggtaagggaagagaacaccca

SEQ ID NO: 654397 - DNA, 890 bp, Homo sapiens
taaaatccctcaaaaacggtttattatacaagtgagtttggagtcacgaggggcttatcggtaggattccgggtagcgagcgcgggcaccagggcctccaaatcttttgggactcgcagcgacgagggtcagctaccagcagggtccgggtcatactggggatggaggatgtcttggatctccttctgggaagcctcatccacatatttctgggtaataggccaccagggcttgggagatgggactggacggatagcataaatctgggggccacgtgaccaccaccctttacacggacacggatgtctacaccagcaaatcgctcctggccgagaagcagaacgggctccagcagcttgtactggtagcgtgggcgcggttcaatcatctccagggggccgcccgttcacctggatgaagaccatggccgcgtttggcagtggcgccacagtgggtcgctggtcttctggcgtccagaaaacctgaccgattggcagcggaccctgggacgggcatgggctccgaggcggtggactaagactaaatattatactagcatttaccatctcacttctaggaatactagtatatcggtcacacctaatatgctccctatatgctagaagggataatcactatcgctgcattatacgtactctcataaccctgaaacaattccttttagcaattttgtgcctgtggcgaataatttgggcgctggaaagacggggccaaggctatagtttattttcaaacatatgggctaatacgtgatactaaccatccaggtaataatggcccccatatttttcctgtgtggtcccaaacacattggttccccccgggtgttgctcccccttttgcctgaacattttcgcctttgccagaca

SEQ ID NO: 654398 - DNA, 143 bp, Homo sapiens
gggagacgatgtactggtaacggatcagcagtgatgatgcagatatttacattcttgcatgtgtgtgcgtgtgtgtgccgtgcgttgtgtgctgtgtgtgcatgtgtgtgcgtgtgtgtgctgtgtatttgtgtgtgtgctgc

SEQ ID NO: 654399 - DNA, 166 bp, Homo sapiens
agctctttctgcccctctgtttcctgctgcatcatgcctggctcccaggaggcctctcagcattttctgacaacaaagccggggctgcagatccctggtgagattccaggctagcatcagcactcctctcccgcacgcaccacagctaaagcacacaagggcaccg

SEQ ID NO: 654400 - DNA, 193 bp, Homo sapiens
gtgggtaccgcgtgttgaagggtgagaagcgattcaaagtactagtaactaggcgagcagcttctgatgctgcgtctgagggcttgagtcctgagcctccgctgctgcccttgccccagctcactcgaccctccaggtgcaaagagctggttgttagaatcgatggagcccaggcttggtgatctaggtgagt

SEQ ID NO: 654401 - DNA, 146 bp, Homo sapiens
tgttctagaggataccgcactgttgttcatacctgcactgttgttcatacttgcactgttgttcatacctgcgctgttgttcatacctgcactgctgttcatacttggtcgctgtatcggggggtcatggggtatgaacaacagtg

SEQ ID NO: 654402 - DNA, 154 bp, Homo sapiens
agccggagaaggaagctcgcccctaagcctgaggagacctgggtagaggagatgctgtgtgggctcaagatgaagctgaagcaaccgcgagtgtcatccatcctccctgagcaaccacaaggacctaaacagtcagcttggtatgaggaacacc

SEQ ID NO: 654403 - DNA, 447 bp, Homo sapiens
atccagtgatgttcaccctctagaatcaccacgatcaagagggacgatgcatcaagcatcgcaggactgtcagctcaaaacgcttagcctagcctcaccgcccacgggaaacagctgtgattaacctttaggcaatagacgaaagtttaactaaagctatactaaccccagggttggttcatttcgtgccagtcaccgcggtcacgcgattgaccccagtcaatagaagccggcgtaaagagtgtcttaagattaccccctcccctattgagctaagactcacctgagttgttcaacgactccagttgacacagaatagactacgagagtggctttgacatatctgaacacacaatagcttagaccccgactgggattagataccccactatgcttagccctgaacctctacagttttaatcaacaaaactgctcgccagaaggtac

SEQ ID NO: 654404 - DNA, 150 bp, Homo sapiens
gctcccacgtgcaggtgcagggcctctgcgggaacttcaacggcctggaagtgacgacttcaagacgggcagcgtgctggtggaggcacgggtgccggcgttttgtccaaccaccctgtgaatggcacagtcaagctagcatgacaagct

SEQ ID NO: 654405 - DNA, 376 bp, Homo sapiens
gttccagtacagggacacagtcccgatgggagcatccaaaatggaatctaaattagccaggcatggtggtgcatgcctgtaatcctagcttctcaggaggctgaggcaggagaattggttgaaccaaggaggaggaggtcgcagtaagccacgatcgcgccactgcactccagcctgggagacacagcaagactccgtctcaacaataaataaataaataaacacataaataaaaaatacaaaattagctgggtgtggtggctcacaccggtaatcccagctgctcaggaggctgagtcaggagattggcttgaacctaggaggcggaggttgcagtgaggagagtttctcccactgccctccagcctgggtcaca

SEQ ID NO: 654406 - DNA, 250 bp, Homo sapiens
caggatacaagaaaactgtgtagtatacaaagtgctctcagatttttatggtgaggtttataccatcacaagtaatgatacaaactggcttgaccattgcgcccattttacgcaaagctattcccactcctagctccttcatgtattcatcaaagcctttgctgtccaccaggcgccatcttccttccagctgctgaactgtggccatggtgggtgcgggcgggctggcgtgcagagagggtccaggcga

SEQ ID NO: 654407 - DNA, 166 bp, Homo sapiens
gtaggtcgatcactgtactaaacgtgctgggattacagcatgagcaccacgcccggcccttgattctttttaacagcaaaagtttgcctatttaaaatcatttttttcttttttttgaaacaggagctcactctgtcacccagactgtagtacagtgatcgaccaa

SEQ ID NO: 654408 - DNA, 280 bp, Homo sapiens
gggagaagaccacggttagcaatttcatatatatccttctacacttttacatacattttcttatatatccccatattttttacacaaaatatatagaagcaaagatacgtaccgtttcatttaacaacaacaaaagggggagagggagatcagacggggtccgggcctcgtttaacagggatagggggtcaggggggttccaggccagggcgggccctttaatggaggggggagaaatcggagatccagaggagagaaataactggccatttctgtgtag

SEQ ID NO: 654409 - DNA, 643 bp, Homo sapiens
ataatttcatgaagtacatatatattgttcccatagtcttcagctttaaaactataaatatgcccaaacttttggttatttcgccctactttaaggtacggtttattggtagttatagtatttttccacgggtacttgttttttctctggataaggaactcagggaattctggaaacatgggtgaaattggttctcaaattccgtttgtgcgttcattattgattaaagaccatatgaaaaaattcaagagaatgtggtctaaagttttataaggtcttaatacgttaagaccaaaccttttttaagtttgtaaaacttttaaagttttacggcaaaaatgtttaagttttaaaaacttctcttgtggggggccccaaaactttaactttggggaaatatttctttcccccaaaattttgaaacctttgtttaagacgccacaaggttttcaatcttgggggcttttaagatttactttccccggggacatcaattatgctaagctcacaacattttctcttactcttacctctcttccaacaagaagaacaacttttcaaacggctccttaacttaatattacaacattcttcacccaaaataaaatcaccaccgtttttttcccaaacacaacttttagga

SEQ ID NO: 654410 - DNA, 102 bp, Homo sapiens
ttacacctaatttctccttaatgcctaaacttccattgatttaaaatcttgcttttaaatccattgtcttgttcctcaaatctggggagaatatgagcgaag

SEQ ID NO: 654411 - DNA, 209 bp, Homo sapiens
caggtggaaccgtggcccaagagtgtagaatgggagagagctagggctggacccgagagcggtctacctctaaagctcatcctgtctctcctgatgcctcacctctctctccttacattcattccctccaaacatacccacaccgctggatacgtcccttacatgtcatttgaccatgagcctgggggaccttggttaggtctacctgg

SEQ ID NO: 654412 - DNA, 657 bp, Homo sapiens
ttacagctttgagactaagggatttagtgcttgaatgccttgactgtcaggaaaccgctgaacagctacgtctgggctacatgtttgggtttctcgccctgccttcttcctggccctttgattttgccaccgtcaagcgtgtccagcgctagactgtggaggaaagaatcagacttggaaagtatgagtatccaaggactcctccatcagatgggtcccacgaagtcccctgcccatgggacagccattcctctccgtgagcccctgcactggcaccagttcctccgagggacgcagcaggccgcctcccgcagcggccgtagggtctagcacaagcccaagcaccaagccccaaggcaccgacaggatgctagggactgcttgctaacacaacgctagtggaaacgcatgtgtcaccttctccgaccgtgcccagatagcccccatccccacagtgctcaggagacccgtggggacacggaacaggagggataaggaccggtgtggcccagccaaaggctaccagacagccacaaccaagcccagccacatccagatgcctagagggcctggcaactggctcgtcacagcctggacccgagcacctcggggtggcagagggacagcccaacggccaagcagacatgcgagcttcct

SEQ ID NO: 654413 - DNA, 212 bp, Homo sapiens
gtcgcgcagatgaagggagagggtccagggcgtcctaaatgctgccgctgtcactgtccatctcgctgcgtttcagagacagtggaagctgctctttacctctaaagcgccccgcagacttggcgtcttcacttgtctcaagagctcctagatcctttggtctcgtgtccctttggcaccccgtagctggcttggtgaacgagggcttggtt

SEQ ID NO: 654414 - DNA, 1123 bp, Homo sapiens
ccaaaaggaaaattcggtgtatattgcgcccaccaaaggcaagaaacagggaagggcgccccgcgcccgggaatggggcttccaccaggggttacactgtgcaaccgggacccaaaaaggggtaaaggaaccacagaaatctggggtaaaaaaacccacgattccgtgcctttcaaggaacacagggggtctcaggttggtcacattgcctccgcgagaacccacgcccctcgcgggcctgcacaaaatataaaaagggtgaaaaaagatgaggagacctggggagaattttgggcacactgggtggctcggagatttatacaggttggagtgggccccgctcgagaagaatccccctggggagaaaccccacctacccagacaatggtacgtccttaatggtcaccacgaagggaggcctttctccccccaacgctcactaaagatgcccacaacatttttcccacgcgtgggagatctccccacacaggagtgtcttaaatattttgggccacacctccacatgggagggctcacatggaagcttctgaatctcgttgcctttgagaaaaaatccctgtggaaaatagccaaaatcttgtgttcaagcacattgtgcctcccacatttgcaaaccccccgttagactcctgggttccccgggggcacacaaaagcccctcttatggtggaataattttgggaacacacgagatcacacaagtataaatggagagggccttatatgaatgcctaaacccccccttgttgaaaattcctaatccacggagttctcacaggctggaacaataactaaattgaatacaaaggggagaaagaatgagccacgttttttctttaagagatggagcacgttatactctccctcgagaaaactttcaaataagctgcctgtacagagaaagagaaatccccgcttgtttttcgagttgcacgaagggttaagagtcaatagctactaacttcacttgccacccttaattaactgagccaccactcacgaacactcacatgctaaaaacctgaaagcatgaaaaaactcccaataagagaatctcttcaggattataaaagttgtaaaaagcaactgtattgctgagcca

SEQ ID NO: 654415 - DNA, 118 bp, Homo sapiens
aagtcatatgcatctgtgaaatcttccaggctctgattgcatgctctatagcacataaccttggcttcacatttctgactttactgtcaagctctttctgtttgtctaacatcactgt

SEQ ID NO: 654416 - DNA, 149 bp, Homo sapiens
ccagggcttatgaatacacagcgatgggtgcgaaggagtatgtcaggcaaggttattactcctttacacatctggagcaagtggtgaacgtggtccccctggtcccatgggcccccctggattggctggaccccgctggtgtattcctg

SEQ ID NO: 654417 - DNA, 424 bp, Homo sapiens
tagatacagacaaattgggtcatatgctatctatgataatggaatatatatctctatacaacaaatatgcaacaatcaagacctggtgagctatctcccagccttacatctttgggcttttagcacatcatcttcctgtccagaatgtctaactctcttcttggggttagcataaaaccctataatgtctagcagaaatttcatctcctccttggagtgccctatcctgaaatcctttctgcccactactttactcctctgaggagtgtctctgcaattcatttggtgaccaaccacatgccaaatcatttgtaccttattttaaatttccatttcgtatttttcttatgtcttacttttccagctatcagctcctgccttcaccagttcttcttggcccctgtttctgaagccatgttcctat

SEQ ID NO: 654418 - DNA, 491 bp, Homo sapiens
atagtgaatgatggtgaagtagtggtagctttccttcttttcttctttttgtgatgtccactgaaaaataacagtatgggactatgtagccccataattttttttccttttaaacacttcataatctggactcctctgtcaggcactggtgccagcctcaagctcccatctccactccagattttacagctgcctgagtactttacctcctatcagaagtttctcagctccccaggctctaagcaaatgtagctcctgggggtactttcttcctctgctgaaggaataaattgctccttgacattgtagagcttctggcacttggagacttgtatgaaagatggctgtgcctctgcctgtctcccccaccgggctgggagctctgcagagcaggacacatgactcgtatatgtctcaggtccctgcagggccagcacctagcctcctcttggaggactcacgaatgatgctgtatattagggtgaagtacc

SEQ ID NO: 654419 - DNA, 332 bp, Homo sapiens
acagtgctgacgagcacggggctgggagagagggaaaggagagccccaccctgggggccagaccttctcccttcagtttccaagaccacaggccactgcactggcaggagggaggaggaggagaggtacagggtacttttatggtaccaggagcagaaagacgtgggcagaggtacgttgcaggggatgatgccttctgctcagccggcgacaatgtcttataccgtgacggggtcactgccacctacgggtcatcatggcgggcccctggcaggtcgtggggcttcggggtctggaagccatacttgggccaccttgtccacccctcagtc

SEQ ID NO: 654420 - DNA, 450 bp, Homo sapiens
ctgcaacagccgcgcttcccgggtcccgcggctcccgcgcgcgatctgccgcggccggctgctgggcaaaaatcagagccgcctccgccccattacccatcatggaaaccctccaggaaaaagtggccccggacgcgcgagcctgaggattctgcacaaaagaggtgcccaaaatgaagaccctgatgcgccatggtctggcagtgtgtttagcgctcaccaccatgtgcaccagcttgttgctagtgtacagcagcctcggcggccagaaggagcggcccccgcagcagcagcagcagcagcagcaacagcagcagcaggcgtcggccaccggcagctcgcagccggcggcggagagcagcacccagcagcgccccggggtccccgcgggaccgcggccactggacggatacctcggagtggcggaccacaagcccctgaaatgcactg

SEQ ID NO: 654421 - DNA, 696 bp, Homo sapiens
ggaattcggcacgagcggcacgagacacgtgtggatttgactttctacaccctgtctcccagctggtcctttctgtctcctggagagtggccaagctccggtgacctcctgggaggcctcggcccggctccttgtggtggccatcttcagaggcggccccaccacgatagagacgcagaacccatgagcgccatccccctttcgagagcagctcataccagaccctcacccccaaggggacccagcccaggatcctgacggggtggagcacgctggagctacgaccgtctgcatggcaacgcggaactcctcccagagaaagcccagagaggccccgctctaagtcagcgaacacggcttcacgtaagccctttccaagcccctaacgcaactggcacaacggtgtatgtgaagcaagccaagccccgctggtcaccacggattcaactggctctggcacttctatttgcagatattatctctgccttaaaaaaatctgtaaataagtaaggcctgtccctcgtgggtgcaactttctcttaagaccccaagactgtgccctctttgagcttgcagaactctgtgggttattgagaacaaaaaaatcaccaagtgtggtctataacaagatttcccctcgcagtggcttcaacaccggaacactgactgttcccgcgtggccacaccttggttggc

SEQ ID NO: 654422 - DNA, 182 bp, Homo sapiens
tcaggtctgcggttgatgaagacagccgttgttaccaagaagcaaaacctggcagattgtcctagcgtcaggattagttggtcattctctgcgtcttctccatgactggtgacacagggtggtcttataagattcctattccagcctctggctccccgatatttcctctggtgcatggggca

SEQ ID NO: 654423 - DNA, 954 bp, Homo sapiens
gattcctgaaactgacaaggattcgggccgagatgtctcgctccgtagtgccttagtctgtgctcgcgctactgctctctttctggcctgagaaggcttatccaacgtactccaaagattcaggttcactcacgtgatccagcagtagaatggaccgtcaaattctccttgatattgctatgtgtctagggtttcagtccatccggaaatttgaatctcgacttactgtagaatggaaagagaattgaaatagtggcgcattcaggactttgtcttaacatcgaaggactggtctttctatctcttttaactacactgaagtttcacccccactgaaagagatgagtatgcctagccgtagttagtaaccatgctgacttttgtcgatccaagcgccaaaaggataggtggagagctcggggcatccagatacagtgtccatgccaagctagtcatggacggtttgtggagaaatgccgttatgtgggcatctgggatgccattcccaatgtcctggttgtcttgcggtacaatatttgaatatgcggtatacacttatcacttttatgcccataatgttaggggtttatcaactaatggttaacttggaacttgatcttctgattaacttcttactgtgcgtgctgtctccgtgttggtgtctcctgagccggtagatcccaggtagctcaaggaagggtgggcatttacagtgggcgagaagagagtccccttttcccgcatccagctgttggggccgatttgatcttcaggtcgctgcttccaggtgttagaattaacggcgtagtgctccacgactatcgttaagtggggcatatcacttttgcgatggaggttccaggacgcgtaaaaaataccttcaaagaggggggcgggttccggaccgacagaaaatgcggggtcggcgaggagatatcgataaacgtcgactca

SEQ ID NO: 654424 - DNA, 214 bp, Homo sapiens
agtgtaagtatgtgcctgcgttcagcgcgttctggctggttgcctcatctgggtgatgatagccaatggtggggataacgtgtggtttcgcacgaagctataaaatatgattagttctgtggctgtgactgtcatcattcaggcgatttgtcgggagatacgtatagagaggtagagattttaccgcgatagatggttcctgacaacgggggta

SEQ ID NO: 654425 - DNA, 422 bp, Homo sapiens
cggatcgtagatagcccccgctgcagccaaactgcgtgctttgcagcatgtactgtgctgatcgtgtggatttgcatccctgcagaagcctcagaagctgaagcacctatttgagcagtatggggaggttgggcgcatctattgcactcctgaaggtatgctcaaaacaggcagccactacagtggttgtgcaagtgctggcatggtcatatatgtttggtaaaagggagcgtggtaaaaggagcatgaattgtgccatgcgagattgcctgaaacggggtgctgctttgcatggatactccggcatgtgtcagcagtcactagggcagcagccacacgaacccacatagacaagcaggtttgcaaacagggcagtggtgaagcatggggtacacctgaagtcgacgggccgcggtcgacgc

SEQ ID NO: 654426 - DNA, 349 bp, Homo sapiens
gatcgactgttggtattaacctcatgctcattgctggtggtgctgttggtgctgttgcttgtgctcgtgggtattggttgtttgagaagccggcgatgataatggttgctacggcttatctggttcaccttgtgtgggtgctgtttgaccttgatggtgatggcatcgtggagcaaggaaaattcgtgcgcatccttatagtcctggtgttcttgtacacacgcttcgaacgtattagaggttctctggtagacccacagaaaggctaggtgacgggcatgagtgagcaggatattctgtctatcattgtggctttgtttggtactggtggtgttggcttcacagcggt

SEQ ID NO: 654427 - DNA, 2197 bp, Homo sapiens
gagacggagcagggggagcagcagcggcagctgctggaggaggagctggcccggctgcagcgtgaggcggctgcagcacgcagaaacggcaggagctggaagccgagctggccaaggtgcgggccgagatggaggtgctgctggccagcaaggcgagggctgaggaggagtcgcgctccaccagcgagaagtccaagcagaggctggaggccgaggccggccggttccgcgagctggccgaggaggccgcccgcctgcgtgccctggcggaagaggccaagcggcagcggcagctggccgaggaagacgcggcgcggcagcgggccgaggcggagcgggtgcttgcggagaagctggccgccatcggcgaggccacgcggctcaagacggaggcggagatcgcgctcaaggagaaggaggcggagaacgagcgcctgcggcggctggcggaggacgaggccttccagcggcggcggctggaggagcaggccgcgcaacacaaggctgacatcgaggagcgcctggcccagctgcgcaaggcatcggacagcgagctggagcggcagaaggggctggtggaggacacgctgaggcagcggcggcaggtggaggaggagatcctggcgctgaaggcgagcttcgagaaggcggccgctggcaaggcggagctggagctggagctgggacgcatccgcagcaacgcggaggacacgctgcgcagcaaggagcaggccgagctggaggccgcgaggcagcggcagctggcggcggaggaggagcggcggcgccgtgaggctgaggagcgcgtgcagaagagcctggcggccgaggaggaggccgcacggcagcggaaggcggcgctggaggaagtcgagcggctgaaagccaacgtggaggaggcgcggcgcctgcgggagcgagcggagcaggagtcggcgcggcagctgcagctggcccaggaggccgcccagaagcggctgcaggcggaagagaaggcacacgccttcgcggtgcagcagaaggagcaggagctacagcagacgctgcagcaggagcagagcgtgctggaccagctgcgcggcgaggcggaggcggcccggcgggcggctgaggaggcggaggaggcccgggtgcaggcggagcgtgaggcggcgcaggcccggcggcaggtggaagaggccgagcggctgaagcagtcggcagaggagcaggcacaggcccgggctcaggcacaggcggctgcagagaagctgcgcaaggaggccgagcaagaggcggcgcggcgggcacaggcggagcaggcggccctgcggcagaagcaggcagctgacgcggagatggagaagcataagaaattcgccgagcagacgctgcggcagaaggcgcaggtggagcaggagctgacaacactgcggctgcagctggaggagaccgaccaccagaagaacctgctggacgaggagctgcagcggctgaaggcggaggccacggaggccgcacgccagcgcagccaggtggaggaggagctcttctcggtgcgcgtgcagatggaggagctgagcaagctcaaggcacgcatcgaggctgagaaccgcgcactcatcttgcgtgacaaggacaatacgcagcgcttcctgcaggaggaggctgagaagatgaagcaggtggcggaggaggccgcgcggctgagtgtggcggcccaagaggctgcgcgactgcggcagctggcagaggaggacctggcacagcagcgggccttggcagagaagatgctcaaggagaagatgcaggcggtgcaggaggccacgcgactcaaggctgaggcagaagaattgcttgaacccaggaggcgaagtttgcagtgagccgagatggtgccactgcactccagcctgggtgacagagtgagactctgtgtcagataaaatgaaataaattaaaaattaaaaaatccaaatctggtaaaaacttggaggtactttaagatagactactttgatatgtgcttaaagaaatactcagggtttatggcaggtttgaaaaactgaagtataaaacttccctgagatatccaatagcagagacacaacccatgtctctacggactctctgccaatgccatctgtcaaagccacggtgacagtttaatgtgtcagaggaacacaccctggggccaaaaagatgagacacctgggtt

SEQ ID NO: 654428 - DNA, 1334 bp, Homo sapiens
gagacggagcagggggagcagcagcggcagctgctggaggaggagctggcccggctgcagcgtgaggcggctgcagcacgcagaaacggcaggagctggaagccgagctggccaaggtgcgggccgagatggaggtgctgctggccagcaaggcgagggctgaggaggagtcgcgctccaccagcgagaagtccaagcagaggctggaggccgaggccggccggttccgcgagctggccgaggaggccgcccgcctgcgtgccctggcggaagaggccaagcggcagcggcagctggccgaggaagacgcggcgcggcagcgggccgaggcggagcgggtgcttgcggagaagctggccgccatcggcgaggccacgcggctcaagacggaggcggagatcgcgctcaaggagaaggaggcggagaacgagcgcctgcggcggctggcggaggacgaggccttccagcggcggcggctggaggagcaggccgcgcaacacaaggctgacatcgaggagcgcctggcccagctgcgcaaggcatcggacagcgagctggagcggcagaaggggctggtggaggacacgctgaggcagcggcggcaggtggaggaggagatcctggcgctgaaggcgagcttcgagaaggcggccgctggcaaggcggagctggagctggagctgggacgcatccgcagcaacgcggaggacacgctgcgcagcaaggagcaggccgagctggaggccgcgaggcagcggcagctggcggcggaggaggagcggcggcgccgtgaggctgaggagcgcgtgcagaagagcctggcggccgaggaggaggccgcacggcagcggaaggcggcgctggaggaagtcgagcggctgaaagccaacgtggaggaggcgcggcgcctgcgggagcgagcggagcaggagtcggcgcggcagctgcagctggcccaggaggccgcccagaagcggctgcaggcggaagagaaggcacacgccttcgcggtgcagcagaaggagcaggagctacagcagacgctgcagcaggagcagagcgtgctggaccagctgcgcggcgaggcggaggcggcccggcgggcggctgaggaggcggaggaggcccgggtgcaggcggagcgtgaggcggcgcaggcccggcggcaggtggaagaggccgagcggctgaagcagtcggcagaggagcaggcacaggcccgggctcaggcacaggcggctgcagagaagctgcgcaaggaggccgagcaagagcacccgcgagggatgaggcacccgcgagggatagcaccccaggataagcacccgcgagga

SEQ ID NO: 654429 - DNA, 188 bp, Homo sapiens
  misc_feature (105)..(105): n is a, c, g, or t
ttagtagagacggggtttcaccgtgttagccaggatggtctcgatctcctgacctcgtgatccacccgcctcggcctcccaaagtgctgggattacaagcgtgancaccgcgcccggccaaatttggattttcttaatgctcatcagcgaaggggtgatgcctagctggacctagattgaaagagtaa

SEQ ID NO: 654430 - DNA, 111 bp, Homo sapiens
cggaccctttgttgccagatcctccaattaataatcctccttctaggaaattacaaacattttcatctgtcttagataccaaatggaaagtctccctgacaattggctgtt

SEQ ID NO: 654431 - DNA, 174 bp, Homo sapiens
cgaggacctttcctcaggatcaaggatttcttttctttgtgccggatttgctactgcttgctcttcttactttaattatttctgtgactaccttatggcttaactcaattaaatcttcccaaggttatctctaaggaggaggaggaaaggattggaaaggccaaaacctttgtg

SEQ ID NO: 654432 - DNA, 398 bp, Homo sapiens
tcccttctataggctccattcttatgtaagtcatgtacttagcaatctcagcacgtcctgtgcaagtcatgtagtctgagtgtgctcttgtagtgattcacaaagtcactgtaggccttgtatctgcacctttgaggtccatacagatgtccacagtgcaatctatctggctagcagatgcgatccacatgatttgaccggtcagtctcgttgtcattcttcgacatcgatgcaattcaacatggggagtcacgggtgtttttccggtatctttggtagcgatggatcttgcgcctggacttcgtgagagtcatgtcccccgaggataccgccgatcggtgaatcttcatcaggatcgtatgccacggactgccccaacccatacggcagcacctggt

SEQ ID NO: 654433 - DNA, 1165 bp, Homo sapiens
  misc_feature (670)..(670): n is a, c, g, or t
gagacttccttataagtataaatacttctgctctataaagacatatgtcaagaggaatgagaagtagaatccatcacgtctcgggagataaatacttgccatattgagacacctgataaagtaactgtttgacacacaatatgcaagaggaactcttaatggacgtcaacagctacatggaacaactaagcctgagttataagacacgtagggcaaatagagtcgtgagcaagtcgagctcgctcttgatatattttgctaatgaatccctttaaaatggtcagactagttacaggaagacgaatcttgatctatagaaacgtgggcttaaaagtctgaacgagtcacgcttcgccatccgagatgaatattaccaaattgagacattgtatatctacgcagtcgatcgattgttcatcataaggagagattcatactatctagcacatcgaagaatcgatgatacgcacatacaaccaatctattttaccagcgtaagccacatagatagcaacagacgttaaacatccacgcaaacatggcctgggccgacagggacttgtagacctcgatagctatggagaccttccattgtgtactcgacttggtgggaaaaattgcgatcaagagagtgcggcggacggaattttgggaaaagacctcgtggtcntacatactagtctaggtcaagttgtactatgagcgattgaaaacttataaatctatcacctcctttaaagacaattggttgaatcccaggcgagttctattaacccccttgggtgagtagttacccttacccttgtacattttggggccttgtttcctcgttcacatctgtcaccagattctctgggcgttacacgattgcgttaatccgggcggaaggttgacttctttggaactctggcccaggaagttgggtcaaccctagcattaagaattgtgccgtcgaaaggtaacacatggaggtgggctgacactttcaaacacggcccctggggaattctcgggacacactggcagaattctttcacgagcgtacaggacaggaatatttgcgcgtaccacgggcagggaggaacgaaccactgggaggggacattgtgaacacgcatattactttaatcggaagaaacccaacttcgaaagaagggctgtcacc

SEQ ID NO: 654434 - DNA, 175 bp, Homo sapiens
tggtatgaaatagaatttggtacagaaacagggtggtgtacctcgattgtcccacattggctcctaggagtaagacccgtggaccaacagccccagcaagagcataagaggaagagagagaccctcactgctggggagtccctgccatactcagtcccccaccacactgaatctc

SEQ ID NO: 654435 - DNA, 126 bp, Homo sapiens
gcctggtttggtgactgctggctctgtcacctcgatccaactggctgtgacccatgccggctcgttggattgtcggcaatgttgacagagactgtactgtccgtttttgtcccttttttatttttt

SEQ ID NO: 654436 - DNA, 114 bp, Homo sapiens
cacagtgtgaccagaacaggtgttggttgatatacgaccgcaggacaggccactggagttggggcctctggagttggacaggcctctggagttggacaggcctctggagttggg

SEQ ID NO: 654437 - DNA, 837 bp, Homo sapiens
agcgggggtgtgtgtgcgttcgccctctgctccgcttctggcgggtgctcactgtgcctcctacggtccagcatggagcctgctgcactccggccggcgtcctcccgcgggatcgccggcgacttgcacccgggcctcgccgtcgtcgtgcgctctgccctggagtccagtgcctggtggcatccagtgtggaaatgggacgctccaggatcccattctgggacgtcacgtgaagacctgttacatgagggacaccaactagtcaacagaacgatgagtctgggagcttgtgtgtcgctaccgggatgactcacggcaacagccttaccctgctggctaggcgtccggcaagggcaggaggccgcagattgccgcgaagaaaatttggacaacggaatacctgcccattggagggacctaggtgaatttctgcaacggcatctggcaggaactagccctgaggtgagaacagcgacagtcttgaatgagctggccggtctgtcactagtgcgagaccatttcgtgcgaactgggcacgccgttacaggcatcgcggaggcccagtattgactggcgagagggatctttgtaacgttcgaagccggagattgtctgttcgtggccctgagacgaagctgggggagaaacgaatgaccattttccaggggatgctggcaattgccgggttacgaaggtcaatccggggattcatgtaccgccaatgacttgccgggttttgcctttcccaggccgcttgaggaacgatagtttcgcacatgtaactcgaaccacagagtgtgctagtgctggtttgcttctgtccagataccacgggga

SEQ ID NO: 654438 - DNA, 892 bp, Homo sapiens
  misc_feature (114)..(114): n is a, c, g, or t
acgagtaaggattgtaatatatcacggaacaaattttggggagtgcaccagacacgcatagggggttgtcaatattagccgccccaatgtacgcccctgcaccaaaggtgtgcnaactattgttgagccagacaggtgtaagtgacggcagctttgtcgtgtgtaacaacagtacatggagcaaaaggggttctcctccaccttgtgaggcaaatatatacgccgcctccgttcagtaattcagcgggtgtccagtgttcgcccacacaaggtgtcctgcccccacttgatcacggtcaggctgtgcgcttcgaacaccttgttttttcaggacagcttgcttcccacagagaacaatgcagcgacggccacgggcgtttataccctggcaaataaattattaggcccctgtgccagaccacattatgcaaacaatcacggaagtgctgtcctccaaaaagggcggaacattcttctggtgcttacaccctttttataaagagattggttattcattagggcacggctaccaccacacagttgtgctttatgaacgcgggaccatgacaaacatccgacgcggtgcaactaagtccaccgtcccccaacatcgtggctttctaaagtacgcgctgttccgcgagatgggcgggttacaagcccgcggagtcctgtccccacgtattataaggttgtcaatcacgcgtgcccgtgtaccacagaagacaacaattttgcttttctttgtacgtactgctgtatcatagatcttgcggtcacgccagcgtcaaaccattggcttgctaagccgcccaacgggtgctgcccgagaccgccgcacccccacgtggggcaattgtcttcccccaaacaaaaagacccccccccaaac

SEQ ID NO: 654439 - DNA, 300 bp, Homo sapiens
  misc_feature (220)..(220): n is a, c, g, or t
tcggtcggtactccatgggtgaaggtctaacacggcctgtaaaaaccctctcagaggcttgatggtggatgaggtggccaacaatgggagaatttggggagatccttagggtctttagcaggttcgggaaggggaggtggctgggtaagggatggtaggagagagagagagagaatcctctaaggacgcccagccagagcctttccccttcctgggttgnggcaccaaaatgaaggttagccaagagaaaggatgagagtacaatctgccggtggagtacaacctgccggtggagtacaa

SEQ ID NO: 654440 - DNA, 143 bp, Homo sapiens
actttcttgcgcgatggctgtcttccacgctgcgctcacttgccgatggattgctccggcaaaaaacccttatctggatagggttagtcgagccggcgcagtccaatggtgggaaaattccgcagcctgactcgacaaaaggg

SEQ ID NO: 654441 - DNA, 1123 bp, Homo sapiens
gatgactcgttgtctggcacgtgtgcggtgatcacctgccgtcctccgactatcacggtcctacacggcacactgaatcgccctgtatccaccggcgacacttatgtcgcgctgctcgcaagaggtccggagcatctgtcatgcggccggacggccatcaccgccacttggggtctgcgcatcagtgccacctctcaaatcgggtttagatgctaaagagatggcgtgtagttacacgagcaagacaatttcagggccacgctgtatcggcaaggttgaaaaaccgcatgcaagtacgctaccatgtcgtacattacacctagcataacgccttcgtatgccgaatcgaatactggaacgtgcaaacactgtacgcgtacaagatgaatcgttccatgaatccacagtacgtctgtcggttgggggaactgttacgtgagtttgtgctccatcgactgaagcctgggcatcgggggtctgctcttgtaattccgtgctggcggcaagactgattcccctgcgaaggaagatctcgtcatggcaataacgtcggcatttggttctatccctcagagacatactcgacttgacgtgtcatcggaagccaatgggtgggcccaataggtcttgtgtttgggatagacttgggttatacttcatggagaggcagtacagtttcgatgtcttccttgcagcactattagcactccaggctggaaccacaggaccattggcccttaaggaaagcgaggaatgcaagtggtgctagctccgacggttccttgccctccttccgtggtcgagtggcgcatgttccttccgttagatccgcaacgacagggcgaatgaccagctctaggaccagccattgtccaactattccaacatatcaatgtcacttggaccaatagcccagtgatgtgaccacctttgagcagacaaatgtggaacaatggatgagaccctcagcgaatctgacgccatgtgcattgcatcaaatgagactggtccaacattggcattcctgtgtaacaaagggtgcagtacttgggttccctcttttcccacaattgtatctagactcgttccctctcgaggcgtaaccgacaccagactctcctgc

SEQ ID NO: 654442 - DNA, 191 bp, Homo sapiens
aagcgacatgcggcaagctaacatgcggggtctttgcctcccaccctgtctcacagctttattgcccatgccattcgccactgctaccagcctgtgggaggaggaggaagcccgtccgacttctacctgtgctccctgctggccagcggcacagcggccctggcctgcgtcttcctgggggtcaccgtgga

SEQ ID NO: 654443 - DNA, 693 bp, Homo sapiens
  misc_feature (53)..(53): n is a, c, g, or t
  misc_feature (457)..(457): n is a, c, g, or t
  misc_feature (681)..(681): n is a, c, g, or t
tgtgatctccgtgctggcacaaggatctcaggtgctagagtccacgccacccncacatgtgatgagaggtgaaaatgaccacatttcatcatttatctaccaaaaagccaaaagaacatttggttcatttttgactaaaaacctggaaaaatcctcaaccctgtttttgggcccaaaattaggaattggaggcaacggcaaactttttgggggccaaaaaaacccacaatgggaaacataaaccctttttttgggaaaagggggttttttttcaaagggggaacctaaaaagggaaagcggtgggggacaatccccgggcacagggtttagaaaatttttttttttggggccaccaaggtaaataaacaaataaagggggggacctttttgaaaaaaaaaaagagggctttcaccccccgctaaaaagaagctttttttttgtttatttaaaagggnggggaaaaaaaaacccccccatggggtttttttggagacataaacacccccaaaaaaagtttttcttaaagaccgccggttataggcgcgtttttcgggcacaacaaatatccttttttaaggaaacccaggagcgcccttaaaacccaccccattatgtagggggggttctatcatcaccaggtctacgacacagcgatttgtgttggacggacttcctgttngttggccacgtg

SEQ ID NO: 654444 - DNA, 210 bp, Homo sapiens
tcatgctcaggtctacttagagggtttatttttatttgagacaggctcttgctctgttgcccaggctgtatgtagtccaatagcacaatcaggtctcactgcagcctccaataaactcctggcctcaaatgatctgcttgccttggcctcccaaagtgctgggattacaggtgtgagccattgcacttagggagacctgagcaagccagg

SEQ ID NO: 654445 - DNA, 129 bp, Homo sapiens
aggatctttggaacggcggttctggcacatgaactcattggtcgtacaagtgctgttgtacaacgcaaccagctgcgatgctctcgtatgcaccatcagcacagtcttatgtcgccgtcccaaagcaca

SEQ ID NO: 654446 - DNA, 673 bp, Homo sapiens
  misc_feature (62)..(62): n is a, c, g, or t
tgcaggaattcggcacgaggggaaatctaaaatgtctctgaaagagattgtggatcatctanaaaagttatattgttcctcttatggggtacaatacacacatattccatctaagcaaaagtgtgattggttaagagagagaattgagattcctgaaccttaccaatatacagtggaccaaaagagacaaatcttagatagattaacatgggccacttcttttgagtcattcttatctacaaaatttccaaatgataagaggttcggtttagaaggtttggaaagtgttgttccaggtattaaaactttggttgatcgttctgttgaattgggtgtagaagatattgttttgggtatggctcaccgtggtagattgaacgttttatccaatgtggtccgtaaaccaaatgaatctattttttctgaatttaagggttcgagcgctcgcgatgatattgaaggatcgggtgatgtcaagtaccatttgggtatgaactaccaaagaccaactacgtctggtaagtacgtcaatttatcgctggtggcaaatccttctcatttagaatcccaagatccagttgttcttggtagaactagagctttattgcatgccaagaacgatttgaaggaaaaaacaaaggccttaggtgtgttattacatggtgatgctgct

SEQ ID NO: 654447 - DNA, 322 bp, Homo sapiens
caacccatccctttctaaaccttacagtagcatttacccaagaccgtgttctccttaactaaatgactcatttatccagtttcatgtacactttgcaacgcaattcacaattgtcatagacacatgaaatctacatttaccttttaaagtttaatcaggtaaacccaatattttcttggtaataaccgtgtgtgatatatagtaagcccaaggccagtgtagagaaaaagctataggcaaaattacgtgttttttaaaaacactttcctactcaggaatatatttagcattttgtacactcggtgatatgttatatgtgtca

SEQ ID NO: 654448 - DNA, 755 bp, Homo sapiens
  misc_feature (50)..(50): n is a, c, g, or t
  misc_feature (81)..(81): n is a, c, g, or t
  misc_feature (87)..(87): n is a, c, g, or t
  misc_feature (91)..(91): n is a, c, g, or t
  misc_feature (98)..(99): n is a, c, g, or t
  misc_feature (102)..(102): n is a, c, g, or t
  misc_feature (106)..(106): n is a, c, g, or t
  misc_feature (120)..(121): n is a, c, g, or t
  misc_feature (125)..(125): n is a, c, g, or t
  misc_feature (128)..(128): n is a, c, g, or t
  misc_feature (140)..(140): n is a, c, g, or t
  misc_feature (145)..(145): n is a, c, g, or t
  misc_feature (148)..(148): n is a, c, g, or t
  misc_feature (159)..(159): n is a, c, g, or t
  misc_feature (166)..(166): n is a, c, g, or t
  misc_feature (189)..(189): n is a, c, g, or t
  misc_feature (227)..(227): n is a, c, g, or t
  misc_feature (238)..(238): n is a, c, g, or t
  misc_feature (249)..(249): n is a, c, g, or t
  misc_feature (252)..(252): n is a, c, g, or t
  misc_feature (255)..(255): n is a, c, g, or t
  misc_feature (273)..(273): n is a, c, g, or t
  misc_feature (329)..(330): n is a, c, g, or t
  misc_feature (365)..(365): n is a, c, g, or t
  misc_feature (380)..(381): n is a, c, g, or t
  misc_feature (383)..(383): n is a, c, g, or t
  misc_feature (385)..(386): n is a, c, g, or t
  misc_feature (424)..(424): n is a, c, g, or t
  misc_feature (455)..(455): n is a, c, g, or t
  misc_feature (503)..(503): n is a, c, g, or t
  misc_feature (505)..(505): n is a, c, g, or t
  misc_feature (542)..(542): n is a, c, g, or t
  misc_feature (635)..(635): n is a, c, g, or t
  misc_feature (638)..(638): n is a, c, g, or t
  misc_feature (683)..(683): n is a, c, g, or t
  misc_feature (687)..(687): n is a, c, g, or t
  misc_feature (692)..(692): n is a, c, g, or t
  misc_feature (727)..(727): n is a, c, g, or t
aaccacaaggggacactctagctaaggttatagatagcggggagaaaagngaggaaccgcagaggaaggaaaaggcaaganatttanaaanaaaaatnnaanaaanaaaaatgaaaattnnaaanaanccgcatacaaanagaantcnagggggtaaancgccggnagcctaaaggggcgatgagtggncccagatgtccacggcacggggcgggcggaggcaaggncggggaaacanacgatgggcantanganactgcgcatgtacaagancaactactgggggcggcggccccgtgcgtatgtgtcaggctgttcgttctggaatnncgaggggtggtctttacataatattctgtggctgncggacccccaaaaannanannttatcgaaaagatgagggcgacgatgagaccgtagtcnccgagcacctcggcgaagatgagaatcaggntcatgcccacgaatagtcggggctgctgggcggtgccccgcacgccancntcccccacgatgccgatggcaaagccggctgccaggncgctcaggcccacgctcaggccggcgcccagctggaggaagctcttgtagaggctgatgtcgtcattcagggagttggcgatgaggactgccnccnccaggccgtagatggcgatgatgccagccatgaccactgggatgntggncttcntgatctgctccggccgcatgacagacatggccgcnatgccggtaccgctcttggctgtgcata

SEQ ID NO: 654449 - DNA, 233 bp, Homo sapiens
aatgggaagaatggtagggattggttcaacattagggtacttcgagcgctaaagcttcgtggtcgtataaatttagatcattaggattgattatatacacatagatcttcaggactttacctttagtaaaagtaaaattccttttagccatctttagttcttgtaatcccaactagattggctttatgctcacatcattgtcccatacccacccaatttctcatcctagggaa

SEQ ID NO: 654450 - DNA, 586 bp, Homo sapiens
ttattattgtacaccgtgaaggtgaggttaattaagtcctgttgtggggtatgagggccagattctaatttttggagttttatttaatgtcgggagcagattgggtaataaagtgtatattgagaataagatggccttttgaccatttagggtctagggctgtaaagtgtctcagggttgctgccgaacgagccatgaactgttctgggtttttatatttgatgaaaaagagcctaaacgcttctgatttgggataaagaaaaaggagcattaaccttgactatgcctttggctccagccacctttttaagagtaaattgctgagcaggtgggggagggctagtcacggaacataactgcaagcaggaccaggtgtgaggaggggaggcgataaaaagattacagggtggaggagcagaggctgaggaagaattgggacctatcttggcctggtgaggaggggagaggtcacatgggtcttgttgaaaaggggagatttgaaagactcagtggacgccctcgttgcccgaaatttctttttgggggggggccccccccttttttctctttaaaaaaaggggggggg

SEQ ID NO: 654451 - DNA, 92 bp, Homo sapiens
ggggtttccaggccccttttttttgggggcaaaaaaacataaaaccaaattgaaatatttaaataaaacaaaaaaaaaccaattaatttgga

SEQ ID NO: 654452 - DNA, 102 bp, Homo sapiens
  misc_feature (28)..(28): n is a, c, g, or t
tttcttgcatcatgtcagaaattcaggnaagtcaatagtgccattaccatcagcatctacttcataaatcatgtcctgtaactccccgttctgtcgtcttct

SEQ ID NO: 654453 - DNA, 303 bp, Homo sapiens
  misc_feature (4)..(4): n is a, c, g, or t
  misc_feature (35)..(35): n is a, c, g, or t
aatntttaagtagagatggggtttcacgatgttgncccaggctggtgtcgaactcctgacctcgtgattcgcccgcctcgtcctccctaagtgctggaattataggcgtgagccacgtgcccggccacagttattttattttataactttaaaatagagatgaggtcttgctatgttgtctgggctgttctccagctggcttcaggcgatcctcctgcctcagcctcccagaatgcttggattataggcgtgaacaaccatttccaccaaaggctgtttttttaaatttttgcaccattctct

SEQ ID NO: 654454 - DNA, 146 bp, Homo sapiens
  misc_feature (4)..(4): n is a, c, g, or t
  misc_feature (95)..(95): n is a, c, g, or t
gagntgcagctgataagagcagacgatgatagcgtgttagaaccatcacacgtcaagaccacttggctcaaataagggatgaggaaatctacaangaaatggaaatcagaaaaaagcaggagtcacaatcctagtttttgacaaaa

SEQ ID NO: 654455 - DNA, 447 bp, Homo sapiens
tgagcgggccgggccatgtggactgttggctgattggcgcctctccccgtatctaatgatttgtgccttgtgcttccctgggtgacgtgcctttgcttgggtgtggaacggtgatatttgggtgttttggaaaccttgttcggggttgttcctctccttcttgagcatcatcgtgactttctgtgtgcttggtgtatttcacactgaggactaatctgctatcttcattccagtccctacccctcagggcctgctctcatccaaataacctgggaggtgacaatcaggatatctcaggaggtccaaggtggaacagacctctttgcctttcccagcgtctcatacccccggtagtgcagctgtgggtggaggctggggtgtctgcacgaagtctggccagcgtcctcctccacaggctgtcactgccccctccccagcctgtgtcca

SEQ ID NO: 654456 - DNA, 1019 bp, Homo sapiens
tgttgcatgcacggcctcctttggttggaggtgagagaagcacattctcccgcgggtggtccttcactggggaattttctctctgggtgcgaatttgctccgctgtttttcttcgtagctgtgttgttgccgccgcaaacacttggggggtggctttctcgtctctctcttgttgtgtttgtttcgttctcgtcctttgttttgccccacgcaccagcagtggttgtcgctcccccacatcacatgtttgtctggcgcgcgcgctcctgttctagtttatacacaagtccgctccctctcttatttttcttgcgtgtgccggcgcggcaccaggaaatcttttttcaactctgtacagaaaacggaaggactgtcgtgtaagtgttactagatcatgggttggactgacaaagacacacttcatcgtttgtttggggatagtcactccacagagtagtactttctcccccgccgatcaaagcgattgttgtggggggtgccgctccatcactggatctgtcctctctcttggcggagctttttctttttctattgatattggatagtctcgttgttggtttttttcttcaccacaacggacacacaaacagcagggtggtgtctctcacaaccccggctattgttggagcagcacccctcgctacagatagttttgccctcgtgccttattatctggggtcgcgttgttaaatagaacagaaaatctgctgcggcgggtggtggttgcgcccaccatatgcctctagctaacacaccggcgtcttttataatgaggccatggtgggggggttttctaaaccatacaggggcgttttataccacacctcctcggggggtcatcactgcccccccccctccttgtcccaaaaggggcgcccccctttttttttttttttttttttttttttttttttttttttttttttttttttttttgtgtgtgcccattttgttatcacatccctatgaagttgaaaaattaagttaattttgaccca

SEQ ID NO: 654457 - DNA, 242 bp, Homo sapiens
ctttcccgtatacagataggaaccatcatgcagcgtgtcagcctcttcctcccctgacatgctgggagagggcatacaagcccatctccctgacgacattgaacaggggtcccaccctgccggccggggaaggggactatgttatcatctgcccatgagtccaaattctttgattctacattatccctcaactttcttcatatcattcctattcctcttaacttctaaaacagtcgttttgt

SEQ ID NO: 654458 - DNA, 473 bp, Homo sapiens
ttttttaggaacttctatactgttctccatagtggctatattaatttatattcccaccaacagtgttcagagattcctctttgttcccatccttgctagttattgcctgtcttttttgatataagccattttaactagggcaagatgatatttcattgtagttttctctgattagtgatgatcattttttcatatgcctgtttgtcatttgcacgtcttcttttgagaaatgtctattcagatctctggtgcattttacaatagaattttttttttttttttgctattgatttgttgaagcttcttatatattctaattattaattcctgtcagatggatactttgcaaatatttctcccattctgtggtttgttcattttgttgattgtttcctgtgcagttttttagcttgctgtaatcccatttgtctatttttgtagctaatattgcctgtggtttagaggtattaccc

SEQ ID NO: 654459 - DNA, 217 bp, Homo sapiens
cgactctccaggattccggctatcacattatctacagcaaataggctggggtagtatctgaaggaaaggccaacttttaaaaaccatttagtatgtgggggggtgctaatcataaatatttgcacggtaaccagaaacaaacaaccagcttatacaaacaaggcaccaaaatatgctactgctaataatcctttattcaatttagctcaacacacaa

SEQ ID NO: 654460 - DNA, 395 bp, Homo sapiens
acaaatcaagataatcaaaccaccacaagtaaaaagataataagaaacataaagcagttatcacgtacaaggtcagtggaaaagatgtccaatgaagaaatgactggtagtatactcttattatccccccacccccttaatcagacattaaaagtgcttaaccccttaacacttgttattaaatacttgcaagcatttagagatggtcttaacagggaagagagagggtgggggaacaaaatgtattatacataaagattttccacagatgctatagtactattgacaaactgggttagagaaggagtgtaccgctgtgctgtaggcacaaacaccttcagggactggagctgctttaatccttggaagagtattcccagttgaagctgaaaagt

SEQ ID NO: 654461 - DNA, 166 bp, Homo sapiens
gaatgaatatcccagtgctctgtgaaacaaccccgattaatatcagtgtcttaatttgtacacccccagaacagagtgtgtaggtgtgagaacaagtacttcagttcaagagtgtatttaggaggtaatccaggaagcagaaatgggaatgagcaaaaaaggaaga

SEQ ID NO: 654462 - DNA, 146 bp, Homo sapiens
  misc_feature (5)..(5): n is a, c, g, or t
ggtantaaagagtgagttgcctgcaagtaaagaattgagagtgtgtcgcaaagcttattttcttttatctgggcaagaattaaaacacattccttggaacagagctattacttgtcctgttctgtggcagaaacttttctttttga

SEQ ID NO: 654463 - DNA, 405 bp, Homo sapiens
ccgccccgcccaacccctcctcccagtgctgaagtcccaaggagccgccctgcaggccgaaagaatgagggtcgtgatcaactcagtatgccactggaggctatatgagtaaacagcaaaccgtttctcatgaaagcaggatgttggcaaactgacaaactgcgtctgccacccagaaggaatgctgaaggcagtcacgacccaggcacaagtgtttcttgtgattaggcataattgaagcctgttaacaataatgtgaacttgtgatcaattaagcagctgaccagtcgttacctcctcctccctttcatcctacccaataaatgtggagggctgtggaagctcaggggctgcctttgctcactagaagcagggagctctcttcttccccagttcgccttcttt

SEQ ID NO: 654464 - DNA, 206 bp, Homo sapiens
  misc_feature (54)..(54): n is a, c, g, or t
gtagatggcctgtcccactctgggaaggaggtggaaggagacaggagagaggtnagacagagaacgaggggctgggagacctggaagcctgagagaccctcactccctaacacacacacacacaggacacacacacacacacacacacacacacacacactcagaatatatgtctggagacttgcgcacatatacacagcgagcgt

SEQ ID NO: 654465 - DNA, 159 bp, Homo sapiens
tggtaataatataacttgttgggaccgacttacggttttagcactggagtaggcttaggttatgtacgtagtctaggccatatgtgttggagattgagactagtagggctaggcccaccgcgtgcttcgcaggcggcaaaagactagtatggcaatagg

SEQ ID NO: 654466 - DNA, 235 bp, Homo sapiens
gggcaaggggtgagggcaggtgaaatcaacaaaatatgtttatattttgtgtattttatttggctacctttccagaaggcctcccttactgaactttccctccgttcctttgggttaatttgcccatcctgggtccttgagatgtgtgcttacctaatttaatttcaattggtttcctaatatattcagggctatatgtattcttctaaatagtcctttgactgttccccacttt

SEQ ID NO: 654467 - DNA, 269 bp, Homo sapiens
ggggattttgcagttggtggggtctcaataaaagttattttccactgaaaaaaaaaaaaaaaaaaaaaaaaaaaaaaaaaaaaaaaaaaaaaaaaaaaaaaaaaaaaaccaaaaaaaaaaaaaaaaaaaaaccatgccgcccccctcgccccaaccaactctaaacccaaccaacctaatccatccgccccaaatccaaccccactggcccaatccccccaaaaggaagccgaataccaatcaacggcccgccgttaaacaacgccgga

SEQ ID NO: 654468 - DNA, 441 bp, Homo sapiens
tgagagtctcactttgtcattgaggctggagtgtagtggcacaatctcctcactgaaacctccacctcctgggctcaagcaattctcccacctcagcctcttaagtagctgggaccacaggcgtctcaccacgcccagctaattgttctatgttttatagagatggggtttcgccatgatgcgcagtctggtcttgaactcctggcctcaagtgatccgcccacctcggcctcccaaaacgagattacaggcgtgacatctcgtgcccagcctcagacataccactttttatactgtattttcactttttttttttttttttgagacggagtctcgctctgtcgcccaggctggagtgcaacgatgcgatctcggctcactgaaagctccgcctccaggtttcacaccattctcctgcctcagcctcctgagtagctgggt

SEQ ID NO: 654469 - DNA, 190 bp, Homo sapiens
cccccccgggggggaatttgggccccccccccgggggccaagggatttttttggggttttttttcccccggggggggtgggcccccccctttcccccccccccctttggggccggggtccccccctttcgggttttggggggccccccccctgttccttccccccccccccctccccccccccttgggga

SEQ ID NO: 654470 - DNA, 235 bp, Homo sapiens
tggacgaggcttgccgtgcttgatttgtgccgttggagcggggcttgggctggtcccgaggccggctggatcgggcttcttgggtgttgctgtgcggcgccgtggggaactgtggctggtgatatgggcgcctagcctgttgctgggttgcctgtgtggcctccgtgccatgttccgctggggctagcgtgacctgtggctgtgccgaacggcgaggacctcaattgatgaccct

SEQ ID NO: 654471 - DNA, 451 bp, Homo sapiens
cttgctgaatcctatcacggtcccggttgagcagccatacttgggccgtgtggcccaggggggtctatggtccagatggggtggtcctgagagcagggtctacacagcatctgactcactatgtggccggggcacgtccctgggcatctctgtgcctcagcttcccagttgtacaaggaggtggggtaagataagatcagtattttttctttcttcttctttttaatatctaaggagagggggtctcggccaggcacagtagctcaggcttgtaatcccagcgattgggaatgtgggggcgggaagatcacttgaggtcaggtgtccgagaccagccgggccaagatggtgaaacctcatttccattagaaatacaaaaaattagcggggtgtggtggcgcatgcttgaagtcccagctactcgggaggcaagggcatgagaatggcttga

SEQ ID NO: 654472 - DNA, 133 bp, Homo sapiens
ccgccctcgcccctgtgacgattcccgtctggcgtccctaacagggacaggtgtcagacatttcttgtggcgcttctcgaacggttgcttgcggatgttgcaatagtctcggcggatgacaatggtcctctgc

SEQ ID NO: 654473 - DNA, 954 bp, Homo sapiens
  misc_feature (188)..(188): n is a, c, g, or t
  misc_feature (190)..(190): n is a, c, g, or t
  misc_feature (199)..(200): n is a, c, g, or t
  misc_feature (275)..(276): n is a, c, g, or t
  misc_feature (298)..(298): n is a, c, g, or t
  misc_feature (301)..(301): n is a, c, g, or t
  misc_feature (382)..(382): n is a, c, g, or t
  misc_feature (442)..(442): n is a, c, g, or t
gagccgagcggagtggactcgaggcctgtagcctggactgggcccctcgccccctcctccagcggctgcgggccttggcagcgccgccctgcccacactgaccccgtgtggcggggccgctccgcgcccccgggccgctctgtaatggtagggcagcctcagccccgagatgacgtcgggtctccgcngncccgggttnnttgtagtgaaccatcctggccccgcgtaatcgtaggaactatcctggccccgcgtaatcgtagtggtcttgcgcnngtgccctggcccccaccagacnggnactcccctgccccaatttggcggccgaagagtctcctcgccccagagtcatcttcgggacgcccagggcccgggtgatttntgggctctgccgcggccccgggtgattgtttcatctccgtggcccgcggtggtcgtagcngtctccgagacctgcggactcccgtagggtccccgtggccccgagatttgtagtcgggacaccccgtgccgcgtagtgatcgtcgggtctagcatgcagcccggggtcgcatgacgcggatccggccttacgggcctaacttcagggaacgccctgcaatgtgccgtcaggtctagcattaacaattcatggcacccgatgcggaaggatcggcggtcatggacggaagcatgccccgaggtgcctcaggggaagagaccgccgagtatagacaatggtgtaacaaatgtaccttccagacaccgagtatcacctgtctcacctggccaatgtaattctcccggtgaccatgggcaacccggtgcgagataggggacattaaccggatgtgggacaagagaaaaggcgaaacaaaactgccatttggcaatccaactcaaagggaatacaaaggaacatacatagccagtcaatcaatggcataacaagccttgcaatgaatgttggactac

SEQ ID NO: 654474 - DNA, 476 bp, Homo sapiens
  misc_feature (68)..(68): n is a, c, g, or t
  misc_feature (136)..(136): n is a, c, g, or t
atgtcaaatcctggtttagatcaaatatatttcaagctatattagcaggaggttatctgtgcaggggnctggcatcatgtatttaggggcaagtaataatggaatgctactaagatactccatattcttccccgantcacacagacagtttctgacaggcgcaactcctccattttcctcccgcaggtgagaaccctgtggagatgagtcagtgccatgactgagaaggaaccgacccctagttgagagcaccttgcagttccccgagaactttctgaatcacagtctcattttgacagcatggaatgtgcctcttgaagcatagctttttaaatatctttttccttctactcctacctctgactctaagaaatctcttttttgggatcgcttgaaccccggaggcggagggtgcagtaaaccaaggtcaagcccctgcactctagcctgggtgacagagcgagactccatctcca

SEQ ID NO: 654475 - DNA, 109 bp, Homo sapiens
caggtggtgggcatccactatagtcactccaggtcatggagaggttcttctgactattagagactttgcgcttcgaagcgaatgtttctcaaatcatgaaaattattaa

SEQ ID NO: 654476 - DNA, 547 bp, Homo sapiens
  misc_feature (135)..(135): n is a, c, g, or t
  misc_feature (208)..(208): n is a, c, g, or t
attatgcgtaacaccttcggccaggtcctggagcgtggtgtgaagctgcccgacctgcaccagcgtttagccccactcctggatattagctcaaccttccacaagactacccagaccctggcccaaaaaaagtgntgggagaacatccgttcccggatttgcgtggggctggtggtggttggtgtcccgctcatcatcctgattgtgntgctggttgtctttcccccccagagcagtgacaccagtagtgccccacggacccaggatgcaggcattgcctcagggcctgggaactgaccccgctggtcctgaaggaaaagcccaatggctgcattggccgattttggtttccagaggaccctggtgtttgctctcccttgaccccccccagtgagtgccaaagggcagccccaacatgtgcccccctgcttttcctgtcatgccccagactggcccttgagggcaccccgctgtactggccatgttgggccccccccccctggagctcagtaaaaactgctgtttgattaaaagctggtttctgtga

SEQ ID NO: 654477 - DNA, 119 bp, Homo sapiens
tggttgctccaggcggaaattaggagagtgggctgttctaagtggtccacatgaaggcaggtcagtgcgggactccccgtggcaatgcacttctgtacgcggaaatgagtgagagtggg

SEQ ID NO: 654478 - DNA, 212 bp, Homo sapiens
aagtatttcccaatttggcattaagagatataaatctgtgggtctagtattttttaattgagttttctcactctctctcatatatgtgtatatatatatgtgcacacctgcccaattttctattcagttgttgacaattaaaattctccatttacacaggtaatatgtgttccttcccaaattctgttaaccaccccttctgtcgtcttctc

SEQ ID NO: 654479 - DNA, 100 bp, Homo sapiens
ataaatatatttctggtggcatcagaaaaaatcaagaagcttccttgtagaagtggccagcacagaatttgaatgcagactctagtacttagaatccagg

SEQ ID NO: 654480 - DNA, 346 bp, Homo sapiens
tgtcgctggtggtctggcatccattcttcctttactcctgcagccggtttatcaagttgtaaatcttcacttgttgaattcacaagttcatgtctgtagtcccagctactagggaggctgaggcggcaggatcgcttaaacctgagaggtggaggttgcagtgagccatgatcacgctgctgcactccagcctgggtgacaaagcaagactctgcgcgtggtggtgcacacctgtagtcctagctactctggaggttgaggcaggagaatcgcttgaacctgggaggcggaggttgcggtgagccgagattgcgccattgcactccagccagaaccacaaatatcg

SEQ ID NO: 654481 - DNA, 389 bp, Homo sapiens
  misc_feature (9)..(9): n is a, c, g, or t
  misc_feature (17)..(17): n is a, c, g, or t
  misc_feature (67)..(67): n is a, c, g, or t
  misc_feature (260)..(260): n is a, c, g, or t
  misc_feature (385)..(385): n is a, c, g, or t
actggtcancaatccancatgtcccaggtcctaaatgacccccggggtactccccccgacaccccanggcaattgccccttttggggccttggcaattagaagttcccttctatgtgctggtctctttccccagatgccttgaattgctcttttaaatgtatgctcaatgaacctttcacaatatgccatgactttacataattgaaaatttcttgatttatttttgttttaaatgtatgtgttttgcctctatggatgnatacgcctctgtgtatgtatatatgtgcacaacacgggtgcttggtgctcttagaggtcaaaggaacgtatctgatctgctgaaattagtggttaattattgattgatatgaatgattgtgacancacc

SEQ ID NO: 654482 - DNA, 394 bp, Homo sapiens
  misc_feature (154)..(154): n is a, c, g, or t
acaaattgatgaattttccaggtgcaagccagtctgagaggctatgttccttataaatggttaacttaaggaggtaccagtgaggccagcatttgagaaccacaatcctttggcccggtatggtggctcatgcctgtgatcccggcactgtggnaggccaaggcgggtggatcacttgagcccaggagtttgagaccggcccggccggcatggtgaagccctgtctctactgaaaatacagggattatccgggtgtgtggtgcacacctgtggtcccggctactgggaaggccgaggcaggagaatcgcttgaacccgggaggtggaggttgcagtgagcccagattgaaccagtgtactccagcctgggcaacagagtgagactccgtctcaa

SEQ ID NO: 654483 - DNA, 194 bp, Homo sapiens
  misc_feature (71)..(71): n is a, c, g, or t
caagttggtaggactacagatgtgcaccaccatgcccagctaaatttattttttgtagagacggagctcanctatgttgcccaggctggtctttactcctgggctcaagtgatcacctcccttggcctcccaaagtgccgggattacaggcatgagtcaccatgcccagccaataattaagagacttcaaaaac

SEQ ID NO: 654484 - DNA, 846 bp, Homo sapiens
  misc_feature (143)..(143): n is a, c, g, or t
  misc_feature (151)..(151): n is a, c, g, or t
  misc_feature (238)..(238): n is a, c, g, or t
  misc_feature (351)..(351): n is a, c, g, or t
  misc_feature (353)..(353): n is a, c, g, or t
  misc_feature (386)..(387): n is a, c, g, or t
  misc_feature (410)..(410): n is a, c, g, or t
  misc_feature (413)..(413): n is a, c, g, or t
  misc_feature (415)..(415): n is a, c, g, or t
  misc_feature (418)..(418): n is a, c, g, or t
  misc_feature (420)..(420): n is a, c, g, or t
  misc_feature (455)..(455): n is a, c, g, or t
  misc_feature (457)..(457): n is a, c, g, or t
  misc_feature (472)..(472): n is a, c, g, or t
  misc_feature (475)..(475): n is a, c, g, or t
  misc_feature (494)..(494): n is a, c, g, or t
  misc_feature (498)..(498): n is a, c, g, or t
  misc_feature (511)..(511): n is a, c, g, or t
  misc_feature (538)..(538): n is a, c, g, or t
  misc_feature (543)..(543): n is a, c, g, or t
  misc_feature (553)..(553): n is a, c, g, or t
  misc_feature (567)..(567): n is a, c, g, or t
  misc_feature (571)..(571): n is a, c, g, or t
gaaccccttctttagggtccagaaggaattgtggactgaatcactagccttaggtctttcagcaaacagcctatcagggccatttatcatgtgtgagatttgcattttactttgctgactttgtgtaatagatcccattcatngtcccctntggggtatttccaatacttgaatggcagatggagtttttcagagtatgtgtttcatctgctagtctttctctccttcatagcttttnttttcctggacttgctcctttgagtgctttgcgttctcatgcctaggcaagtgtaatagaaattatgtagctccttatgtggcaaaggagctctatatagtttcacttgtatnanagttaggaccagctgtgttacatgtaatatttnngttcagaacttgacctgaaggcnggnanganangtatgtgatttttaccttttttaacaaatgtgaanangtcagtttagaaatncgnggtagtaagtcggcattgntacntgtatagagagangactaataatctctatttataactaantcatngagatagaanagattcccattgantgtngactcttcccatttgtctccttctgctgttccccttcaggcttggcctctaggaaccaaagtgattgtcgtgttccaacactgggcttgtgacttggttagtgccactaccttcttcctcctttaccccttcaattggaataagtttctgtatatgtgcatcctaggtaaggtagtctttcttactcattaatctctctcacttcaagatacccctcccatgcaaataattaataccaggaatcttcagaattcaaaattcagcttttccactta

SEQ ID NO: 654485 - DNA, 421 bp, Homo sapiens
gctcgaccctggccgtcgatacccggcgtcgtaatccagttggtattcgaggccgcgaaaacgggtggtctccaggttgttcacatacgccgcattgccaatgttgcgatgcataaccgggtggctgcacccccaaggccatataggagaagtcatcgacgcgagtgttgaagtaggacactttcacgcccacacggtcgtctgcgaacacaggtcttccttgagcacgttgaacccgacctcccacgccgtgacttctcgggcttcaagtaggggttgggcaggatcgattccgaaccaccgccatggggccggccgctgacgagggtttcggtgaccgccggagacgccagcccttgccgtacgtggcaaacagttgcagccagtcgacacccggcttgatcgacaggccgaagtcggc

SEQ ID NO: 654486 - DNA, 234 bp, Homo sapiens
tcgctgccggcgcgggtgctatgatgcatactagtttttgcgcctggaggcggtggtaggctacgcctactagtctcaatctccaacactatatggcctagactatgtacataacctaaacctactccaagtgctaaaactaatcgtcccaacaattatattactaccactgacatgactctccaaaaaacacataatttgaatcaacacaaccacccacagcctaattattca

SEQ ID NO: 654487 - DNA, 230 bp, Homo sapiens
ctgctttaaagcaggtggctggggtggctctgtgaggtgcacatttaagctgcaaatgtgcagggtgggcaaggcgtcagacatggctagatcagcagggagagcatttcaagcagcaggaacagtgcagcatgcgtggctgtttcccagactggcagacagcagtgtgcctaggctagggagccagggaagcgtggccatgttttgcggggtggcagcagggcagcagg

SEQ ID NO: 654488 - DNA, 948 bp, Homo sapiens
  misc_feature (4)..(4): n is a, c, g, or t
ccanaaaataataaaaagatcgaaaagaaacggcaagaacgagaaagggtgagagccacagttgctgtggcgtagaggtgccaccacggtgggactacgtgggcgcctcgactgcgggcgcccttcgttctttttggtggccgcactccctgggcggtgtaaaccctgctgtgctctagccgttccacgttgtgcttcatatgatatccggttatccgactacatacaaccgcttttataagcgcctttgtcgcccacaaattgtaccgcttggtctgtgcgtaaggagcgaaacctggtgaagcgcgggttctacatcaataaacagaaggtaaccttgctgccttgaaatatgcggttttttgaaccgtggccatcatggcgaaagggcccggtttgtcgacaaggcaaagccccacgttttcaagggttgccatggaagcgaacaccacgagtgattggggttgacaagcaggcacgttcaaatatggcgggttgcccacgaccggacgcgtgatatgcccgcttgtcttcacaataggccgctcctttatataggttccccataaaggagccagccgctttggtgcactaaatacgaaataaaaaaatagagtcatggacaagccgcgttgttaaaattagtatgggataggaataggccttcagaacttcttgcccctcttgtgaaagagaacgaaaaaaaagagtagcggaagacaagttgctggtcgtgtttttaagagccaaacaaaaatcgggcttttaatccggcacaacggtatcatagaaagtgggctagattccccgcttgattggtaaaatcttaaacccaccagttaggttggcgggcatagatattttcgtccccccagtcaaattgttctaggagtctgttatttcccagccccaggaaaaaataaaaattcttgcccccaacacatgaca

SEQ ID NO: 654489 - DNA, 903 bp, Homo sapiens
gaaaaaaaaaatatataaaagttagctgggtgtcatggcgggtgcctgtaatcccagctactctggaggctgaggtaggagaatcacttgaatctgggaggcggaggttgcagtgagctgagatttgcaccactgcactccagcctgggtgacagaatgagagtctgtctcaaaaaaaaagaacaaagaaaaaaatttcagacatatttatttgtatctcaaattcctgacctcgtgatccacgtgccttggcctcccaaagtgctgggattacaggcgtgagccaccaagcccggcccaacttctcctaatgtggctatttggatctttttctaaactcatgaatgttctcaatggcatctagaatgttgaatcctttccagtaggtttccaattatttgtgcccagatccatcaaaggaatcactttctagagaagctatagctttatgaatatattttcaagtgataagacttgaaagttgacattattctttgatccaggggcccagactgactgtcgggtcagtaggcatgaaaacaatattcagtctttatacatctctgttaaaagcccttgaagtacccagcgggattcgtcattgagcagtatactttgaaaggaatcttatctcttgagcagtagttctcgaccagtgcgctaagaatattcagtaacccttttttgaaaccatggttgtcatccagcttgttcccttgtagagtcagacgacgtgttactcaaatctcaggcccggattcgaaatacatcttgtccggcactcccatgttgctacacaaactgtctgactaacaggaaaacctgtggaccggagccctaaggggagacagggggagcaaaatatacggcacgtcgatgaggacacacaccactgacacaaga

SEQ ID NO: 654490 - DNA, 965 bp, Homo sapiens
  misc_feature (227)..(227): n is a, c, g, or t
  misc_feature (575)..(575): n is a, c, g, or t
gagcgcccctgatgcctcgttggaatgacactgcctgtaccttgaggccctaaaaacagaccatgagaccttcattcccttcgtgatcccattactgttgttctgtaattccctgcacaatatacctcagtgtctggagagacagggagagatctcatcatagaggatctgagaacttagatgaacaatagtgtaatagtccatatcatcaaggtgccctatcatanagattgtgcgccaatactcacctcgaattcctctctccatatccatatatgcatacgtacatgcttcgtgttggcaatttgtgtcacactagctcacttagtggcattatttatagaggaggaaggtgaactagtaagatcctgatcccatctattgtgatatttctcgtacacgtgacctcagattataatgcgtaaaaagcatgcaagttatcgaaaattgtcttctaacctcgatctatgtgtattcaatcgttatcctcttgtctctggcatcatgaatttacacaactattcaaatcacacgtaatcgtccgcaagtgccatgaaacaattgggctgcactcntgtcccactggaggcttgtatccatctcgatgtaatatataatgcaatgggacctaaccaagatgctccccctggtatttcaccatagtatccattcaaaagaagtcagtgaacactaatttattcccatagtctatgcatttcctccatgtcgtattgggatgccgccgtaagctagagatagcatagaatccatcccatgtgtttgaatagaagagtcctagttattgacccgtagtcaaagacgtggaaaggcagggccttgctgaccaatttgggctgacaaatcatactcggccaattggcgcaatgggcccatatacctcctcgaggttggtaaatacatttggggtggaagaaccattggaaaaccagtggggtgccaaaaat

SEQ ID NO: 654491 - DNA, 423 bp, Homo sapiens
  misc_feature (10)..(10): n is a, c, g, or t
  misc_feature (15)..(15): n is a, c, g, or t
  misc_feature (26)..(26): n is a, c, g, or t
  misc_feature (63)..(63): n is a, c, g, or t
  misc_feature (102)..(102): n is a, c, g, or t
  misc_feature (108)..(108): n is a, c, g, or t
  misc_feature (124)..(124): n is a, c, g, or t
  misc_feature (137)..(137): n is a, c, g, or t
  misc_feature (148)..(148): n is a, c, g, or t
  misc_feature (156)..(157): n is a, c, g, or t
  misc_feature (177)..(178): n is a, c, g, or t
  misc_feature (196)..(196): n is a, c, g, or t
  misc_feature (268)..(270): n is a, c, g, or t
  misc_feature (282)..(283): n is a, c, g, or t
  misc_feature (285)..(285): n is a, c, g, or t
  misc_feature (287)..(289): n is a, c, g, or t
  misc_feature (296)..(296): n is a, c, g, or t
  misc_feature (298)..(298): n is a, c, g, or t
  misc_feature (303)..(304): n is a, c, g, or t
  misc_feature (309)..(311): n is a, c, g, or t
  misc_feature (315)..(316): n is a, c, g, or t
  misc_feature (318)..(318): n is a, c, g, or t
  misc_feature (325)..(325): n is a, c, g, or t
  misc_feature (414)..(414): n is a, c, g, or t
cgccgccgcnagganccgcgcctgcncaggcccggggagggaggaggcgggcgtcagggtgcngcgccccgctcggcgtccgagcttccaggccgggctgtnccccgnagcggatcttaagcangggataaagagcncctgagagganacgacctnngagagagacatggacgagannatcgacgtggggagcganaacaattactcggggcaaagtactagctctgtgattagattgaattctccaacaacaacatctcagattatnnnaagaaataaaannanannnattatananaaaanncgtcnnnatcnnanaaataanagtttatctgagttgagaagacttgtgccaactgcttttgaaaaacaaggatctgcaaagttagaaaaagctgaaatattgcaaatganagtggatca

SEQ ID NO: 654492 - DNA, 87 bp, Homo sapiens
cagagcccgggtccctgcgccccacaagccttggcttcctgctagggccggcaaggccgggtgcagggcgcggctccagggaggaag

SEQ ID NO: 654493 - DNA, 644 bp, Homo sapiens
  misc_feature (1)..(1): n is a, c, g, or t
  misc_feature (4)..(4): n is a, c, g, or t
  misc_feature (10)..(10): n is a, c, g, or t
  misc_feature (17)..(17): n is a, c, g, or t
  misc_feature (32)..(32): n is a, c, g, or t
  misc_feature (34)..(34): n is a, c, g, or t
  misc_feature (36)..(37): n is a, c, g, or t
  misc_feature (53)..(53): n is a, c, g, or t
  misc_feature (94)..(94): n is a, c, g, or t
  misc_feature (104)..(104): n is a, c, g, or t
  misc_feature (128)..(128): n is a, c, g, or t
  misc_feature (620)..(620): n is a, c, g, or t
nacngagaangaagaancggcccgttctttcntngnnggtttggttctttccngtggtgaccgggttgggctcttttgagatcacaactttccnttgacacaancctaaacgccccatttagagtggngggggcgggcctctcccccggcctctttcttggggggaggggcgccccttcccccccccttttttttaaaaacccccccttttttgtgtggcccccccttttttttttcccccagttttttcaccccctctgagaaccccccccccccccccccccccgtttatttttttttttttcccgcgcggttttttttctttttttttttccccccaaaaaaggcccaaaaactcccccccggggggggaaaaaaaaacccccgccccccctccccctaaaaaatatttttggggggtgggggagggaaaaaaacagggggcggtgttttattaaaaaaaaaaaaaattatctctttaaaaaatatttttttttttcgcccccccccccccccccagaggggggttttttttttttttttggaaaagaaaattttttcctctttgggggggggggggggagaaaaaaaattttttttttattttttctgggggaggngggtgtttgtttttattttttttt

SEQ ID NO: 654494 - DNA, 132 bp, Homo sapiens
gaaggcatcggaagatactttactgggtacggagtacaaatctatgcaagcggtggacatgttataggaactaaagtcgtggttctacaacattgcaaatgcactcgatgccactgacactgttcactttac

SEQ ID NO: 654495 - DNA, 138 bp, Homo sapiens
tggagtagggctggaccatccttaaatagggcaaatagcgaggctgtggattggttatgtatttctggtgaggagaagcaaggggatgaaatgtgtcttgaactcatgttgtcaagaatgagtgagtctacaggtgag

SEQ ID NO: 654496 - DNA, 146 bp, Homo sapiens
tcgtgctgcgttgttctcttcatgtacagctgcacctgtgtatcatgcccgaggatggtgtggcccagggtagctcagaatagtatgcccgtagatattacccgcatgaatggcgggccgctatcagaagctcgccccataagtat

SEQ ID NO: 654497 - DNA, 137 bp, Homo sapiens
  misc_feature (26)..(26): n is a, c, g, or t
  misc_feature (121)..(121): n is a, c, g, or t
gtcttcgtcgacgcgaagcacgtagncatgctcgcgcacgtttccgggccagacgtggcggcgcaacgccatgcggccggcctcggtaagagggttggggcgccctttcgttggcgccggngcgggcctgccagttg

SEQ ID NO: 654498 - DNA, 571 bp, Homo sapiens
  misc_feature (426)..(426): n is a, c, g, or t
tccctgacgcaccgccgtgatgcccagggaagacagggcgacctggaagtccaactacttcctcaagatcatccaacttttggatgattatccaaaatgcttcattgtgggagcagacaacgtgggctccaagcagatgcagcagatccgcatgtcgctccgagggaaggccgtggtgctgatgggcaagaacaccatgatgcgcaaggctatcaggggccacctggagaacaacccagctctggagaaactgctgcctcacatccgggggaacgtgggcttcgtgttcaccaaggaggacctcactgagattcgggatatgctgttggccaataaggtgccagctgctgctcgggctggtgccatcgccccgtgtgaggtcactgtgccagctcagaacactggtctaggacccgagaagacctncttcttccaggctttgggcatcaccacgaaaatctccagaggcaccattgaaattctgagtgatgtgcagctgataaagactggagacaaggtgggagccagcgaagccacactgctgaacatgctgaacatcttccccttctcc

SEQ ID NO: 654499 - DNA, 381 bp, Homo sapiens
gatgttatgggatgcgtacgaggtgatgcagtattcttgggttgtgagactcagcgaagtgtgctacaaagtgtgataggttaatcctgaactgcatgtataggggattgtttggtagaaaagaaaaaaaagaattttgaatcaataaatgaacagtgaatcacttgcgtggatcttcttgctgtaaatggtgactaagaggttgggacagaaatcttgacaactagtggaaaacttggataatctccaaggaccatggagccttctgtttccttctgtttgcagaaaagcaacactgcctgggttgtgatcctttacaagtgactacttcagacacaattggccacctctttgtatcactggatgactgaatgtatcgct

SEQ ID NO: 654500 - DNA, 504 bp, Homo sapiens
cctcagaggcccaaaaatttggcacgaggcaaggttgtttacttcgcgccgcgctcccccggcccgggagccagcctgggcacaggctacgaccccaaggactacgtttaagggacagacgcagggagaccccaccaccaccaaccccccccaacaccccccccccccccgcgagttggagggcgcaccaggccatccagggtgcagccttgcctcggaggccagcccacccccaaaaaccaggaagcccccgcgctggattggggcagcttccccaacaacccccggcttttcgggccgggcagttgacttcggggcccagggaccaacctgcatggactgttaaacctcccccttttggagcacggggcctgggtgacccccaatacttgacccccccgtcgagccccatcgggcccctgcccccatgctcgcgctgggcaggggccggcagccctggaaggggccctttatatttttcaataaaagcctttcgttttgcca

SEQ ID NO: 654501 - DNA, 1066 bp, Homo sapiens
gcgccaacatggagccgcgttcgcatccaaaaccgtgtaagaaggcggccctgcggtcatcgatataaaagttactagcacgcgcctgggcaacgacttccacacgaacaatgcgcgtgtgcgaggatgatcgtccattacttccccgagtgccaaacacagctccgaccgcacgatagccaggttatgctcaccgcactctgtatgaggcgaattcagagagtgtcccagataagatggtatcctccgatccactgctgcaggacgcacgacagagaaaggcagagtcaccaattatgttcctgagggtcgtcagtccttggcatcacgaaccagttactcgagagatagcatccctgactggtgacggtaacatgctgcaatgcttatttgaaccttcgtgcaggtctgatgcatcttggtcagggtctacctcaagcccgtaagccaattcgggactggagatcttcaagaatacggccgttcgggggaccctcgttgttggaactttgttttcttgtaacgtgcctgctaattgatttttcctgtagattatcttggggacaaatcacgttaagaactaatactagccaagttacaagacacaagctaagaacacactgccaatggacccttgtatgttgtaaagggtttctccgggaaatgaaatgtgggttctctaggtatatgtcgaggtcccagaattgttcgtcgtagataggctgtatcattcctgtgcccaccagtccttgtggtgtatatctaaaacactgtgggtagacattttcacctgcgggcattcacccgttattcggcagaaggcaatgtattaggatcgccgtaaggaaggctcccgtatgtcccccgtggatttattgaagcaccaggggcaaaacatgttatctgacgcaccatcctactgtaggtcctcccccaacagggctgaatctccacctttggaacacggggtcgttgcccacaacgatgtacgtgcaccccaaatccatgatgaactgccgaaccaccatattcacaatagcgactgagattaccactctttatacac

SEQ ID NO: 654502 - DNA, 421 bp, Homo sapiens
aaaaaaaaaaaaaaaattggaacgcaggcaagaactcgtatttgggaaggagatgggggaaaggagcggtattataccttaagttggtattttgcaggcaaattgagaatggagcccttcttctgtgttaaagaaagagctcattgtgtgcaagttagacggggctctggtgggttgcaggccctgtggaggggcacacaattggcctgtggaaggctttctgtggtgaagaactcgggaagaagggcaggagaaggcagctcttcttggaacaacaattaaagttatttttatattctcattgtgggtattttatttaaattgaaaaaacaaatccccagtgggtgttcccgtgttgggtgttgggtggaaaccttaagtgacgtggttgaaattaaaggttcgtgggtttttccctgtg

SEQ ID NO: 654503 - DNA, 437 bp, Homo sapiens
  misc_feature (220)..(220): n is a, c, g, or t
  misc_feature (230)..(230): n is a, c, g, or t
  misc_feature (247)..(247): n is a, c, g, or t
  misc_feature (287)..(287): n is a, c, g, or t
  misc_feature (326)..(326): n is a, c, g, or t
  misc_feature (352)..(352): n is a, c, g, or t
  misc_feature (361)..(361): n is a, c, g, or t
  misc_feature (394)..(394): n is a, c, g, or t
  misc_feature (414)..(414): n is a, c, g, or t
ggcacagggttcaagaaattctcctgcctcagccttctgagtggctgggattactggcgtgcaccaccacatccagctagtttttgtatttttagtacagatggggcttcaccatgttggccaggctggtctcgagttcctgacctcaagtgatccgcccgccctggcctcccaaagtgctgggattacaggcatgagtctcactctgtcgcccaggctngagggcagtngcacacacagttcactncaggcttgacctcccctggctcaggtgatcctcccacctnagtctcctgagtagccgggaccacagacacagtctcctnacttagttgagaccacaggcgcactnccaccacanccagctaattttttgtatgttttgttagagatnaggttttccctggtgtttgnccaaggctgggtattcaaactct

SEQ ID NO: 654504 - DNA, 358 bp, Homo sapiens
  misc_feature (15)..(15): n is a, c, g, or t
  misc_feature (357)..(357): n is a, c, g, or t
tgtcccgtgtcctanattggaactggctattggcacagttcccagcttaagaataataaaattggccccagcatgggagctccttccccgtaatccccagcattttgggaggccaaggcgagtgaattacttaaggccgggagtttgagaccagccctggccaacataaggaaaccccatctctactaaaaatataaaaaattagctgagcctggtggtgcatgcttgtaatcccagctactcggcaggctgaggcacaagaatcacttgaacctgggaggcaaaggttgcagtgaactaagattatgccactgcactccagcctaggcgacagagtgagactctgtctcattcttng

SEQ ID NO: 654505 - DNA, 138 bp, Homo sapiens
  misc_feature (83)..(83): n is a, c, g, or t
cgagtatagtaaataggtctctgcacatgaaactggtaccaacacatatactaattataaaacgtctgtatagtccactatgngcaattatgaacggcagagtataatatggtgagcctgacaaagctatactacaag

SEQ ID NO: 654506 - DNA, 318 bp, Homo sapiens
atgataaaatatgatccatgaaaacatactaagtgaaacaagcagatacaaaagggcaaacatatgattccacttatacgagatacacagaataggcaaatttcatagagacagaatgtaggatagaggttaccaggggctggggggaaggagagttatttcatgagtacagagttctgtttgggatgatggaaaagttctggaaatgaatagaggtggtggttgcacaacacagtgaatatacttaataccactgaattgtatgcttaaaggtggttcccaaaacaaattttatgggatgtgtaaataaccccaatt

SEQ ID NO: 654507 - DNA, 211 bp, Homo sapiens
  misc_feature (26)..(26): n is a, c, g, or t
  misc_feature (34)..(34): n is a, c, g, or t
  misc_feature (42)..(42): n is a, c, g, or t
  misc_feature (44)..(44): n is a, c, g, or t
  misc_feature (49)..(49): n is a, c, g, or t
  misc_feature (53)..(53): n is a, c, g, or t
  misc_feature (62)..(62): n is a, c, g, or t
  misc_feature (72)..(72): n is a, c, g, or t
  misc_feature (74)..(74): n is a, c, g, or t
  misc_feature (88)..(88): n is a, c, g, or t
  misc_feature (91)..(91): n is a, c, g, or t
  misc_feature (95)..(95): n is a, c, g, or t
  misc_feature (107)..(107): n is a, c, g, or t
  misc_feature (115)..(115): n is a, c, g, or t
  misc_feature (117)..(117): n is a, c, g, or t
  misc_feature (124)..(124): n is a, c, g, or t
  misc_feature (133)..(133): n is a, c, g, or t
  misc_feature (135)..(135): n is a, c, g, or t
  misc_feature (151)..(151): n is a, c, g, or t
atgacctccggctagcatgtgatttnacttccantccataangntcctnatantaggcctantaaccaacanantaaccatataccantgntggngcgatgtaacangggaaagnanataccanggccaccananaccacctgtccaaaanggccttcgataggggataatcctatttattacctcagaagtttttttcttcgcaggtttt

SEQ ID NO: 654508 - DNA, 233 bp, Homo sapiens
  misc_feature (166)..(166): n is a, c, g, or t
acttctctctcccacctcagtctctgaggtagctgggactacagacacgtgcaccactccggcccattatgtctgtttttgtagagatgacgtctcactatgttgcctagggtggtctcaaactcctaggctcaagtgatcatcccacctcagtatgactctttantctcagttttcatggatagtctctaaattctttacttttatgtgattgtgaggtgggaggagaggaa

SEQ ID NO: 654509 - DNA, 212 bp, Homo sapiens
acacggatatacggactgaatttagtccatcacaaaggatattacaacactgttgctggatctgagtgtttgtccctcacacaggattccagaacactgcttcgatggtctgaatgtttgtccctcacaaaggattctaaaacactgctgctggtttcttagtgtttgtcactcacataggattccagaacactgctgctgggtcctgagtg

SEQ ID NO: 654510 - DNA, 182 bp, Homo sapiens
gttgtggttcctgtaaggggtcctccctgctgccacaaggccgtcggccatggtgaagctgagccaaggaggccaagcagagcttcaagcaagctctttcaaggggagccagtttgccattcgcttggggctttatccctcttgtgatttacctcgggatttaagaggggtgcagatgcccg

SEQ ID NO: 654511 - DNA, 293 bp, Homo sapiens
  misc_feature (17)..(17): n is a, c, g, or t
  misc_feature (68)..(68): n is a, c, g, or t
  misc_feature (85)..(85): n is a, c, g, or t
  misc_feature (104)..(104): n is a, c, g, or t
  misc_feature (119)..(119): n is a, c, g, or t
  misc_feature (143)..(143): n is a, c, g, or t
  misc_feature (153)..(153): n is a, c, g, or t
  misc_feature (157)..(158): n is a, c, g, or t
  misc_feature (161)..(161): n is a, c, g, or t
  misc_feature (173)..(173): n is a, c, g, or t
  misc_feature (181)..(181): n is a, c, g, or t
  misc_feature (208)..(208): n is a, c, g, or t
  misc_feature (215)..(215): n is a, c, g, or t
  misc_feature (236)..(236): n is a, c, g, or t
  misc_feature (243)..(243): n is a, c, g, or t
  misc_feature (251)..(251): n is a, c, g, or t
  misc_feature (261)..(261): n is a, c, g, or t
  misc_feature (265)..(265): n is a, c, g, or t
  misc_feature (275)..(275): n is a, c, g, or t
ccccggatatttaagtnagtcttcctgaaagtactcagggtagcaagtaacaaaatggaaaagagtanataaagaaagtgcagtnaaaaaggaaactatgtggnaagtgccactctttnccttcccaccccccaattaaaggnaaacaatggnactnngancatgcgtaaccnagagaganttcaaaaactattaaaatgtaaaaganttaacanaaaaacaaaaagacggttaanagatgtnaaaaagcnccttagtgtntganaataaatgcntaaacaaaagacaacaga

SEQ ID NO: 654512 - DNA, 908 bp, Homo sapiens
  misc_feature (73)..(73): n is a, c, g, or t
  misc_feature (119)..(119): n is a, c, g, or t
  misc_feature (160)..(160): n is a, c, g, or t
ggtccctttggtaatacttgatagtgtctatgaggccgggcgtggtggctcacgcctgtaatcccagcacttngggggaccgaggcaggtgaaatcccatctctactaaaaataaaaangattggccgggcgtggtggcgggcgcctgtggtcccagctnctcgggaggctgaggcaggagaatggcatgaacccgggaggtggagcttgcagtgagccaagatcgtgccactgcactccagcctgggtgacagagcaagactccgtcttaaaaaataaataaataaataaatagacagatagatagatagatagtgtctatgaaggctgcccaagaacttgaccattagggaaacatggctgtttctgtggattaactagtcaagcccatacaggaagagtgaggtcagctcccaggtggggcaggatgtagtggacgcttggaagaatttgggaccacacacgaattgctaccatggtgagccagtgaaacttgaggaaggcaggactggattgtgattacaactgagtaagtaggcagagaattggagtgtgggcaacataaagatgatgtgaatcaaagaagaatggtcaattaagaccctaaaaaaaggacgttcaaaaatgcagaggttaaaaaaaaaaaaagcagagattgccagatgctccatttggtaggagtctgcttagcacagtggtgcttcgccagactttaccgtggcccagggaaatggtcctaaagacggactccatgtttaccaagctacttgctaatgatttctttgccctccaggacagggaaggggcttttctggatgggatacattgatattttatggccttgaaacactatcctgattataaattaataaattgctatgcaaataattgcattagtttcatcaatc

SEQ ID NO: 654513 - DNA, 852 bp, Homo sapiens
gatcgagtcccgtataatataaggtaacaaaccgccactcagaaaaactggcccaatgatgtgtgtggaggaagcattaaaggactgactgaaggcctgcatggattctatgttcatgagtttggagataatacagcaggctgtaccagtgcaggtcctcactttaatcctctatccagaaaacacggtgggccaaaggatgaagataggcatgttggagacttgggcaatgtgactgctgacaaagatggcgtggccgaagtgtctattgaagattcggggatctcactataaggaaaccattgcattattggcctgatactggtggaccatgaaaaagcagatgacttgggcaaaggtggaaatgcagaaggtacaaacacaggaaacgctgcaagttgtatggattgtggagatattccgatccccacataaacaccccctaggatggcagatgtgggacccttaaacaatctgacatacattctacatggataaaagctcccttgagaacagtctcgcactgaatccttcaaagagcaacgcggagaaacttcccgaagtgcatctaagtatccacagaccaaaactccaaatagatcactttacaaatttgacctcgctttaacataattacatcgcatgcccccttctcttcgcctgcaatagttgccgacacatacgaacgaccattttctaagattcaaacacatctctcattcatcttctgcgcagacaatgacatgcctcctcacacacatcatactcaaagacaacaattgacacccgcagcgacacaaccatagaaacagtgtctctcgatcaccactaccactacacccgataactaag

SEQ ID NO: 654514 - DNA, 829 bp, Homo sapiens
gatctggtatggggcgggtggggacagagagaaaagagatctcacctataaccaaattctggcagtgggaggaaggtagaggaggtgctatctgtagcagcagagatggacgtgatagttgccaagagacagaacctgggccacagcaattgctgctgatgtttctggttctcaaagccacactccgtcttaaaaaataaataaataaataaatagacagatagatagatagatagtgtctatgaaggctgcccaagaacttgaccattagggaaacatggctgtttctgtggattaactagtcaagcccatacaggaagagtgaggtcagctcccaggtggggcaggatgtagtggacgcttggaagaatttgggaccacacacgaattgctaccatggtgagccagtgaaacttgaggaaggcaggactggattgtgattacaactgagtaagtaggcagagaattggagtgtgggcaacataaagatgatgtgaatcaaagaagaatggtcaattaagaccctaaaaaaaggacgttcaaaaatgcagaggttaaaaaaaaaaaaagcagagattgccagatgctccatttggtaggagtctgcttagcacagtggtgcttcgccagactttaccgtggcccagggaaatggtcctaaagacggactccatgtttaccaagctacttgctaatgatttctttgccctccaggacagggaaggggcttttctggatgggatacattgatattttatggccttgaaacactatcctgattataaattaataaattgctatgcaaataattgcattagtttcatcaatc

SEQ ID NO: 654515 - DNA, 506 bp, Homo sapiens
  misc_feature (5)..(5): n is a, c, g, or t
  misc_feature (9)..(9): n is a, c, g, or t
  misc_feature (11)..(11): n is a, c, g, or t
  misc_feature (15)..(15): n is a, c, g, or t
  misc_feature (19)..(19): n is a, c, g, or t
  misc_feature (21)..(22): n is a, c, g, or t
  misc_feature (34)..(34): n is a, c, g, or t
  misc_feature (45)..(45): n is a, c, g, or t
  misc_feature (78)..(78): n is a, c, g, or t
  misc_feature (358)..(358): n is a, c, g, or t
  misc_feature (416)..(416): n is a, c, g, or t
gggantcangntcanggcncnntccgggtggccncggcgttgganacggcttgggcccttggccgctttaaacggatnctggcggcgcaggggggtggattccggtttggcccgagccctgtgcttgggaagtcccgcagaacgccggcagctgttgccttgcgcccgggagcaggaggagctgctggcgcccgcaaatggcaccgtggagctggtccgggcgcttccgctggcgctggttctgcacgagcttggggccgggcgcaaccgcgctggggaaccgctccgcctgggggtgggcgcaaaacttctggttaacgtgggtcaaaggttgccccgtgggaccccctggctccgngtgcaccgggacggccccgcgctcaacggcccgcagaaccgcgccctgcaggaggggnttgtactttccgaccgggggccatttgccgccccctcgccctttgcagagcttgttttgccgccgcagcaataaagctcctttgccgcga

SEQ ID NO: 654516 - DNA, 796 bp, Homo sapiens
gattaggcccctgtctccacaccgatatcgactctaatatctctgtaggaactattcatcaatggcgcagtggctcacactggtttattacctgagatagagccgtatgagaatgatatgtgcatacgacattggctatgtccagattgcatgggacagaaaaagaaatagaaacacctggggtcctcgacacgaatagtcctgctcagtcaaatgtattttgcatcaatcgacaatgataaaggcgttactcacagttaagtctctttctaattaggcttaatccgtacatgtcatacaaagtaatatctcgtcgcggggacccaagggggacatcgattgaaacccatataagcatatacacatttaagattaactcatgcgatttaccataactacatcatatggggctatatggcggtagaacacctacggaatacggcaccccggcttctcaggctttcttgacgatcccccactgaagtgtttaacccaaggacatccccctgcatgaccaatcccggactcttggattctttccgtcaccattgaccatgaaaactcttaggaccccgaaatactcaagtcggttataacacgacaaatatgtacatcccttctactttaacaaggttaaaggccctgtacattccgtgcgagcatgcgtctgccaaggtctttattacttgcagtgggccagggcgagcgacggttgggagtacagaaccaaaatgccagggtaacggacaaaaaatttttaagccattactgcctccaattaaccacaaatagggag

SEQ ID NO: 654517 - DNA, 519 bp, Homo sapiens
ggcagattcggttgctaatcaggcaagaaggtcgagggggtcccgaaccagggcaagaaggccgaggggaccccgaaccaggacaagaaggcgaggggaccccgaaccaggcaagaaggccgagggggcccagaacaggcaagaaggccgagggggcccagaaccaggcaagaaggccgagggggccccgaaccaggcaagaaggccgagggggcccagaaccaggcaagaaggccgagggggccagaaccaggacaagaaggtcgagggggcccagaaccaggtcaagaaggccgagggtgctcagaacaggcgaaaagagtagaaggggcccagaaccaggcaagaaggctgagggggcccagaaccaggccaagaaggccgagggggctcagaaccaggcaaaaaggccgagggagcccagaaccagggccaaaaaggagagggagcccagaatcaggtacaaagacagaaggggctcagggcaaaaaggcagacaggagtcccaaccaacgcaaa

SEQ ID NO: 654518 - DNA, 365 bp, Homo sapiens
  misc_feature (5)..(5): n is a, c, g, or t
  misc_feature (9)..(9): n is a, c, g, or t
  misc_feature (11)..(11): n is a, c, g, or t
  misc_feature (15)..(15): n is a, c, g, or t
  misc_feature (19)..(19): n is a, c, g, or t
  misc_feature (21)..(22): n is a, c, g, or t
  misc_feature (34)..(34): n is a, c, g, or t
  misc_feature (45)..(45): n is a, c, g, or t
  misc_feature (78)..(78): n is a, c, g, or t
  misc_feature (275)..(275): n is a, c, g, or t
gggantcangntcanggcncnntccgggtggccncggcgttgganacggcttgggcccttggccgctttaaacggatnctggcggcgcaggggggtggattccggtttggcccgagccctgtgcttgggaagtcccgcagaacgccggcagctgttgccttgcgcccgggagcaggaggaaattttggggcccccaaatgggaccccctgggtccgggtgccccgggggggccccgcgcttaacgggccccaaaaccgcgccctgcaggaggggnttgtactttccgaccgggggccatttgccgccccctcgccctttgcagagcttgttttgccgccgcagcaataaagctcctttgccgcga

SEQ ID NO: 654519 - DNA, 478 bp, Homo sapiens
  misc_feature (5)..(5): n is a, c, g, or t
  misc_feature (9)..(9): n is a, c, g, or t
  misc_feature (11)..(11): n is a, c, g, or t
  misc_feature (15)..(15): n is a, c, g, or t
  misc_feature (19)..(19): n is a, c, g, or t
  misc_feature (21)..(22): n is a, c, g, or t
  misc_feature (34)..(34): n is a, c, g, or t
  misc_feature (45)..(45): n is a, c, g, or t
  misc_feature (78)..(78): n is a, c, g, or t
  misc_feature (358)..(358): n is a, c, g, or t
  misc_feature (388)..(388): n is a, c, g, or t
gggantcangntcanggcncnntccgggtggccncggcgttgganacggcttgggcccttggccgctttaaacggatnctggcggcgcaggggggtggattccggtttggcccgagccctgtgcttgggaagtcccgcagaacgccggcagctgttgccttgcgcccgggagcaggaggagctgctggcgcccgcaaatggcaccgtggagctggtccgggcgcttccgctggcgctggttctgcacgagcttggggccgggcgcaaccgcgctggggaaccgctccgcctgggggtgggcgcaaaacttctggttaacgtgggtcaaaggttgccccgtgggaccccctggctccgngtgcaccgggccgcgccctgcaggaggggnttgtactttccgaccgggggccatttgccgccccctcgccctttgcagagcttgttttgccgccgcagcaataaagctcctttgccgcga

SEQ ID NO: 654520 - DNA, 899 bp, Homo sapiens
tcaacagagacaggtttatttggggaataaacctgaaaggggcttctggccgatttcggtcagggacattctcttacagactaggggcatttaagggtttaggaagggggagcctaccgcaggctgcgaatgttcctgtgtgaaggagagttttatatggcagagtgggaattatctctgtggcgtggaggggaggttatcctcaggatgggcatgttcccttggtcagagtgggggttcaatctcagtggttgaacagtgttctctgctcatactgacattgagccattaggctgatgtttggggcgttggttttaaattcacggagaacttaaaagggccagtgttgtgtccaagatggcaatgctccggcggtcacacccacccacccacagggatacgggggtcgctgcaaaaccgggccgccttcgacagacacgttccactgtgcccggggcacccccatgcaccccagggagcgatgccgcgttgtggtagccaaggccctgccgcgctgtgggccaggcccacccgatgctcggaggcatctgtgcgaaggtgcaagctagcggagacccaggtagtcccgcccggcaaccatggcaagctgcttgcaaggcctctggctggctaagggtggagcactggctgaacccagggatgaccggtgtcagggcagtcacgtggacggagccctgaagaaaccggggggtcagtggcccggcaaccgttcggaaaaaacagtggtgccggcactccaaggggatggttccgatcacgtcacggcgaacaagccaaaacaaaggcggttggtggaggccgggtaaacgacggttgacaacgcgggggaaaggcaagaaaggagacaagacacgaacagcgggagcgcaccggacaag

SEQ ID NO: 654521 - DNA, 158 bp, Homo sapiens
tgagttgtttggctatcatttgttttgaggttagtttgattagtcattgttgggcggtgattaggcggtctgttcatgcattgcggaagccagatctgttctattggagtggtggggtactgaactccattctcttgtcctggtctttgctctgtgct

SEQ ID NO: 654522 - DNA, 505 bp, Homo sapiens
  misc_feature (183)..(183): n is a, c, g, or t
  misc_feature (186)..(187): n is a, c, g, or t
  misc_feature (190)..(194): n is a, c, g, or t
  misc_feature (201)..(201): n is a, c, g, or t
  misc_feature (205)..(205): n is a, c, g, or t
  misc_feature (207)..(212): n is a, c, g, or t
  misc_feature (214)..(214): n is a, c, g, or t
  misc_feature (216)..(218): n is a, c, g, or t
  misc_feature (266)..(266): n is a, c, g, or t
  misc_feature (329)..(331): n is a, c, g, or t
  misc_feature (333)..(333): n is a, c, g, or t
  misc_feature (335)..(341): n is a, c, g, or t
  misc_feature (343)..(343): n is a, c, g, or t
  misc_feature (345)..(346): n is a, c, g, or t
  misc_feature (349)..(349): n is a, c, g, or t
  misc_feature (355)..(355): n is a, c, g, or t
  misc_feature (359)..(362): n is a, c, g, or t
  misc_feature (368)..(368): n is a, c, g, or t
  misc_feature (409)..(409): n is a, c, g, or t
  misc_feature (455)..(455): n is a, c, g, or t
  misc_feature (485)..(485): n is a, c, g, or t
ttcccttctggccaacaattggtatgttttggccacaatttcttgctgtccccatttcactgaactaaatagcttaagatatgcttttgggtgcttaaggctttcgtatctaaaatgccagagcaattctttgtcctctgctgtgagagggttaagtggatcagtggctatgatcgcctccanttnnttnnnnngctggtngggnannnnnncncnnncccggtcccctttccgggttcaggggtgggctgatgctcaggcagggntatcgggtggcagtaattgtccagaagaatggagatggacattgagttctccttgtctggggnnngntnnnnnnntnannatntcagcnttgnnnnttcctnggtcttctcccttcccagatatttgccacatgtggaggacntattttccacggcgcaggaggaaacggtggtttatcagcagcaggntcacataatagagaagttgaactatgcccntggactcagaactgggggac

SEQ ID NO: 654523 - DNA, 210 bp, Homo sapiens
catcaacataccagacatattgacagaaccgacgggcacaaacgaatccctgcaaacacaggtagtcaacttattcgaacactcttgaggaggtgagagagttggctcgtcgcgataaccaggacagtgcaaagctgaaatcggccaggaagcaggagctgcaagcccaggtagggctgagcccaagggcgggaggcaccgggcctgcca

SEQ ID NO: 654524 - DNA, 689 bp, Homo sapiens
caacatcatcggacgggccctcagcacgagagggacatgaccccgcttcagcatccccatcactgtcggcaactggagccattgtgcgcatccggaagccctccgccagatgaactgcagcccttcgccccagagcaaattggaggaggccctcggctcttccacagtgtccccgttggaagctgccctgtccggtaccctgtcaggggtggagggcttcacccagcccggaggacccggagatgctgagccgcctcgagaagccagctccagcccgctttgcccttggctccccggtgtctgagccaccagccatcatcaaggacttcccccagccaggaatacccggagcacgccatccacaaggtgctgcagctcatctgcggcgcggcgagatccagcatcgcatcagcgcaaggttctctaccgcctcaagtgagtcgcgccgcctcactggactcatggactcgcccacgcctcgcccctcctgccgctgcctgcccttgaccatgttgctgggacctctgcctccccactgcagccctcgaacttccccggcaccctcctttctgccccacgaggaaggagctgtagtgtcctgctgccttctgggcgcccgcctctagcgcggtttctgggaagtgtgcttttggcatccgttaataataaagccccggtgtgttcaggta

SEQ ID NO: 654525 - DNA, 938 bp, Homo sapiens
gaggcgcagacgcgcgggcgggaagatggcgggcatggggttcgaaagaccgtggaaccttctggagtattacaggagatttcgtgagaagagaactggccgtcctggatggaatgagaacttggtgacacttcagaaccaccaactgtcaacgagtcggttcaattagtaccgcagcatggtctctgctgttacgtgaagtgtgcggaaatactacacgtagatctgtgggatgattacatatgcagaagttctgcagactaccaatcaaacagatgtccctctgatagaagggagtatcgttgtgtccgtaagtgtggagtctacactacccctgatgttcatcgagattccggtctggatctccggggagaagaggcccaaggtggctagccgaattcattgcatgatgtcattgaaaattcactagataattcatgaaagaggacttatgcatttctccaggaaagctgtctgggttctatactgtgatctcatttgcctcgactacgatggctacactatttggatgtcctgcatcatttggtgtaggtagcgagtttagaaagtgtacagtctggctgaagtttctatacagtgcagaactggttagccaggagtaatttagagacgaacagtttttgcattttgaaccccggtcagtggattcctgcgggttggggaccttggtttattgccaccggcgagaggtactgccgggctcaggtactcaaacgaggcaggggggggcagaatcctgtgcggccaccagggaagggcgagcagtactcattgagacgagccgcacgtagtacaccggtggagagacaacacctttttgatacgacgtctcttacccacgctcaattaccagcagcgccggaataaaatcaaaaaacagacaataggacaacaaacaacacaggacacacacgaga

SEQ ID NO: 654526 - DNA, 307 bp, Homo sapiens
  misc_feature (171)..(171): n is a, c, g, or t
aagggtctctggaggaaagggtctttggctgttccaagtctctcattccaccttacgagaaacacccacaggtgtggaggggcaacccagcccttcatatgcaaagtgtaatatcccagaagcttctctgtgcagttttaggctgcaagtgggtgaaggaaagttatatcnttcattccgttggtcaagaaatttactggagtgcctggggcactcgacagtgctgtaatccctagcactgtggggaggctagaggcgaggaggatggctctgaacccatggagttcaaggaccagcctgggacagg

SEQ ID NO: 654527 - DNA, 447 bp, Homo sapiens
gcatctttcctagttgtgtccatttcccctccctggcttctcctcctgcagcatctttccctgtagttgtgtccattccccctccctggcttctcctgtagcatctttcctagttgtgtccatttcccctccctggcttctcctgtagcatctttcctagttgtgtccatttcccctccctggcttctcctgcagcatctttccctgtagttgtgtccatttcccctccctggcttctcctgcagcatctttccctgtagttatgtccatttcccctccctggcttctcctgcagcatctttccctgtagttgtgtccatttcccctccctggcttttcctgtagcatctttccctgtagttgtgtccatttcccctccctggcttctcctcctgcagcatttttccctgtagttgtgtcctttccccctccctggctactgctgaa

SEQ ID NO: 654528 - DNA, 1874 bp, Homo sapiens
  misc_feature (692)..(692): n is a, c, g, or t
  misc_feature (945)..(945): n is a, c, g, or t
  misc_feature (1196)..(1196): n is a, c, g, or t
ttgagttccttcgctactacactgggatatggagtgtagtaatgacaataagtcggcaaggttacgtgtgagcgaactatcgcgagagacagttcactatctaggcgaggtcatagtacgctcgatgtctcgcacttgtgcaagccattgccgcacggacttgttacgtaagtcagagctgcgcgtgacggcgcgctggtcagtgggcacccatccgagtcatctgaccctggtcccttattcattgtaggtcagtctcgacaccactgtgataccccgcggtgagaacgcccagggtgggaccggtccacactggcttgtggtacttagtcgctagccccagtagcgtgtcacctcggtcaccaccacagaggtcgctggttgcatgtgacattaacgcatagtaaaaggcatacgggcgaatcgtcagtagcaccagtattggctgggcaaacctaacgttgagtcctgtaacgcgttaaccatgcgactcagtaattggatggtctccatcagcatttggcgtgctcaatacatcggaccacgtttggaacgggccacgaccccgaatgagaacaacaggccgtgagggtccctcccgtgagcaaaatgttgccctctatggtgatgacgccgatcggtaccacgtttaacgtcggagcagcagagaaagtcctgtggtgacccccctncgccggttgcgaaaaaagcgggaccgccgtcgaacggaactgcgactgtgggttggggcgcctattccaagaatctggtgacgggcgaggttgaaaccccaggatgtgtgtactatacagtgagccaatgtgccctctacactgtgtttccttgcgcgtggagatacggacattgggcccggctaaaaagaggctaggagtatgtgggaacgccactaggttataatgtacggacccatatggtccaaatganctatgcgctggcgcgataggataggtcagcagtaggactggcagggagagtagatacacgaggtgtggtcgagttacggacgttcgatacttgggagtggggtattgatagtttagttaaatttggttaaccggaacccatggttatgacaaacatatattaacggtgggtggaggagagtcacaaaagaagaaaagcagtttgagaccaaggataagagatacgggaggtagctaaggtatggaaaccanatggggttgcatatgagacaagaagccggacaggagagtggtacgtggacgggtgacctcaagcatcagtacatgataacaataacgaagttactaattgagcagatcggtgcgtgaaccccggaagcaggtgcgagaagacgtattctgatgttgggacctgcccggaaggtgaatttggcaaagatgggaagaattgaccggacacgtaagaaggttacggtgtggggagtctagagagacacattctcggtgttggatgccattggccacatatgacgtgcggaacagtcaggatcagcacttttgtagagcggtacgagggtggggcgaaaaagcaaggacaacgtggggacatataggtggtgaaccccacttgtgggagaaatgaacgaggctgcacaggaggcaagcaacacctggtgttgaagtagttaccgtgaaatggagcaatagtcgctgaaatgcaatgagataataattagacgattgttgcccacttgtgaccaaagttattgtagcgcgagaatgagcaatctcacaacgcagaaatgacgttgggagaccagaatagcgatcgatagagatgtatgtgtataccaatgatatgacaaaagtaggtcactaatcaagatgtgtcacacaatctaaacactcgacgtagaagtctaagttcac

SEQ ID NO: 654529 - DNA, 332 bp, Homo sapiens
tgagtcggtcctgtgtgtagcacaataaggaagggtccccaggtcggggagagccccaagttgagaacaataatgaacaattatcgtatgaacaatagttagaaacagctaatcacaaacaacctgcgggcacaatgacctcattccacacgtagcacccttcagcaggaccctataaaactttcctccagcccttgcctctttgcaggtagccccttctctgctgagctgcccaatgcaacatattttcacaatttctctaataaatctgcccttctttacctacaactatcttggtaaatggctttaccacctgcaaaactgaccctagg

SEQ ID NO: 654530 - DNA, 642 bp, Homo sapiens
  misc_feature (39)..(39): n is a, c, g, or t
  misc_feature (81)..(81): n is a, c, g, or t
  misc_feature (243)..(243): n is a, c, g, or t
ccgggatcagaaatataacacatttttttgcatgcatgncaaatgagctctgaaatcttcccatttgcattctggtcaagnggcttgtcctattgcactataagctcatctattaagtgcaaggcagcgtgtcttaagtatgtttgatgctctgaagtgtttttattttgtgaatgcatatttgtattgatatttttttctgggatagtggattcagaacacacttgaaccttttttatcgtnttgtattttcatgaaaataccatttagtagaataccacatcaataagaatatgctacaattttaagagggagggaagggaagtttttttttattattttttctaaaattttgtatgttaaagagaatgagtccttgatttcaaagtttgttgtacttaaatggtaataagcactgtaaacttctgcaacaagcatgcagtttgcaaacccattaaggggaagaatgaaagctgtccttggcctaggtagaagacaactgcttcccttactttgctgagggtttgaataaacctaggacttcgagctatgtcagtactattcaggtaacctaggggcttgtgaatcctgtacgtgtctcatggatttggcctagcaaaggagaccttatgcttactcctc

SEQ ID NO: 654531 - DNA, 359 bp, Homo sapiens
gaaatgaaaaattgatatattggacttaatcaaaattaaaaacttgtactatcaagaaagtgaaaagatgtccgggcatcggctgtcacgcctgtaatcccaacactttgggaggccgaggcgggtgaactgcctgagctccagagttcaagaccagtctggccaacatggtgaaaccctgtctccactaaaaaaaaaaaatacaaaaaattacccaaacatggtggtacatgcctataatcctagctacttgggtggctaaggcaggagaatcgcttgaaccctggaggcggaagttgcagtgagcggaaatcgcaccactgcactacaacctgggtgacagagcgagactctgattc

SEQ ID NO: 654532 - DNA, 342 bp, Homo sapiens
tgagagctttgagagggtgttgccagttttaacgctgagatggcccatttggagccttacagaactagaccagaagacattgtggataaatctgaactcacttcctgtgtgtaacttctaacttcactggttcctcccatctgaattggcccacatgcttgctgaagagacttgtgatcttcttctaagacagtggttgtgtatttgggtttttttacaaaagaaaaaaatgaaaagcacacaaagaaatatgacttattgctatggttggagaaaattcagggtttcgtcatggatctctatattttctccacatattacaaatgtaactacttaatgaaa

SEQ ID NO: 654533 - DNA, 162 bp, Homo sapiens
gcacacacacaacctccccccacccccttcttcatcagccccaagatgtgaaaatgacaggaagtccaggattggctctggcactatatagctctagacatacacttcagcccagcagaacgcactggatgaccaggctcatctacaccaagatccctgata

SEQ ID NO: 654534 - DNA, 1113 bp, Homo sapiens
cagagcccaggtctgctgagaggccccagtgggactctgtgctacacaggacttcatcccctggcaacacccttagcctgctgcaggctccttgtgccttgccgttagataaatgtagacagggaattgtgtgcaacggtgccctagagactgaaaacaaggcctcagaacagcctgcagggtttgacacccttcagaagtaccccacacccaatgggcattgtgccaattgggaggctgggaggagcaaggactcactgagccaccagctgtctgccacaagctgtagctctgctcacttgtactcgaggaacttgcaccacaagtggctgaatagccactcagggaggccatccactaccagcagccctgaccagccttcccgcagccacctggatgacgatggcatgcctgtgtacacggacacaatccaacagcgcctgcgacagatagagtctggtcaccagcaggaagtggagaccttgaagaaacaagtccaggagttgaagagtcgcctggagagccagtacctgaccagctctctgcgcttcaatggagactttggagatgaagtgacttcaatccccgactcggaaagcaatctggatcagaactgtgtgtctcgctgcagcacagagattttctctgaagccagctgggagcaggtggataaaccagggacacagagatgactcgttgggtaactggaccacctgtgttggccactggtatgccctgtgacaggggccttcggtccgccagttggaagcccctggcggactggggggaggttttctggcccctgttgtaccccagggtccggtccctacccgtcttgaaacccaccgacggggaagcctggtcaataagaaggcctcctcctaaaagagcccccttggaccgtcaatggagaaaaccctgtcgtagcgcaaaagaagaccagaacagggtggagggaaaagacggtgctacagacacacacacgtggagtgagacacaatcatggcgcgacggaacattgaatacggcaagaacataagccacccccctcaataaaaagaggggcgagagtgaccaacagtcaagacggaaatcctgacgacagctatcact

SEQ ID NO: 654535 - DNA, 146 bp, Homo sapiens
ttggaaagtcctctcaaaaaggatggctaaaaacaagcctatactgtgaagactgggataaatacctaactctttaatgcccaggtatcaacaaatgtctaccagcatcaaggacatccaagattacattacctcaccatatagac

SEQ ID NO: 654536 - DNA, 194 bp, Homo sapiens
ccggcttcgtgtactgcgctggtgagtgggcgacaaattcatccgctccggcgagtgcaagcactgtgctggtgatctggcactgaaacgttgagccgcatggtcgactggaacgatcgcaccacctgcgtgctgttcggcgatggcgccggcgctgtcgtgctcaaggctgacgaagacaccggcatcctcag

SEQ ID NO: 654537 - DNA, 145 bp, Homo sapiens
gtaactatgcactcaacaatcctcaacagagggtcgtagtcgatatctcaacgtttggtcagggtagtgatcaaaacgcttactacgacattgacaacctcgctggtagtgacggcgattcggccttcatgccggcgctgtacgc

SEQ ID NO: 654538 - DNA, 395 bp, Homo sapiens
aaacccagaggaagatcatatttatatatttattcaacattcatgtatgatatttagatttacaaaatgctttatagtgtaacagaatgggcagaaatttttacttgggcttataattgtcttttctttcatattcatttattcctttgatttatataatgtgttctctgcttggtcttctgagattacgtacaatggtaacaaatcgaaaataatattaataaaagattattttgtatcactcacagggaaaactgactggggccatgcgcctctctgttctttagaaacgttatgcgagagaacataatattgtccccagaatactgtctgtaatgccggctatgcttattcgtggtgctttaaaaataaatttaactcctgttcttcattta

SEQ ID NO: 654539 - DNA, 226 bp, Homo sapiens
tgtgaaccgctcgcgcgggtagttttgtcaggtctcctctgaaaacggtgaacacagcccctccttcatcagattctgcatcttctgtgactggcctttctccaggacactaggtcccatgtcatttagcccaacattgtcttgcgtctttcataggatggcgggcaagcagttaagggtcatcatcccagagccacatactaaccccagactgggcccctgggtt

SEQ ID NO: 654540 - DNA, 679 bp, Homo sapiens
cgggggggtgttattggggccctcttgtttcaaaaaaaaattcccccaccccgcgggggggggcagagggctctttttttttttacaaagtggggggtccccaaaggggggggggggaaaaaaaatgtccccccccctcttttaaaaaaaggttgttttttaccaaaagtttcggccaccggggggggggccccctccaccaaaaaaaaaaattgttttctccatgccggggccaaaaagccccccccacccaaggggaacccctctggggggggcgggccgcataattttgtttgggggggggggaaaaagccccgccccaccaaacaaaagtgtttttttttttgaaagggcgccaaaacaagtttttaaataatgaggtcccagatggtgtggaaaattttgagggggatcaaaagaaaaaggcgaccttattggggggacttctctttatataacttgaagaagttccccggcgctggtattttatataaaaaaaacgcccctaagaagtttttgttcccgcctcagataaaatatagttcccaaagggttctttcacaaaaaacttaaacataaaaggcctcaggccgtttttgcctttcacaattcattctttgcagctaattaagccgaagtagtgaaagtgtcaagctgtcgcaaattttcataaagttct

SEQ ID NO: 654541 - DNA, 422 bp, Homo sapiens
  misc_feature (287)..(287): n is a, c, g, or t
taggtttttcacttagttaactatttattgagtactcagaacgcactcggtgccagggctaggcactgtggatgagtagggagtgggcgagacagggacgagatgagcagggtcaaggccagggggtcccggggcgccgcgctcaggctcggggtgatccgcacggtgggagcggggcacggtgatcgcggcggctctggggaccccggcctgagggaggctgcctgtcccaaggagacgcccatcgggccggacccgaacgcctcggagaagactcccagcgggangacgcccatcgggccgagacccgaacgcctcggagaagactcccagcgggagagggctcctcggccgtcgcagggcccagccgctaatcccgccggccgcaagaagcggagaactcaccggacaccagcactcgc

SEQ ID NO: 654542 - DNA, 138 bp, Homo sapiens
atctctaccgggctcgggagtagcatcctcaggagtagtgtagcgagcaaatactggaaagatagtccatcaatcttcgattatcccagacaaggcactttctcatgcgagacagatacttgcttgtaagagagaaca

SEQ ID NO: 654543 - DNA, 1218 bp, Homo sapiens
gtgcaggctgtggagactcccttcccggtggtgagtggggcccccactgaccgcaggtgccccctctgcctccaccccggttcctggccaagaagctggagggggcttgggcaaaaagagggagaaacacactcagcgtgttcttctctagctctgaaatagaaaatgtctgctagacggacgcgagtgcctatccagtgacacccatggactagatggcagactagcccccgagaggttcccatatcgtggacatcctcatcaggaacatgccttctaagctggggcgaggcggtaccttcctgggcgaacgctacacgagatggtcacctgcgaacattagacgatagggatgccccgcagaggatgcgcacagctccgcatgagcgcgcgcatctgccagtgtagcgcactggcgcgctcaaaggtagccctgcgtggcctggcgccacgcccctaatgctcaccgtggctcctagagcgcagaatagcctcctctgtgccgtgcccttgcgcgagtagcccctcaccgcgtccccctccgggatccccgcggtggcgtatatcccccgtaggcagggcgcagtgcaccccgcaggcaccgtgcactactgcggccttgcccagcccgctccatccacctggccgccctggccttcccccccacgccagttgccccccgctcggcagcttcttgcccgcacggccattgctgtcgcccctctgctttcaccccctctttccccccctggccagagccacctgcgctcgccccgggccctcggcggccccacccagcggccggctgccacgccacagccttgtccctaccacaggcgcgctgcgtccccctgtggcacgaacccatagcagaaacctcggcgggccttggctcacgccttggcgacccctctccccccctctccatagtcccagctgcccctctctgcttgggcggcccccccttccaatcgccgtcgccgtcgcccccgcggcgccttcccgcgcccttgcccgccgtcgtcccccagacccccgggtccggctccccccgctctcacttcaagcgcacgggcacgtggcccgcacgccccccccgcgtcccaccatctgcaagcccgctcctctctcgctcgcagcccacaactctgccccccccctgtgcctccgcctgccctcagctcgccttgcccccgttccctcgcctgctccacctca

SEQ ID NO: 654544 - DNA, 384 bp, Homo sapiens
aacgctttgccgagcaattcgcagaacggcatccggcagttgcaaataggatttttaacgacttagggttgcttgcggatttacttgccttagcctctttcagcccgtggcgcgatcaacgcttctcaggtatccggattacgctgtctggttaaaacgccatagaaccggcgagggaatccgcggtaaagacgagctgctggaatcgcttgcccggttttcattgactaattcgactttggatccgtcggttctgctttcccgtttcaaacatcgggaatatctgcgtatttttctgaatgaccttcggggcagaactacaattgccgaaactacggaagagctttcgaatcttgcagatgcaattctcgaatacgcgttccg

SEQ ID NO: 654545 - DNA, 763 bp, Homo sapiens
cggacgcgtgggattcacctttaaatgaaggaaataactgagtatacaacagacatgcatgtgacctggaggacactatgctagtgaaataagccatgatctcgacttggatatggaatcacaatcttgaactcacaagcagagtgtagataggtggtttgcatggagtggagggaggggataaatggagagatgttggtcattcggtacagcagtttcatgcttaacaccaggagatagtacgtttctggagacctgtttgtgcagcagggtgactatgattaagatgtatacttgaaattcggtaggagtagagtctaaccaggagaaatgaatatgtgaggtgatggatgtaattagaacttgattgtgcgtaaatcagtcttacgcaatgtgtacattatatcataactatcaacattgtacaatagagttactcataacagtattttaagtcaacttgaaaagatatcggaattctagaaaatatgataagagtcgtgttttgcaagcatagtaacagatctgatatacttaatgacgcgaatggaactggtacatttggaacccaaatgttggcatacctactattcgaaaacctgccacataaatacgttgctcatggaaataacaactggtctgaataaacaaaaccatcacttgagggacgaaaacacagaagtgtaaaaaggaatcaatgagttagggacagaattgttagattggcaatccaacagttctaaaaatgacaatttcacagaaa

SEQ ID NO: 654546 - DNA, 481 bp, Homo sapiens
  misc_feature (52)..(52): n is a, c, g, or t
  misc_feature (221)..(221): n is a, c, g, or t
aagttggaatgaagttttgaattaaataatagaccttcaatgtaagcccatnagtcgaaatcaaaaataaacaaaatgtctcctatcaacccctggcttaaagtttgcctgttccttaaactttctgcaactggaagcctacaagtagatgcactttggggtctggctttttcctttttttctgagatggaatctcgctctgtcaccccaggctggagtgnagtgacaggatctcggctcactgcaacctgttcctcccagggtcaagtgattctcctgcctcagtctcccaaacagctgggattataggtgcccaccactattcccagctaatttttgtacttttagtagagacagggtttcaccatgttggccagactggtttcgaactcctgacctcaggtgatccacccgccttggcctcccaaagtgccaggattacaggcatgggccactgagccatgccaggtctggctttatt

SEQ ID NO: 654547 - DNA, 186 bp, Homo sapiens
gtatgtgatcttattaaaaatccttccccttcttcttttctgccattccactggcttttcctgataccctcactcttcccgggtgacggctcagtgtgcttgaaagagcatgactccgtgcacgagaagggcctagggtaaaatccgtaattctaatgtttacttgcttaatgatcttcgagcaag

SEQ ID NO: 654548 - DNA, 840 bp, Homo sapiens
gattgatggtcttgccggcgcgtggatcatcgaaaagatggactaggagatgtgagagaccattctgctcgttgacctggtgtctcagggtggatgcatgaggtgtgctggttcccgatcgcgtttacaagtactttgatttaattcggaattaggtgcatccccgcacgagagctgtgcctccgtcgctgggcactccgcgtgcgtcttgcttggcctttgacgtccggtcagatcccttcctcggtgtcgttgtgcgattgttagccgtcgtcacgtatttggttgtctttgcatgccctgctggttcgcgcaactaggcaggcacgtgtttgcgcacgacagtgacgtcggatgctcgacgtaccgtgtggtggcggcgcaagggggggcggccgttggaggttgcggtccagattcgttggggctggcgcgctgcagtcgtacatctagttgcatgtgcatgctggaggcccaccttgagggcgttcgtcccactgcggttgagaatcgcgaggattgggactgctgtggtgcgcctgggccgcgtgtgtgcgtcgaggatgcgtagcgaacaaatgtggttgtccccttagaaatggggaggcagcagacgccgatagttgagaccgtggtggctaccgaatgtggtagcacgccctatgcggggccaagcgtcgtgcagcgccccaggcgatgagcacgtctgtactgttttgtagcggctaggaatggaagagccgtcccgtaccggggaactttccttttctttccgaggaactcggccctgtgtaatttaaattcgagaagtattaaacatttgggagtagcgcgtagtgc

SEQ ID NO: 654549 - DNA, 159 bp, Homo sapiens
cgggggggggaaaaatttttttcaaggggccaaaaggttttggggccaagggaaagttttttttggaaaaaattttgggcccccttttgggccaaattttttccccctggggcattttttacccgggtttagggccaaaaagtttttttatttttttca

SEQ ID NO: 654550 - DNA, 282 bp, Homo sapiens
cccagggctcgagagaggaaaacaagacccctgcgtgggtccgaggccctcccctcagggcgggcaccaggcctagaggcgagtggaagctcgaacccgaaacgccggattggaacggcgagaaacagggcccacaccaccacgacatgcaaccgtcccagtaaaatgcagcagacccagtgtgtgggaagatcctggtggcccaggcggatcatttatcccatggaatgtggattatgatgtaacccaaaaggaagggaaaagaactagtgttctcgctga

SEQ ID NO: 654551 - DNA, 1008 bp, Homo sapiens
tggtgggtcggccttcaaggacgataggtgaccccctgggtatcgctacacattctcccttcgcccatgtctctaggttggccctgcgttctaatttggtgcctcttggcgtctcctaacgttccgcagggtgccccaaagttgcaagcctcccccgctgcccttcatctaaccaactggccaacttcccgtttcgtcctttcaaaggtccaacgcggctcacgtagtggccttcaccggctcttccccgggtctcttgtctgatcagccttgacaagtcccgggggatcatgaatggtccagcctgcggattctgcctcgacgggaccagacgaagcatgcgctctgccgtatcatgggtccctcgccgtccctaggcccggcaccctcagcaaagccagagtaccttcttgcagctatttgtaatcgtgcccctcatcgccaatcgccagggaggcactgtagtcatctctaggcatcagaggctgcgcacccagccaggccagcccagcaccgcacgcccatgcacacgctcacactgggagccatcatggccgcgacatgaccgagaggaccaaggcacataaagggttaccacgatgtagcggcaatgtcaccagcgcccatggatggcacaggcctcccccgttgctggagacacagcatgcgcacgttgtcagcctcatgttgtggaccatgatgggcgcaccacgcacagtgctgcactgctgagaactcaaggtcatgcgcagcctcgcgaccagtctcgctttctctgctaatctgcgctcaatcgcgaagaactcggactgataactcgggtgacgtttctactggcgctcagtgcacacagttacacatctccgcctcaccccgtgtggatccagatgaagcctccaggaccccaggctctagctctgacctgacctgcacccccctcgtcagaagtacatgaggggcgcagagatgagcacacagctttatacacggtcggggggcaaaactgaa

SEQ ID NO: 654552 - DNA, 152 bp, Homo sapiens
ccaaatgtaattacattatcttggtaaattaattagaactatgaaatgtataataaggctttcagtaaggcaactcataattattattcaggaagctgtctgcatcattagtgatgctgtcttgtaaatgaacacccttctgtcgtcttctc

SEQ ID NO: 654553 - DNA, 350 bp, Homo sapiens
cccctttttttttagggggcccccaaaaaggggggggttccccttttgtttcaggaaaggcccttttcccccggggggcggtttttaactttttccccccaaggtttttttttttcccccccccccaatagggccccgggggggggggggtggcccaaggcccggggaaattaaggccccccggtttggggtgggccttccttcccctttcagggaacccccccgggggggcctcccccccctccccggggggccccccccttgggggggggggtttggggcctttttttccccggggggggggcggccccccccggccctttggccaatgggggttttcttttttttta

SEQ ID NO: 654554 - DNA, 399 bp, Homo sapiens
gcccccccccaaaccccccccgggggccagggggccatttggggagccccccaggggccttagcaaaaaaggggcgggcgggcccccggccccaccaaaaccaaaacccggggattaacaagggggcccccctgggggggtggggggaaatttccccccccttttggggggcccgggaaggccctgtaacctttaaaaaagggggatcccccccggccccccacccccccaaagggttttttttgtccccgggggttttggggcccaaagggggaatttttgccttccccccgggggggttttttttttttttttttttttttttttaggcccaggaaaaggtacttttggaagccgaaaaaaactttccccccaaaaaaaaaaaagggggtgggtgga

SEQ ID NO: 654555 - DNA, 880 bp, Homo sapiens
atagacgctgctgcctttaatcggccttggtcctcagcagggtccaaaaagaaacaggatctcgataagctctatgagctgacagtccaaagactcggcgagattatgaaccagttgggccccatcaggccgtaatcaacctcttccaagtttctcatccatagaaacgcggtagaccagtcagcacccctccacaaggctccatggccaatagtactgcagtggtaagagataccaggcactcctggggcaggaggtcgtcttagccctgaaaacaatcaggtattgaccaagaagaagttacaggacttagtaagagaagtggatcctaatgagcagtgggatgaagatgtggaggacgatgctgctgcgagattgctgaatgacttgtatcgagagtgtggtgacagcaggctgtcagcttgcgcggcgatcgcagtactagcaccctggaggtgcaacgatgtccagctgcatttagagcgcagtggaacatgtggatccaggatttggctctgaagaaatccgacctagaaaaaaggttgccacagaggcgcacaaacagagaatggcatgatccggaggacaacccagaagtacacaccggacaagggcccgtcatggcaggcactgatttggagatactgagcagagaccagccagtcatcccggaatcactaagaggatacagaaaggcaatattaataacgggcacaacattcatatgaggaggtgcaagagaaggcgacccacggccttcaggcccaaaagagaggactcagcaaaaagggcaacacagaacgcacgcatgcggaacaacacaaacagaggcccacaacgaaacacaaatggaaaacacaaagcgaacgagacaccagcg

SEQ ID NO: 654556 - DNA, 136 bp, Homo sapiens
tctctggatctgaaagtgcttgaggtcgccgaagaacgcatatgatttgtgactcaagagttgacactggcgcgcattcctgtactcgttaccatccatgtgcttacgccttatcgatgcaagtatcccatgtggc

SEQ ID NO: 654557 - DNA, 375 bp, Homo sapiens
  misc_feature (105)..(105): n is a, c, g, or t
  misc_feature (108)..(108): n is a, c, g, or t
  misc_feature (238)..(238): n is a, c, g, or t
  misc_feature (317)..(317): n is a, c, g, or t
  misc_feature (337)..(337): n is a, c, g, or t
  misc_feature (365)..(365): n is a, c, g, or t
agtagagatggggtttcaccatgttagccaggatggtctcgatctcctgacctcgtgatccgcctgtctcggcctcccaaagtgctgggattacaggcgtgagcncgnctcccagcctaatttttgtatttttaatagggacagggtttcaccatcttggctaggctggtcttgaactcctgaccttgtgatctgcccgcctcagcctcccaaagtgctggggattacagggcgtganaacccgcggcccagccggttttgttcctcttttaatttgtctagtgtattcttaggccttcaaagggcccatggcaaantgtttggttccattaaattnattttaaacatatttatggaggggtttnaatgttcctt

SEQ ID NO: 654558 - DNA, 357 bp, Homo sapiens
tggagattgggtttcgctctgttgcccaggctggagtgtagtggcgccatctcagctcactgcaacctctgcctcccaggctcaagccatcctctcacctcagcctcccgagtagctgggaccacaggcatgtgccaccacacccagctcatttttgtatggtttgtaaagatggtgcggggggtctcactttcctgcctaggctcgtctcgaactcccgatctcaagcgatctgcccacattggcctcctaaagtgctgggattacaggtgagagctacagcacccagcctacaacttctttattatttatttcttttttcagaaaaatgtagtggagacgtaggagatgatgaaa

SEQ ID NO: 654559 - DNA, 187 bp, Homo sapiens
ggtgttgagtggatgacaagcagaagcagttatgatgacaggtgatagatccaaaataatgccacattgttaacatgttccatttctaaaccatccttaaagaagaatcatatatggaggtcacaccactcctcacgtgtagtccaaatagcagcaaccattgccactcgtggattcatagttttca

SEQ ID NO: 654560 - DNA, 364 bp, Homo sapiens
aagttataacaagatgttggatatatatgagtattccgatcgcgaaaacagaaatgccctgcctactacaaggacagactgatgggacattatgcacctggtcaacattagcttataagcagacgatgctgtaaaaactaacggatactctgatatttatagtaagttttagtactgatctccttttccagtgccgaacactcctggataggaactttaatagcgtagcaacgaaatcctatatccagtaacctgtaatataatagaagaaaaatacatccaaataaagactttattattaacagaccagatagcatcagacatcctgtgactgttctgattatcagaatgtcttaactttata

SEQ ID NO: 654561 - DNA, 160 bp, Homo sapiens
gggaagaatagctaatagatgctgggcttaatacattggtgatgggatgatctgtgcagcaaaccaccatggcacacatttaactatgtaacaaacctgcacatcctgcacatgtaccctgaacctcaaaatgggaggcagaaaatgtatttttaaaaag

SEQ ID NO: 654562 - DNA, 440 bp, Homo sapiens
  misc_feature (44)..(44): n is a, c, g, or t
  misc_feature (146)..(146): n is a, c, g, or t
  misc_feature (366)..(366): n is a, c, g, or t
  misc_feature (374)..(374): n is a, c, g, or t
  misc_feature (430)..(430): n is a, c, g, or t
  misc_feature (438)..(438): n is a, c, g, or t
ggccttggagtgcttcaagtagtgtgtgtctggcatatttaatntagcataatggcctctgggatcatccattttgtggcaaatggtgggatttatttatatattagggctgaataatattccattgtaagaatatacactatttncgttatttactcatccataaatgatggacattaatgttgtctccatgtcttggctatagtgaataataccataatgaacataggagtatagatatctttccaagatcctgatttaaattcctttggatatatactgagaagtgggattgctagatcatgtagtagatctatttttaattttttgactgatctccatgctttttcctagtgactacaccgntttacatncccatcaatagtgtacaaatgtttcctgttctccatgatccttgccaacactcatngtcttttnaa

SEQ ID NO: 654563 - DNA, 212 bp, Homo sapiens
tactcttgcggaagtcggtcgaaagttagctgatcatattcttagggttcatctccacctgtccatttcaatattcatctcttctgtatcagcagctcgggacaagaattctgccatcagtgcttcttccagatctcatggcgtaccttgctgtactcgcctcctatccctggttaccctgatgtcttcactctgtgacaactaacaagcct

SEQ ID NO: 654564 - DNA, 308 bp, Homo sapiens
tcctgccgggctttgtgctcctcaccacctcttgctcagcctatatacctgcatcttcagcaaaccctgatgacggctacacagtacgcgcagtacccacgtaaagacgttaggtccatggtgtagcccatgaggtggcaagacaatgggctacattttctaccccagaaaactacgatagcccttatgccacttaagggtcgacggttggctttacgcacgtacacctgcggacgttacagtgcttaagttgaacacgggccctggagcgcaaccacgggtaccgacgctcgcatacggtcctcatg

SEQ ID NO: 654565 - DNA, 202 bp, Homo sapiens
ggatttgaatagacggggttcaccgtgttgcctaggctggtctcaaacccctgagctcaagcaatctgccctccttggcctcccaaagtgttggatttacaggcgtgagccactgtgcctggatatgaaaaaagaaagaaaggaaagaaggaaagaaagaaaagaaagaaagaaagaaaaagaaaagaaagaaagaaagaaa

SEQ ID NO: 654566 - DNA, 287 bp, Homo sapiens
ccgcgagaaatcatatattgtagagtttgcctaacccccaccttattatctaagttacagtaggtgggccaccccttaaggagttttccattattcctttcaaataggggaaggaagatttgtacttgagaacaatctcttagcttcctcaattcgacagactcattattctccgctatacattaaaccatggggacaacaactcgaggcagggcccaggcccatgtttcccctatctggagccgcttgactatacactggccgtcgtataacgacaacgtgactgg

SEQ ID NO: 654567 - DNA, 116 bp, Homo sapiens
cccttcttccaaacgagatgctgctggtcctgctctcagtggtccttctggctctgagctcagctcagagcacagattatgatgtgaactatgaagactttactttcaccatacca

SEQ ID NO: 654568 - DNA, 1048 bp, Homo sapiens
  misc_feature (144)..(144): n is a, c, g, or t
aaaagatacgtctaggtacgaggcctggtgttaatcggccgaggctctgtcctcgttctccgcggctccacgccctcgggcgccccgacatgctgcgcctccgcggcggccgcggctgcggccgctctgctgtacggcacctgngggcgccgatggacctgctggcgccggggtgccccgtgcgcggcctgctcgtcggcctcgtgcgccaacaacgccttcgccttcggtccggagctcagcagcctcatcacgccgctcgccatccagacccacaactttgcctgcctgtggccgcctgccgcctactaccgcagtcagcagcatgcatgcagcagcatgggcctggctgccccccgctgcagcctgccggcgcctgcccagcgcgaccctccccgccggggccgccgcagctccctcgccgcccttcagcttccatgcctgccgcgccgccctgtcccgactcgcccgtgttctgacggcgccccccaaggccccccggactccctgtcggcaccgcgacgatgctacctaaggcggctcccttgagctcctggccgccctcacgcggcctctgagtctccccagcctcgaccctggcctgcctgctgccaattcttccagcctgcttctccatctccgagcgactgagtgcaaagatggggccgccatgtagacggaggaaggggacagggcgggctacagaagattgtctggaagggaccacccccgtacggcaatcctctgccctttgcatagaggagtacacagagagagatagagatagttatgaccattggggcccatagtgcagacctgacatagtcaccgagcctgaagcaacttgagcactcgaaacacttgtgcccgagtaaggtaggcaccccaaaaccactaccattagtcagggaaaaccctcagtgatcaaaagcacaaacagtcatcactaagcgcagagcatactccaatacagaaaaaaaaaagcagcaaatattcctgagtaccacataattcacaacaccggggccgtagacacgatatgaaacca

SEQ ID NO: 654569 - DNA, 263 bp, Homo sapiens
  misc_feature (254)..(254): n is a, c, g, or t
tgattgctgtcatgcgtatgatacactaattgagaagctgatcatttagcagtctggtgtcaaaaggagagtataaaacactgatgttcaaagattaccacacaagaatagcttttgctgaacgctgagcagatggcagatttttgggttgtatgtagccaagggccatagagattaatccatttattataatgatatgagtatgcagacgagggtaaatgctgaggtaactgaacaggcagattatcatactngcagattac

SEQ ID NO: 654570 - DNA, 206 bp, Homo sapiens
tcctggacccctggaacctccttgttcagctggccagctgtctccacacaaggacttgcagctatgtggcatcctggaaataaccagtctgtctccacccacagagggcctgcatgcacagggactacaaggggactaactcaggcctgtggatacagctctgaactcagacacctggaggacccagggtcgatgtaggggagcta

SEQ ID NO: 654571 - DNA, 618 bp, Homo sapiens
tcacctacaatcctgagagaccttaaacaatttgccccaagcccgttcctgcgagaaaattgaaatcattgcgacaacgaagaactggagtccaaatatgtctcatctgaggtccaagagatgtgaaggaactgattaaaaagtgggagaaacaggtcagccaaaagaaaaagcaaaagaatgggaaaaaacatcaaaaaaagaaagttctgaaagttcgaaaatctcaacgttctcgtcaaaagaagactacataagagaccacttcaccaataagtattctgtgttaaaaatgttctattttaattataccgctatcattccaaaggaggatggcatataatacaaaggcttattaattagactagaaaatttaaaacattactctgaaattgtaactaaagttagaaagttgattttaagaatccaaacgtaaggaattgttaaaggctatgattgtctttgttcttctacacacccaccagttgaatttcatcatgcttacggccatgattttagcaaatacccatgtctacacagatgttcacccaaccacatcccactcacaagagctggctggaaaagcagccctaggcttccagtactgaagctccagag

SEQ ID NO: 654572 - DNA, 88 bp, Homo sapiens
cggcacgaggcgttccttctgcctacaaataaaaagtgcaggctggaatgatctcagtcacatttggatctttttaaacactgtatag

SEQ ID NO: 654573 - DNA, 1874 bp, Homo sapiens
  misc_feature (279)..(279): n is a, c, g, or t
  misc_feature (440)..(440): n is a, c, g, or t
  misc_feature (570)..(570): n is a, c, g, or t
gcagctaaatgtgtggatgacgccgagtgcatcgagggtgggcccgtgggccctggtggtcctggaattgagggagagctcgctggtggctttcctgcaggagctgcttctcaggctacgttggccctccgtggcggcctcgagggtcgcgcggcgccgatgcgactcgtgagtgccgggcgcctgaggggcggtcgtgaagcttccgctggatcgtcacggcgctgacggactcacggacagtggtattagccggcgtcgagccataggttggtgcgncgcgcgttgcgttcgaacgagcaccgagtgaataggactcgaacgggtcctctgggcaaggggaagacatcgtaatcgtcattttcctacgcacatgggcacgtacattgaatgagcaccaatcgacgcaagaagttccatgtagaactgtatccctgttnccttgggcgctgtgcctcttacctcttgcgaaacgggaattgtaaggaggtgtatgtcgcataggcattaaatcggcacgaaagatgccgaaggaaaaaggcctagggaacgcactgctagcaccggtgncccgagggccaggcaacctaatgggctatccaaaagggggacgagtttatcgctatctgagctgattttaccgcaggggagagactctgtagacaagactcggtgccccaattctgttaccaggggattcctaaggtgacgagtagtgttaaccggttgacgtgtccccacacggaggaagttgctttgtggccgccaaacaacagtgtcaccaattgcctccggtaggcgaagagggcgccaactctctaattactcctttggtggcctaagagaggcgtacttttcgcaacttacaggttgccccccccgggtttcgtcctggccatttgacgtgtggcattcagccatgggtgtagtggggggaaagcctaacagagacagtttcagtgttggcagagaacaagccaccgcacggaacctaggcagtagcttaacttcggccttttcgcccaagagatcggtttgggaaggcgcgagggtgaccaccctgggatttggccgtggtgcgccattcggttggtgtatgtcctctggagggtttaaaccggggcctcgtaactaattgccactcggtatggagagacgcccacaattggggtcgagccaacccgtggagggctaaggttccagggtcgtgcggccggacaaccccgatattggattgtccacgataagaggagacaccagtccaataggcgcgtccaattcgcagcttggggccttcgggttcaaatttgctgaacctttgaaactgtaggcctttacaacaaagaccgatcaatggggcccccgggtgacgggctctatggcaccttatgagcacaaacccccgttggggagtgcacgaacctatttctgtgcgccagaagggtgtccgaacccccgttttgggaattttgcccagattttgccttaacacgaaaaccttcatccaaggggaaaccctttgacacacacgcatgaatcttgcgttggtgcaacagtgacacgcaacttggtccttattcacgccacagagtgctcggcctaatcagagaggaagattaccacagtgggagacgactcttggattacaagaaatggcgacactcccagcgagatctctccgcggcgcaggcggcacttcgaggggttccgcgccacgtgtggacttcaccaccgaccaggggctgtttatcttcagacaacacaacctcaagctgggacttacagcaggtttctaccggttcttccatccagacgaaaacgacgcacgacatccgagaacaacatgctgaggggggcggagagcagcataaacc

SEQ ID NO: 654574 - DNA, 246 bp, Homo sapiens
  misc_feature (2)..(2): n is a, c, g, or t
  misc_feature (8)..(8): n is a, c, g, or t
  misc_feature (185)..(185): n is a, c, g, or t
gnctctantttttttgttgttgttgtgactgacagagtgagattccgtctcccaggctggagtgcggtggcccttctcggctcactgcaacctgcagcctcctagattcaagcgattctcctgcttcagctactcgggaggctgaggtacgagagtcgcttggacctgggaggcagaggatgcantgagccgagatcacgccattgcactccagcctgggggacaagagtgaatctgtgtctcacc

SEQ ID NO: 654575 - DNA, 207 bp, Homo sapiens
gagagggcaccacatgccacggagaagggggggggaatctttttgcattttctagggcactcctgtggcatacagaggttcccaggctagaggtctaatcggagccgaagccgccagcctatgccatagcaatgcaggatctgaaccacatctgtaacctacaccacagctcatggcaatgctggatcccttctccggtggcgtggt

SEQ ID NO: 654576 - DNA, 107 bp, Homo sapiens
tcgttgtcatgacgccacctgacccagcgcgagtcgctctccgatgagcgcggtgggtgacgtgcgttgtcgacttaggttgccgaggactgcggtgacgtcttcgg

SEQ ID NO: 654577 - DNA, 1528 bp, Homo sapiens
gggttatgttgttgttgtgtcgtccctgttactttgtttgtgttagatagtcggtgtacgtctccctctctctctctttgtttatgataagtgagggagggggtgtgggcgtatcgaagcagcccccctcgctgtctttcggttgcgccgaacatttgtactcccgaccgtcgacttcttgaattagacgtagggggtggtttgtttgattctctgccgtcagtaagtatatgtgttttggtccttccgttctttctttgttaagtgagtgcctgtcgttgtttttttgttcgttgggatgacttgtgttgttcctcccaacgacgcgttggtggtggcgccctcttcctgtggtctccaagcgacgaggagtagatagtagcgtctgtcgtccactatcttcgttctcatcaggaggggagatccaccagcattgttgtgtctgattttgttgactcacccacatcattgtgtggtataataacaacatgtggtgggggagaagagaaacaacaaccaccagctggggaggtggttgtgtttttatgatcaacagcgggagggcgtgctgcccgctgcatactggtggggtgtgattaagaggaggagtctcgcagcactatgtgtgcgcgtgttgtgtctcctactctgtgtgcgtctctttttagtatgtctcccccgggaggggcgcacattcttctcgagagtatttctctcctctctctcagtgtctctccacacagtagctgctgtgtgtgctctgtgtgggagtgtagtgtttatgtgtggggccaccccctggtggtctcatctctctgtggtgtgaagcacacgtgtctgttgtgcgacacacagatatactacctcacacactctgtgtgatagacaccttctgtgtgcgcccgctcgtctctctgtgtgcgcgccacgacactgtgtgtgtgtgtgcgcgctgtgtgcgcgcccaccgtctctctctgtgtgtgtgtgcgtctccctctgtgggcagacgagtgtgcgcccgtgtgggagagagagagcgccagcagagagctctactaagagagcgtcgtcgtgtgtgctctcccaccgcgtagttgtgtgtctgtgtgagatctctcctctccgctgtctccctgtgtgtggccagctatagtgtgcgcaccgccctcacgcgcgcgggtgtctctgggtagtgtgtaagagacctctgtgtgtgtctggggtgttgtgaatatgtggagagagagaggggtagagagagaggccacgccacacagaacctctagaatataggtgttccacacagagacactctcttgtgccccagcgagaggagaatatatttatgctcttgtagggctgctctgtgacgcactccacttacccacaaaagagaaaatattttctccccacccttttctcgaccccaggaaatcccatggggttaaaattatattaaaatataggtgtgtgtattatatatataaaaatatagtgttttctctccttgtgtttgggtgtaaaa

SEQ ID NO: 654578 - DNA, 244 bp, Homo sapiens
tctagaggatcccgttatcgccaacaccacgccggctattttttgtatttttagtagagacagcgtatcaccgtgttagccaagatggtctcgatctcctataggcacgtgctactaacccctggctaatttttgtcttttaagtagagacggggttttgccatgttggccaggctggtctcaaactcctgacctcaagtgatcctcttgccttagcctcctgaagtgttggggatacacatca

SEQ ID NO: 654579 - DNA, 413 bp, Homo sapiens
ctctttcggtctgctggtggctgagctcgaagcctgcctgcctgacagctccatttccgcgtacaatatcatctacttcgtaggcaatgtggtgaatgcctacgaggtttttgtcgataagagtttggcaatggcactctcgctgtatgtaggcttccagtagctctatcttggtatcgcccagcataaaaaaactggtgcttaccccttcgctggccaccgcctctactttataatggtctttgccgaaaagcttcctgaggagttcattggactgcccgagatgcttcatggcaatgccgatgtgttctacttttttgagcatgggtgttttctaaaagtacaaaaataagggatttaagttattttgctaaaagccaatcatttattacatttgtagcctaatttttatg

SEQ ID NO: 654580 - DNA, 631 bp, Homo sapiens
tgcccaggctgcagcacaatggtgcgatcttggctccctgcatactgcgcaccatgagttcaagtgattctccagcgccctctcccgagtagctgcgattacaggcatccaccatgcctggctaattttttgtatttttagtagagatggggttctaccatgttgtccaggctggtctcaaactcctgacctcaagtgatctgcccatctcggcctcccagagtgctgggattacaggcagagccgccatgcctggcctcttcactggtttttaatctctggctcatgggtactgcctctctcctgggtacttcactatgtgaagcttttcttccagcatccctaagcataaaccgtaaccctcagcaggtgttcctgaccagtttggtgggtggttaaactacacagcaagatgtatatttcctgtgagagatggtattatttaccacgtggtttgctcctaatagaacccatctcccataatagaggctgtaaattccaccaacttctgctcccagcctcccttacaactggaggttgacaagggactcatttatggtgaataagacttaagaagtctccaaggggctgttccccctcgtgatataagagcactcaaagagagaaatct

SEQ ID NO: 654581 - DNA, 322 bp, Homo sapiens
ttctttctgttggaggccgagcgggtggatcacttgagggcaggagttcaacaccagcctggccaacatggtgaaaccccgtctctacaaaaatacaaaaaaattagccgagcatggtggcacacgactattatcccaggtacccgggaggctgagacaggagaatcgcttgaacccgggaggcggaggttgcagtgagctgagatagtgccattgcacaccagcatgggcgacagagtgagacttcatctcaaaaaaagggagaaattatattgaggccagcctggacaataagaccacatctccaacacggactgggaac

SEQ ID NO: 654582 - DNA, 228 bp, Homo sapiens
cagcagtcttcaggaggagaatctgtaccaggaaagaaacccctttcggccccagcgaaagggttgtttgaagagctttaagtccctcttgtgaaggtgtaccggcaagtccctcgagaaagctagaagagaaaatggaaagtcaagggattatgaaaataaggaaattcaagagctcggcagttattaagttctgaaaggcaagagcttactgccttaggaagcagt

SEQ ID NO: 654583 - DNA, 437 bp, Homo sapiens
  misc_feature (12)..(12): n is a, c, g, or t
  misc_feature (40)..(40): n is a, c, g, or t
  misc_feature (96)..(97): n is a, c, g, or t
  misc_feature (113)..(113): n is a, c, g, or t
aatgtgtcaagnattttccctccgtttttaaggatgaaanagtattggcagtgtgtgtgtgtatgtgtgtgtgtgtgtgtgtgtggtgcggctttnnaccccccaggctgganttgctgtggcacaattatggctcactgcaaccttgaccttcccaggattaagccatccctccccacttcagcctctgaagtagctgggacctaatggcacatgcccaccgtgcctgtcttcactaaaaatacaaaaaaaacccaactaaacaaaaaaaacaaaaacaaaaacaaaactagctgggtgtggtggcacacacctgtggtcccagctacttgggaggctgaggcatgagaatcacttgaacctgggaggcacacgtggcagtgagctgagatcgcaccactgcactccagcctgggtgacagagcaagactgtctca

SEQ ID NO: 654584 - DNA, 1010 bp, Homo sapiens
atactcctgcaacggtgattgataaacggactgatcatgaatttcgtacttgcatcacaacgttgataacctcgcggaaacactaccagagagaccattggatacaccctcaccagtcatagtcctagatactctatttcctgcaagcagtcacccactttacatttatccaggcatcatgatcacgcgaatagagacactcattccatagttgcgcatagcatcgatgtacaagtgatggatgcttacggaacaagacagactaaagcaagcatactctaaaaacaactggagtcgactcatccagaactgtctagacatgactagtgaattttctacctaaaacagttaggttcggacaccactagatcatggtattcttgtctcgggcttagactaagtgatacacttgaccatttacgaaattatcttggttccataagttgaaataattttaacaaaaatcaaggtatctctaaaaggaatgtaaatctatgccttgcctaagatgactgttatttaccatacttctcgtatagtttattaaccaaataaaagtgccattgaaggtgaaatttgaataattagaaacgctattctacggattatcgtaaacagggacgcgattgggaaaaaagacgtaatggaacttaatatagttgcgtgtccttcggtgccatgctaggttaatggtactggagtaaaatgcgctcgaaagcaatgtattgactatttataagaaatgtgcaattgtaacgactcttacttttaaccacttcgttaaatcggtccaacgaattccggattgtaccaatgctcgttggaggttttgggatggtgaaatatttatttgtaaggctacttattgggaatgataacactgataaatagggggtaagagttggactcaattggactattttagcaagaaggtgaattccaggtataactatggctcatacattcatagcctgttggtggagggcttgtttatgacttgaaataattgg

SEQ ID NO: 654585 - DNA, 259 bp, Homo sapiens
ctcttcaacactaagatatgctctccctgcctgcacctgctatccggaaggcaatccttctcacctgtggacaccaacgacaggaagaatcaccacaacatgatgtaggtgccacccacctcctgagctgtctttgtacactgactgctgacagcaagttcttgctgctctccaatctcatcagacagtagcactgtagggaaacaattttgcccgactgctttttcacacaggacaacaaaatgttttactcatgttg

SEQ ID NO: 654586 - DNA, 213 bp, Homo sapiens
  misc_feature (4)..(4): n is a, c, g, or t
gttngtagtaaacaaactacggtttccttcacctggaggcagtatggtcgggtgacgaacgcatggtacacaggcgctagtccttctgcgatcttcttcccctagggaacctcctccaaagagtcttctccaactacttcattctcacactctcgaaatttactttaacccattatggattcaaaatccatttagaattagagtacctctctt

SEQ ID NO: 654587 - DNA, 271 bp, Homo sapiens
  misc_feature (34)..(34): n is a, c, g, or t
  misc_feature (49)..(49): n is a, c, g, or t
  misc_feature (56)..(56): n is a, c, g, or t
  misc_feature (146)..(146): n is a, c, g, or t
  misc_feature (209)..(209): n is a, c, g, or t
  misc_feature (257)..(257): n is a, c, g, or t
acatcgagctcggaccgctctcgtgagactcctntagcttaggactcanatgccanacgtgtggccctgaaaagttaaaaaaaaaaaaaatcagaaaagaatcagactgcagaggtttgggtagctgctgaggcatgggttacagnccctgacccagtgcaatgggttagactcctgcattgctgcagctgtggtgtagctgtggtgtngtttgcagctgtggctcagattcaatcctctgcccaggtacttccatntgcccagtctcacc

SEQ ID NO: 654588 - DNA, 205 bp, Homo sapiens
ggacgtccagctgagatctcctaggcgaaatataagaattattgtagaaaataattaaaacgttctcctttttttatctttaaataaaatctcaatttcgaacatgtcggaaaaaaaggggaggatttaacgtgtcatgtatgctaataatatttgtagtcgacgccaagaccctcactcgaacacagcacaatcacggtagagg

SEQ ID NO: 654589 - DNA, 252 bp, Homo sapiens
ccgcgtcgacctcgtaggttgcgacccagtccggcgcctggccctccagcctggagctgatcaccgggttgtaccagccgaaaggctgcagcgccttgcggatgtcgtcctcgccctgccgggtcaggcgctgcacctcggccggatcatattgcagcttgtcgggcgccttgctggcgtccacgcccttggcgtagtcgagcaggcgcagctgggcgtaggcgttgtcctgctcgtctcagccgaggccga

SEQ ID NO: 654590 - DNA, 800 bp, Homo sapiens
  misc_feature (1)..(1): n is a, c, g, or t
nttaaggttcccacacatttgtgcaagttaaccgtggaggctgccttggccttatattcaaattgttgtggttaaagaaattgggccagaacccagccagttttaaagggcccctttcccaacgggttttaactgcggttggcaatggaggtgtttaagaaacagggtctcactatgttcccagggtggttcacacatgtcggctgtttaagactgttgggaaatgcaccccggcctcccacaggtccttttcaagtttgacatactaggaccctctggcacaatcttgtgaatgagctcttacctcacttctaggaattgtgagtcaatgttccgtctgttgaatatgcatagtaggtggcagtggtttgtgtttgtaactaatacagtatggcctctctcacatcctaattatcctaccagttggctcaccggtattatcttatgacctggtaccatcccaattttgtgaatgaggaaacaagtgtttaaagtgtcgctctgaatgttgggcgcagtggttcatgcctgtgatctcagcatttggtagggtcctagacagaaggattactttaggccggcagtttcagaccagcttgagcaacatagcaagtcctcgtctgtcttatgtagcaatacaaaagttagccaggtgtggcagtgtgcacctgcggtggtggtcccagctacttgggagtctgaggtgggaggcctgttttacctagggaggtcgaggttgctctgagccatgattagccctgtgcactccagtgtgggtgacaaagcaaatccgtatctca

SEQ ID NO: 654591 - DNA, 335 bp, Homo sapiens
  misc_feature (1)..(1): n is a, c, g, or t
nacagctgtaaatccatataaagctgtgctcactcacccagcgctcaccccatactgtgtggcctggttcctacaaccggtttaagaattattctttctcagaatatctacctcgactggaataagctcacgttctgcactgtagcaccagtaggtgctcaataaatgcttgtcgcaagaatgaatgcgcggcctgggcacagtggctcaagcctgtatcccagcacttgaagctgagcgccagtcacgaggtcaggagatcgagaccatcctggccaacatggtgaaaccctgtctcttctaaaaatacaaaaaaaattgcctgggcgtggtgg

SEQ ID NO: 654592 - DNA, 1224 bp, Homo sapiens
  misc_feature (1100)..(1100): n is a, c, g, or t
ctaacttaggccaaaccatttacccaaataaagtataggctgatactaaattgaagagcactgcgcgcaagtagtatatagtaccgcaacgggcaaagatgataacagattgatagcgcgaagcagtaatatagcaaggactaacccctataccttctgcataatgaattaactagaaataactttgcaaggagagccaaagctaagatccccgaaaccagacgagctatctaagaaacagttactgagagcacatccgtctatgtagcaaaataatggagaagattctatagcgtagaggcgacaaacctacgcgagcctggtcgatagactgagtgtgtccgaagatagaagtcttagttcaactttaaattgtgcccgagcagaaacgcctctaagatcccctgtgctcaagtttaactgtgtaggtccaacagaggacacaggctctttgtgacactgaggaatagaaacctatgtagcatgagacgtacgacaatctcaacgacgcgcataagtaggctcgtaaaagcatgctcacctagttacacgaaagcgtacaagctcaacgagcgcacatacctacagaatcccaaacattataactgaactcctctagaccgcaactggtgaccaatctatcacgctatagaagaactaatgttagctataaggtaacgatgaacagacattctcctcctgcataaagcctagcgtcgaagactttaaaaggcgacttggaactggactaatttaacgaggcccaattagtctacggatcaaagccaaagacacgtcctcttgattacccctttacgtggtaaaagccccaatactagagtcatgctcactacagggaaacagtctcaaacacatgaaatacacgaagaacatggaaaagtcattaaatacccggtacttgtcgatccacaaataaagcatatatacgcgtaaaaagacataagcaagagaaattcaaagcgggtcacagcacagtgcccgagtagcacactgtgttaaaggggacgcaaaggaaaccccacacgaaggtgggaaaggaaagcacatagactaagtacaagaaataagcaagcaggacnatacaacggagccagcaagagcggcacaataagaaagcgtagagaacaacgaaacaaacaatccggaaagagagcgagcttaccacacaagtaagtaacgtaccgactgcttatgacacactaa

SEQ ID NO: 654593 - DNA, 805 bp, Homo sapiens
  misc_feature (124)..(124): n is a, c, g, or t
  misc_feature (565)..(565): n is a, c, g, or t
  misc_feature (567)..(567): n is a, c, g, or t
  misc_feature (603)..(603): n is a, c, g, or t
  misc_feature (605)..(605): n is a, c, g, or t
agctcggtaccccgagtgggtccctgctcatagcctggtactcggctgtgtatcgttcttagagcgtcggcagctcggcaggagctcaggcgcaataccaaatcttctctataggtggcgcagngggtgaactctttgactttccttttaggtttccaacgattccacaagctccacagattccagcgcttatcgtccttcatcgtctgtaccctctctgctgactgctgagtcgtacgaccaaaatggttaaagtggcgtcctggatgttggagacgatgcgatagtctccaactcggtacttccagaactcgccgagctctgagcctttcagagcgcttccaatactgcgtggttcgccttgattggtgatacgtccaacaagaaatttcagaacgtcctttgctgcatcgtccccaagttctttcagttccttttccgctgccggatcaaattcaatcccccaggtcataggacttgatcacgtcttgaagtgaaatcgtttcgctacggttctcacgcacctctcccaatcgctgctcagccaggtacagatcctctaggncntcaatgtgctcgaggatggcctcacgggcatagaangncttggtgcgtcctgtacgagcagcaatgcttctaggcgctcctctatttccggggcaagacggatcgctaacatggggccctccaaatgattgctatacaagtatagcgtggcgttaaggtgtgggacagcctatagcaatagtgccgtataaaaagccgccttggggcgatcaatgcaggctcacaaatgagctaaggg

SEQ ID NO: 654594 - DNA, 179 bp, Homo sapiens
ggtgtcgaggattccgaatctcgacagtggtgcagcaagaaattacatgatgaaagactgtaaacacccaaatatagttgcttatttgggaagctatctcaggcgagataagcttgggattggcatggagtttggtggaggtggttctttacagggatatttatcacggtaactgggac

SEQ ID NO: 654595 - DNA, 422 bp, Homo sapiens
cgtcaaacgcgccatcaatgttactgaggggacaaatactccgactatggcggactaaacaacaactcctacatactacccggatcatacctagagccatgcgagctgcgactccttgacgtgaacgaatcgagtagtactcccgattgaagcccccattcgtataataattacatctacaagacgtcttgcactcatgaactgtccccacattaggctaaaaaacagatgcaattcccagagaagtctaaaccaaaccatctttcaccgttaacacgaccgggggtatactacggtcaatgctctgaaatctgtggagcaaaccacagtatcatgcccatcgtcctaaaattaattctcctcaaaatcttggaaatagggcccgtatttaccctatagcaccctctctaaccccgtttgag

SEQ ID NO: 654596 - DNA, 224 bp, Homo sapiens
agccggtaccggcatgtgctgtaggccagcgtgactcattaatacacttagcgcagaggcctgactcattcagagatctcttaacaaccacctcacccaaccttacgatactttagctaatgatattctccagcttgggctgtcagaattatgcctcacacgtgggtaatgggttttatagcttgtaccagaagtaggctactagcgctggcctacagcacatg

SEQ ID NO: 654597 - DNA, 163 bp, Homo sapiens
ggatccggaggttgagtctggactaccaaaaaatctcttcaggtagtagatctgtccccatgtccttgccactagaaccagagctttcaagaagtgacccaaggaccactcttctgtttgtgttgtcgttgattgctctttgtattctcttccggacttcaag

SEQ ID NO: 654598 - DNA, 619 bp, Homo sapiens
gctggctacgccgccctctgcactgttaccaacatgaagctgctcgcagcaactgagctactgctcaccatctgcagccttgaaggagctttggttcggcgacaggctgaggagccatgtgtggagagcctggattctcagtacttacagaccgtgactgactatggcaaggacctgatggagaaggtcaagagcccagagcttaaggccgaggccaagacttactttgaaaagtcggagcagctgacacccttgatcaagaaggctggaacgggactggttaacttcttgagctattgcgtggaactaggaacacagtctgacacccagagaagtgtccacgccattgtcttccaacctcagctggtctctagaacacccactgagcagtcctagagctcctgtgcctacccactctgtgctacaatagatgctgaatgaagccgctacatgcgacgcaacgcgttgttggcacagccgactcgagggggggtccgtgacctgaattcgcctatagtgatgcgaataacaatgcactgcccgtctttttacaacgtgctgacgtggaggcgtaatagcgaacaggctcgccgatctactttcccacaggtgcgcctct

SEQ ID NO: 654599 - DNA, 518 bp, Homo sapiens
  misc_feature (299)..(299): n is a, c, g, or t
attcgcggccgcgtcgaccagataagcaaaaaaaggcatctggaaggcttcttgccaaatggtaactttctggaagtttcctcatttagaagtaatttctggaaaatttcttgattaatacaaatccgtgaacaaacttaaaaatgatggctttgttattgctttggcacaatatgttaacaacactgtgagtgctgccaaaactctgagagttctttcatgcggattatggtcttgtttacatatccagctgtactgaggccttgtccatggtggtaacctaacaatgttcccagtgngggtgcccattaggggaggggagactaactgaagtttagtttgtttaaattgagcaagaatgcacagcggcactcaaatctttggggaatgtgttggaagcataccctttctgggatctgttttcgtttatttaagggggatgtttgcattgctcaaaaattgcagtacacaaacttgccatgcaaaatgccctccacatgtttactggggtctattcc

SEQ ID NO: 654600 - DNA, 620 bp, Homo sapiens
agcgggtcactctccaagtcccctgcagtcttcctcccattgtcttttctctttgtgtttggtaacttttctttcctacgaatttaccagcctgaagagatgaaagtcctgagttttcctacttccttattacacaaatggaggaataaggaaagctgttgttggaaggatagcacgtcagtagatgagcaaagcaactcaagattgtctcctttagctccagtaagtttgatccaaactgggaggtcaccgatgaagcttagatcaaacaagggccaagcatcattggtcatcaagcaccatcactgtcatcatcataatgacatagaaatgacccaaaaatgttctaatttttgaggaggttgtgcttaaagtgaacgaaggttttaatatcttcattgtgtgctagattctttaaatcagaataatcaaactgaggtgttaagagaaagaatatcagaaaatcaggcaagaccttgcttaaggaaatatgaattgcctaaaggaggaaacggctagtaaagttacagatgatttgcttgatctcgaatgtaggtgtatacccaatttcagttaacctttgggtatgtgataagcaaaaaccacactccacccttccc

SEQ ID NO: 654601 - DNA, 190 bp, Homo sapiens
  misc_feature (57)..(57): n is a, c, g, or t
  misc_feature (84)..(84): n is a, c, g, or t
  misc_feature (87)..(88): n is a, c, g, or t
  misc_feature (171)..(174): n is a, c, g, or t
cggtagggtctgatccggagatatggcctcaatatgtgccgccagtgtttccgtcantacacgtagggggtggggttcattaanttnnactaaatgctcttccttcagaggattatccggggcatctactcaatgaaaaaccatgataattctttgtatataaaataaacnnnngggctcgttggcctca

SEQ ID NO: 654602 - DNA, 192 bp, Homo sapiens
tgttcgccagtttttttccccaccagaggttagtccattacatgtccagattgcttaaggttgcgatatgtatctcgttgtcaacgggtatatggctgtgaaccttgcatgtgtgtggatgctgagaataccctccacacatggcactgttgtaaaaatcaatattgatccctaaattctcttgcagggtca

SEQ ID NO: 654603 - DNA, 317 bp, Homo sapiens
tctagaggatcccgtgatttatcgcccacacctcgatggacaaggaaaagttctgtcacatgacaacttaaaacgttttccacagataacgaatgggtaaaacaacaaaattaaagaatgacaaaaaaaaaagaaaaaaaaacaacccagacacacaagtatgcctccacttctccagagtggcagaaaactgcacggaggaagcccagtcactgtagagagagagaaagaaataggagccccgtctcagggtccaggttggccctctgcagaagctgcaggtacgtgaggttctcgtgcgtgtgggggataacata

SEQ ID NO: 654604 - DNA, 1052 bp, Homo sapiens
agcggaatttgctgtaagttcaatgtgactccagctcagagcttaatggtttaaagtttcaggataagaagatgtagaagtcaggtggagacgctttgtaagtgtgtcctttcaatccgcactaagcgttcaaactaatcttttagccagtggaaaactgcagatatgtttaataactttgttgtgttttattttgaattgctacatactcatagcaaaaaaaaaaaaaaaaaagaaaacgtttcagaagatgtccctaagaaaaattgaaaatctcaccaatttccattaacacccgttccagacgatacctggataactaccgtagtgttgctcaaccttcttccagagtttttcgggtggaacacaaacacacacgcaaaacagtactcatacctactggtgctagcggtcctatcccttggctttccctattttagcaaattaccattgggactatatattctctttcaaatttacatcgggcagcgtggcagtcctacacattttaatggccttcttcaacaacgaattacctctgcatatgccttgcgcggggcattccagaacttctatgcgcatattggcttcaccctctttagagaacagcagctacctctctgcttcactcacatctgggccattcttccagaaagaagaactaaccggacccaataccttattgcaaagattctaatctgcgggtaacgtctgcatcccaactgggcccggccacgaaagaagcccccagttggcctgccctaattgagcgcttcgttccttaccactggacctcaacattctgggacggcggctagcgagacccccagaacacactttccgccgcaagcaaacaggcgcgatctctgaagcacgcttaaatcacccaaacgggcgccacatcatttccccctatcatctttcggacacccccaggggcgactcttcccaccttacgggcggggccaaatatctagcgcgctaatagtggcttaattctgggccttttccatcattggctctagtgtccctttctttgtgtatagcatgcg

SEQ ID NO: 654605 - DNA, 152 bp, Homo sapiens
gtcgactcaaaaattgccaatgccgactatatttcaagtagtcatggcagcatattgggaaaagttttcaattagcaataatctgcctcggattaacctcattggctacggtcgacgcggccgcgaatttagtagtagtagtaggcggccgc

SEQ ID NO: 654606 - DNA, 180 bp, Homo sapiens
  misc_feature (94)..(94): n is a, c, g, or t
  misc_feature (101)..(101): n is a, c, g, or t
cccaccgaagccagatgtcaggcagccggtccaagccagagcccccgaaggcgccaccgcggccctccatgtccaccgacatgtttgagccgtncccgatnccggagaccacgacgagcgcccactgattgaccagaaccctgatggctccttgacaaggaggaccgcacgacttgctgg

SEQ ID NO: 654607 - DNA, 314 bp, Homo sapiens
ctgagctcaatgccatcctcccaccgtcagcctcccgatgtagctaagaccacaggcgtgtgtcaccatggctggctgatttagatttttcgtgtagaaacagggtctcgctatgttgtccaggctggtctccaactcctggcctccagcaatccttctgccttgtcttcccaaagtggtttgattatagtcatgagccactgagcctggccttggaattctttttctaaataaaaatagcttcacatgggtgcagtgactcatgcctgtaatcccagcacgtttgggaggcagaggtatgcatatcatttggg

SEQ ID NO: 654608 - DNA, 298 bp, Homo sapiens
atgccctcagctcccaaaaagggggtgccccatttagttgggtgcaggggtcactgcttgtcagctcagggccctgggcccgcttgcctgttcccctacatttgggccgggacatccagaactgcctccttgccgctgcctccagtaagccccccttgagccagagtcaaggggtgcagccctgcccgatagaacacgcccgccctcactggtgtttttgccttacagcccccatgggaaaggtgcaccctttttgttttatttaaagaaagcccaacattaaagggttttccttgca

SEQ ID NO: 654609 - DNA, 449 bp, Homo sapiens
  misc_feature (447)..(447): n is a, c, g, or t
agccggtacccacttatgcgggcacttatgcgtggctcacgacatcgtactcacgacacgtacagtgtagctcattccacatgtccatcaataggagcgtattgcatcataggaggctcattcacgatttcccttatgccggggtaccctagagcaaacctacgcgccaatccatttcactatcatatacatcgcggtgaatctcactttcttcccacaacactttctcgggctatacggaatgtgccgaggttattcggagtaaccgatgcgtataccacatgagacatcttataatctgtgggctcattcatttctctaacagcagtattattaataattttcatgatttgagaagccttcgcgtcgaagcgagaagtcctattagtagaagaaacctccataaacctgtggtgagtatatggatgtcccccacgggatatggtngg

SEQ ID NO: 654610 - DNA, 1154 bp, Homo sapiens
ttatttctgctcaccattagtaggtgtcgatagctctaggatcctcatgcttcttcattgctgctttccgctatcaaaagtgtgctgtgatacagtgagcaccaaaaaccgagtttgcgagcgtcatcaccagccgtcctaatgcctcaagatgataatgtccaagataaggtaaccctctctgtcagagggaatatctccgtgatatgaaatgcccaatcgcctcgcacagtagtgaagtgctcagatcccatgtaaatcgctggcattctctattcactgctttaccttctgtgtgactgtacgcgtattgaaactacaaatgtggtactcaagcggttgattcaccaatgcacacttttcctcttacctttttcttttctcaacaagctatgttgttagcacactagaacacactcattggtttagttctttgggtggaaagggtcatatgtcacaaatagaatgtctccaaagctaggattgatctggatgtctacacctcttcccttctagtttctgaggacgacttcctcttggctcccagtgaggagcgattcccttgaccatgacacacattggccacctgtggcactttaagaccttagtggtatagataataaccaatttgtttttatgtcctcttctccctttcccatcttgtcagcatagactgggactcccttaagcccagacatgcagttgagacctgacccctagtcattggttacccagtgtgtcaggcaatctcggactttaccagtcgatgccattcgaacgatggcaccttgtgcaaaacgagcagtcggttgcgcatttcctagattgtggatcttccagatccaattgcatgctcattttcatttcagcttccttgataagtcagggtcggcttgtgagaagttgttaaacaacatgctaaatgtgatatgtcaaccctcactctttactttccctgttcagagcatgcagatgaagacttcattgggttttatagtggctttctgatttttgctagtccattgaagaagggagtttgtaagttgttggatactgtttaacgattggtccgcccatagtcctgcctgatataccattggactttgctttagttaacacccagttcatgtatttacagggcttagatagcttgc

SEQ ID NO: 654611 - DNA, 113 bp, Homo sapiens
acttagaggattactgcaatggttggagcaataaggggtataggggtaatggccaaaaaataaaatggtttgtgtgtgtatggggaggaaaggtgtgcaaagctgtggtgtga

SEQ ID NO: 654612 - DNA, 145 bp, Homo sapiens
tatggacccccaggtgttctaggcgtccttcctgagtgtgttacgcgttctcccaggtatgctcgcgtgttcacacaggtgtgctgtgtccttcccgtgtgtgccggattctcctgcgtatacctgagtccttcctgggatgtgc

SEQ ID NO: 654613 - DNA, 294 bp, Homo sapiens
gaccccggaaattcggccataatggccgggaaggtaattgaaaaaggcagggaattagttgcaggtcccgtggtggtaatggttgcccgttcgttaaacccaaccagggggactttaagggccaacaggcttttctgggttttaataaaaaaagttcttttgaccattataattttaatggccaaagtacccaaccttggggttaagtaaaaggtcctaatttttggaaccttttccaattttgggttggggaccagaagtaaaattaattccaaattacttccatttaacatt

SEQ ID NO: 654614 - DNA, 349 bp, Homo sapiens
caccgggcgcgtcgcgacgtgtatcctttttgattcgtgtgatggcacaaatgagcataacatatacacatgcatgtgtgcatatacatacacgtatactcgctcgtaaaatgtgaaaaatgcgaatatatcacgctggcattcgaaatcacttcagctttatacttcgcactcataggctctagatttgcccccaaaagtatttttcctggtcgcttatttaaatgcccaactagcaaaaccaatcaagggcccgaataagcggctgtacactgtgcatgtttcacgtccagggtctatgttcccaaaacaaggtcagcatgttcttcactttggccattgtgaacag

SEQ ID NO: 654615 - DNA, 814 bp, Homo sapiens
agagcttctcttgacgtttcctatttctacctctgcttgtatcgagctgtagaactcttcatttagaatataacatttgcaaatattgaaaaattactttcttttttgtggcgattgccactaggtggtgggtataatatgtgaggaatgatcacgcagtaactcaatagttctgatagtttcgggtacctatatttcttcacattcgtcgctgctcttttcatctacttgtgtatatttgacacattatctgtgaaaccttcagtctccttcctccactaattatctctcggtcctactcttctctcttagcagacaggatctcgctctgttgcccaggccaatgtgtggctgagtgtgactcactggctcactgcaagccttgaacgtctctggcgctcagggtcgattacacctgctctatggcctctccaagtgcgtctggcgacttgcggcgctatacacccaaccagtaccccagcctagaatccataaagcaccacaacagctgccaacacgctcacgaggacacagcactcctcgacaagagtacgaccccgggctaggagctcggagaactcctgagccccaagagtgaccccctacacacgctacgggtctaccccaacagctgccgcgccgaatacactaatggcaaccgcaccgtccacgtgtgccactaacagcgacctcacacacaactctccccgacgaattctcaaacaccaagataaacatgaacgcccctggagataaagtccacagacaaccccctgagggaaaaatcacaacccacagacacaagcagaaccga

SEQ ID NO: 654616 - DNA, 902 bp, Homo sapiens
ctagttgggatgcgagccagaggaggagaaaggtacttgcggtcttgttcgttggtacttacgatggtttacacacatttcgttgtgagatcggtagtttgtactataagatccgcggtccacatcgcgcggccctgatggcgcacagacttctaaagtgttggcacaaagaacactggtgtgaatttgctgtggtgccctcccctgcctttgttttctcgtggtaatgcaacacaaattttgggtggcccccatgcgaatcccctttttaccaccccgtgttggccccctgtgtgcctcgtaccctcacgccagttgtcgggtgcaacccagggccaatgcctcaaatgttttggggaacgccactgccatttctctgggcactatgtgatcaaacattctcccaggtgtcaccccccatccttcttctttttgcacagatacccgccccccccttttaagggggctctaaaggggtgcaaccacgaagtgttactccacagcaggcccctctgccaaaacgtgtgggtgtaccgcaaagctgtgccacctcagtttatcaaacacgaacggtgtgggccataccgtgttgcctcccctacctctgcatgtagcggcctcgagaggccccctcgaagctgtgttcccttattcttttcccccccccctctgtggctgctcagttacacccagggcacacgtccaatgtatttaaagtgggtggggccgggtgcatccaccatgggtcgaagcacattcttgttagcctcccactcgccctctcttcttggattagggtagtcttcccctttagacatcctccatactttctgccacgaagattgagaaaattcccaaccccccaaaccacccaaaaaagctttaaaaccgccaacaaaaca

SEQ ID NO: 654617 - DNA, 240 bp, Homo sapiens
  misc_feature (28)..(28): n is a, c, g, or t
caagatcgacacgccgcccatccgcggnctgcccgacgacccacacgatgccgccatcgcccgcgcgatcattgcccttggccgcagcatgcagctgacgatcattgccgaaggcgtggaaaaccaggcccagcagcgttttctggcagcggaagggtgtgagcagatccagggctacatcgtcagcctgccgctgccaccagacgagttcgcggccgcggtccttcgcatagcactatg

SEQ ID NO: 654618 - DNA, 198 bp, Homo sapiens
gggtgctgacagttggtatcaagttgatgatgagtgtttatgtatctatttttgtgcatgtgtgaaatgttccataaagcttcataagaaaaaaagattttaacttaatgaatatttgacgtggactgcaatttgtgcactcacttaccattaatggccctgtaatacaacaagcttccaggttgaatcaaatgtaga

SEQ ID NO: 654619 - DNA, 140 bp, Homo sapiens
  misc_feature (44)..(44): n is a, c, g, or t
  misc_feature (138)..(138): n is a, c, g, or t
ggacttgatggtggacgtagagcgctccaatgctgctgctgcancacatggacaagaagcagaggaacttcgacaagatcatggccgagtggaagcagaagtatgaggagtcgcagtcggagcatggagtcctcgcanaa

SEQ ID NO: 654620 - DNA, 273 bp, Homo sapiens
  misc_feature (2)..(2): n is a, c, g, or t
  misc_feature (34)..(34): n is a, c, g, or t
  misc_feature (82)..(82): n is a, c, g, or t
anaaaactgtggctcggcttgtattccccacccnttggaggcaggtggtggatcccccctaagacagaagttgagaccaggnctggccataatggtgaaacttcccatctctactaaaaaaaattagcgggtatggtggcgcatgcctgtaatccccagctacttgagaggcagaggtgggagaatcgcttgaacccaggaggcaagagattgcagtaagctgagatgacaccactgcatgccagcctgggcgacagagcgagacttatcaaa

SEQ ID NO: 654621 - DNA, 455 bp, Homo sapiens
catgccccaaaacaccaaccccagtgtttatttacgaaggggaggggccggaccctccgttttaatctgttcaaccggccctgaggttttcttgccgcgccctggtgtgggccgtaatgtaaaaagctgcctccctggccttccccttaattcttatcctaaaaggggccgccgggtggtggtgcccacccgttttttcaccgaccgggagattaattttttggtttctaacaaggcagacccgttttttgatgggggggggggtgtggaaaaaaaaaatgagatcccccttcttgtgttccccccccggggggacagcggggggacctatggaaggggggaaaggttggggggggtggttcccccccccccccccccccccctttttttttagggggaaaaattaaagtttttcccccccccccaccccccgggggaaaggggtttggccccca

SEQ ID NO: 654622 - DNA, 277 bp, Homo sapiens
  misc_feature (85)..(85): n is a, c, g, or t
  misc_feature (241)..(241): n is a, c, g, or t
tggaaattggctcctgaaattttattcttaggctaaagcctagcattaattatttggatatagtcactaggtgtaatcacaagtnccagtttgttttagctgatctcatttgaggtacattttggtctgagaaagtactagatcatctctgcacaagagatgtcatgcagagtaccctccccacctctgaaagaagtaaattaattgagctttttactcaggtgaataaatcaatgtgagnaagacgggaaaaatacaaaacggttatggcttcttt

SEQ ID NO: 654623 - DNA, 402 bp, Homo sapiens
  misc_feature (388)..(388): n is a, c, g, or t
agtaatggaatgtaatccaattccccactcccacgttcaactcttttctcacattatttcctccacctgctgggtctatgctgaccttgctgggaacactctgaggacagtgtgactgaccgagcggttggccccatgggtggtggggtgtgagaagcctgcaataccccaagaccccagagggcagtccttaggaagcacttacaccacctgggaacccctccgtcttttccctctactctcatcctaggaataaagcatttccacgccagagtagtttgggctgggggccagggttgggtggtcctgtccctccatatcatgtcctaccctatggtcctgttcctagtcatttagatcaccccagatggcctgatgacaacaagantttgtgaagttatg

SEQ ID NO: 654624 - DNA, 1044 bp, Homo sapiens
  misc_feature (114)..(114): n is a, c, g, or t
tgcagactggaggagatggtcctgaggaggtggtgctgttggactctttgcgatggacccctggacgtgcatggccctgggggagtgctggcctgaggctgtgcgtgctgagcnagtgctgtgacctgtgtaggtgctgactatgtgctggagtgatgcagtgacctatctggagtgtggacgctgaagcccctgtgggctctggagtgagcccctgcctagccatgatccctctgtgtgagagctgcagccctctctgcatagggtgcccagacgtgcggcggcggcggatcgggcctgcgagccagcaccggggaccaggcgagctgggcaaggtcaagaaggagcagcaggacgtgcgaggcggacgatgacaagttccccgatgtgcatccgcgaaggccgtcagacaggtgactcagtggatacgaactggacgctggtgacccatgcccgatgacgcgatcaacggacgccagcaaaagcaagccgaacgtcaagcggcccatgaacgccttcatggtgtgggactcagtgcagcgcgcaggaagctcgcggaccagtacccgaacctgcacaacgacttgaagctcagcaagacgctgggcaagctctggaaggatgctgacacgaaagtgacacgcgccccttcatcgaagaggctgagcggtccgtatgcagcacaaagaaagacaccggactaccagtacagacccaggcgggcggaaacacagggaaggcagcaatggaaaatgaggagtgccccgggtgtagaggcaagacaggtggaccgccgccatccaggccactacacaaggacaccttggacaccggaccatgaaagggtcccatggagatgggaccacagagacctcacgccaagccgaggcccgaaacagacgagacaagagacgaagcgcagcgacacgagcacagcgacaagacaataggaagaagcgaccacaaagcatagaaggagacgcgaacccgccagagacaaagagagaaggaagaaacagaaggacagagagacccagacacgcg

SEQ ID NO: 654625 - DNA, 1183 bp, Homo sapiens
agcggatcgtccgctcaggcccggggtgccgacgggatgggccggtgtcggggacttcgaactggctaggaagggtccgctattcaccgacgagaccatggagagtggccaatagatataacagaatcacagaatagacgtcaattattggggcgaacagcccacttataaaggccgagagcccctgtaataggacggtgcattcatctgtgccactagggaaatcgtgggtctggtagacagttaggagtttgatagtccaataacctacgaccagacaattcgttgccatgtatggagaagtgctgatacggggtccatgtctgaatccacaggaataggccatgaacacatcactggtccttttgggtatctctcagactgtatcgtgcttgtcgtatgtaacctttccaatgtggaggagtaatagatttgacttgtataggtctcttggctatagcgtcggagtctccggatcagcccaaggctcatagcatgttggattgatatatcgctggaaggtccagagtttaaggattgattagacgatagtacagatgggttagctcttatgtaggtcgcggtattacaatagggctccagaatatgggaacaagtaatcaaatcggaagtctgttgagatattctatactggatggaaaagaacatggtgttagcttgatactataaaattgtatcgagtgaatgacccgacactgaatcaagacaaagagaaaggaagggtgtggcgtaaggggccgggagacttcccgggtggccaggaatacgggtcacatggtacagcttttgatccagagagagggcgagggggacgctgtggaaacggacaccacgccattttgtgggtcccccccgttaaagaccgagaaaagtggggtgaaaataaaagcaaaccgcactgggtgctgcggaacaatcgatccggggacggataccaatgtccatgcacaaactaagaggacataggcagagcattgggtccaaaccgcactcttcaacaaaattgtcccaccaaggaacctgtggcacgaggtattaggacccccagattgccggtgagaacacaccagctgcttttccttccaaggtgcgcgggcactcctgatcttcatagaaggtcactgcacttcaagacacgtaccacctttcacggactaaattg

SEQ ID NO: 654626 - DNA, 103 bp, Homo sapiens
acatagcggtaaattgcaaacaacaacactgccactgccaaagcctgaacatgggccaagtctaattatgtttgagttggaaggtagatctttattgttcggg

SEQ ID NO: 654627 - DNA, 467 bp, Homo sapiens
ccccgtacatgtcgaggctattctaattactccaaaggcagagcctcaagatctcaattgcttttcaagaacttatcttagggttttttttgtttgtttgtttgtttagtttgtttgttttgagacagagttttgctcttgttgcccaggctggaaggcagtggcacgatctcggctcactgcaatctccgttgcccaggctcaagcaatcctcccacctcagcctcccaagcagctgcgactacaggcacgtaccaccacaaccggctaattttggttcgtacgtgtgtgtgtgtgtgtgtgtgtgtgtgtgtgtgtgtgtgtgtgttttgtgtagagacagagtctcgacatgtcgcctagggtgttctcaagctcctgggctcaagtgatcttcccgccttgggctcccaaagtactgagataaaggttagagccacgatatgtgcggggtacgagctcgaatg

SEQ ID NO: 654628 - DNA, 253 bp, Homo sapiens
tgccaccacacccgggtgatttttgtatttttagtagagacggggtttcgccatgttgctcaggctggtctcgaactcccgacctcaagtgacttgctcaccttagcctcccaaagtgctgggattacaggcgtgagccactccacccagcccagattaaatgtttttatttctacctgccatcattggtctttactaagtgaagtgacttctttctttaacaataaatggaattggtatactaagcaaaaaa

SEQ ID NO: 654629 - DNA, 280 bp, Homo sapiens
gcgaggcggcgaagatcaggcggtgatggggaaagcgcctatcaaaagtgcgatcaggcgagacaggagccagccctggaggaatgtacaccccaggtatggtcagcttctagctttatatttgctccataatgacatgaataatgcaagatatctttggaaaagaataccacctgctattctgcaaattctgaacttgggggaatttggtcagtaggacgaatctggcagagagatttccctgggatctatacaaccatccgctcaccagtggtctgag

SEQ ID NO: 654630 - DNA, 392 bp, Homo sapiens
  misc_feature (161)..(161): n is a, c, g, or t
  misc_feature (206)..(206): n is a, c, g, or t
  misc_feature (313)..(313): n is a, c, g, or t
  misc_feature (318)..(318): n is a, c, g, or t
  misc_feature (322)..(322): n is a, c, g, or t
  misc_feature (346)..(346): n is a, c, g, or t
  misc_feature (349)..(349): n is a, c, g, or t
tcagccgcctgccccctcttcctaagcagctttaatgtccccgtgtccccggggtgggagttcaaggctcagtaatggcctggttccccgggccctgccccattttctcatcattcccagcctttatggagaaggaaggggttaaggagggggggtcaaanggagccccctttgggagggaaccaacccccccctccctcctgggnccccccagcagtagacggcttgggggagtcggaggctccccggcagaccccccccccccattttgttcccttgaggtgcctcctttcctctgcccaggggagggagngtggncagnatttggaagttttgggattcaggntgntattaaaataataataataattaaaaactttgaagaaacttga

SEQ ID NO: 654631 - DNA, 550 bp, Homo sapiens
  misc_feature (199)..(199): n is a, c, g, or t
  misc_feature (236)..(236): n is a, c, g, or t
  misc_feature (269)..(269): n is a, c, g, or t
  misc_feature (273)..(273): n is a, c, g, or t
  misc_feature (282)..(282): n is a, c, g, or t
  misc_feature (296)..(296): n is a, c, g, or t
  misc_feature (311)..(311): n is a, c, g, or t
  misc_feature (315)..(315): n is a, c, g, or t
  misc_feature (327)..(327): n is a, c, g, or t
catcttcctatccacagcttgaaaattagccagtatatactgaacatgcactgtataaaaagcacattatggggtgctccagtaggtacagcagtgatcgagacagaatcatagccttcagggaagaggtatatgcaatgttctctccttccaaagattacctagatagagaactgttcataagaaatatcttggtacngtctacattactcttgagatataaaatatatattatntcttacgtctgaaatgagtcagttgtttctaanacantttgtattnaagtattcacattnaaatttgtaaatacngaanagtagagagaanaatcatgaatttttaacatggtaatgattatatcagtttcgttcttggcgtttctttaacttgatgggatagctaatgttttttgtcatagcaaggcgtagctaacttgtcttaaggtagagatgaatgcagcaagattttgtaatatcgaaagccactgtaaaaggatatttgtggtaattgttgtttcccccccaatgattaataaaagactctaaactat

SEQ ID NO: 654632 - DNA, 748 bp, Homo sapiens
  misc_feature (348)..(348): n is a, c, g, or t
gcgcccttttttcttgttttttaagggatttccaagaacgatctaagacagttaaaacacaaactttgttcaaaatatcacccatgtgggggtttagcttgaagtgtcagactatgtaacaactatagctacttggtaaaaaaggtactctcacctaaagccgtaacagtgattcattttttcgttctccaggaaacagagaaagtgctcttggggtcgggctattacatatcaaagagaattttaccttctaaaacgtgatcccagatacagcgagtggcccgttacaacagtttcagtgaccaactattgtaggttcatagtgcagaacaagggcttcattcgtcnttcatagaaactcataagtccaggtgcaggctcatctcgtgggtgaaaggcacgtggagacgctcgagaaccaactttttcaaaaaggcgtctcctcacgtgcaacagggtaactgggggtgtaaccagggggattacacacgaggaatgttggcgactacaattacgcagaccgtttagatcaacgtgaattacccccagtataaaagcagttcacgggcggtggacccagtggaaatccgtatactactccggggggagcatgcactatagcttctacaacaattgttcttagatgcagatcctcctctctctgtgcacacgcgaaaacacgttcccacaaccttgtcacaaattcttggcgaagcgtgaacagatgagcacgggttgtccaaaatcg

SEQ ID NO: 654633 - DNA, 343 bp, Homo sapiens
ttctgactctggtagttagcaattacagaaacttaggaaaatcatgtcgtctctctgagcctcattcccatacttaaaagaatgtagcagaacgtagatgatttctctggttctgttttagctctgcaattctgtcatggaagtgggaaacttgaatgtcaatatggacatttactttctccaaaacctaaatttgtcccttgtctcagtgtctgtcaagtctgaaatgtgagaggtttcttttggtttaaaatattgttatttatttcctaaataacaatgaacttcctcctggattcattccttacataagcatattaaatgcttaggacttgggtcttac

SEQ ID NO: 654634 - DNA, 413 bp, Homo sapiens
aacagcacgctatggtgaaggatcatagccatgcaccccacaatgccagataaccaagtgaaattcaagtttcagtcttccaaccgagtttggaaaaagaccggactacccattattgggaagttctgcacttgccttttgcctgccaatgacagaaaaaaggatggtctgcttacctaaaccagttaacttacaacgcagtgtgactgcttcctgtgacctgaagatagcctgtgtgtcgtttaacctgggcaggacacatctccctgcatttttttttttttttggaaaaaaaggtgtaatagaggaatgtgtgtttccagttatttgtagcccattactactagggagaaaagcaaagctctttcttatttccctcaatatcagctaccctggatagggattgctgtcgg

SEQ ID NO: 654635 - DNA, 678 bp, Homo sapiens
aactatttagaaccgtgtatcatgcttatcagtaacgtagaaaaatagaagcgtgaactctctgtacaactgtagtggactcaaaagaaaatgtatcgttaacagtgcttcacaaagacgaattcatgtgtggaggtacctatataaaaatactatatatctctttaaaacttactatgtacaattgaagcgtacacaagttttacaaagtactggttatgcgggttgtagaaaacacttgcataggacatgaaatcagtttaagaaaaatttctgagcctatagcatagaaggcacttgactttataccagtaacagcacaaccacaacaaacgcagtgttgtagatgatttcccacctctctgaagtacagatgtggtgcatacacagcaaggagagttcaggaacctttatctctcagccaccccatcgaagagcaggacttggtaccgtctgcccatgtaccccagatacagttacatgtaggtacagattgatgaagcctcagagcttatgtgatctcttagacagaactcatataaacccctatttcagcggttttttcagaccctcttgcagtatcttccatagaggcggtcccgagtgggctcctaaagcactgcggctcagctgtgctgcctttaccttggcgcccgcgtgcgggagaacgctccagcg

SEQ ID NO: 654636 - DNA, 584 bp, Homo sapiens
gtaggatgtggcaaattcggagggtaggctatacgacaacgacgttcgaggggggtggacgttttcttctcgctattcctttcgtattgctgtctctgggggtagctgtcagtccctgcgaggggagagaggccaggttgaagtacattagcacgtagtgcagagagtccaagtcagctcttcgggatggttcaattccaaggtgcgtgttgatggaggcgtaccgcgccgtccccgtgaggttcttgttctcacgataggggatgtgctggtgggtgcgtgcatcccggtacttcttggacagcccgaagtcgatgatgtacaccaggttgcccttcttccccaggaccatgaggaagttgtctggcttcacaatcccggtggatgaagttctttgaatgaatgtattcgatgcgactgatcaatttggtcagcaagcagcaggacggttttgaggctgaatttcctggagcagaagttgaagagggtcctccaggcttggccccagcagttccatcaccatgacgttgtagtccccctctgacctgcaccatctgatggtggggattgccactcctccctgc

SEQ ID NO: 654637 - DNA, 457 bp, Homo sapiens
  misc_feature (251)..(251): n is a, c, g, or t
tagaggtagtgtcatcccctcgatcaggtgtattctctgtatgggattgtcactgcagagcccatcatttcacagcgtagcaacagatgaaaactaggctacctactgatggatgtgaggctgctgtctacaggagctcatccaagcctgtttaactgggcagtggcaaggatactcgtcatcgggcattgcactgggggaactcccctcacccatggcttccaacttgaaacccagatttacctccaggnagaggtgagaaaaaaattgtaaatagacttgctaaagagcaactcagggttggggtgtgttttaattctcctgatcacttgaaataatctgtaggctgagtgcttatgggggtgggggagaagggtgactccagggtccttccattttgtgaagctctgggggtggagtgtgggcatctgaggccctatgatggcactacattgag

SEQ ID NO: 654638 - DNA, 587 bp, Homo sapiens
ccctattaaagggaacaagtgattatgctaccttggcagggttagggtaccggggccgtaaaacttgtgtcacggggcagggggggcctctaatatcgggtgatgctaaaggtgatgttttgggtaaacagggggggtaaaattggccgagtttccttttaaccttttttaaaccttttcctttatgagcatgcctgggtgttggggtggacaggtgagggtaataagtgactggtgggtggatggtaaatatggggcgtgtaaatggtcagtcaggtgtttaaatctgacgcaggctatatgcggaggaaaatgtctcagttgtacttatactaccataagttcttctatagggtgactaagatgggcccaattggggtgtagaggagtccagttaatatgtggggaatttttaaggtagtggggtgttgagcttgaaccgctttctaaatggggggctggctttaaggcctactaggggtgtaaatttttaactctctctacaaggttttttcctattgtccaaagagctgttcctcttgggactaacaagtaaatttacaaggggattcagagggttcttgagc

SEQ ID NO: 654639 - DNA, 110 bp, Homo sapiens
gtagtccagatacttgtggaggttgaggcagaaggatcacttcagtcccaggagttcaatgactacatacaatgtgctatgattgtgccactgtactccattgacagagt

SEQ ID NO: 654640 - DNA, 604 bp, Homo sapiens
gtggtttctcctgccactgcctagaatagttgatctatcaagccagggaatttgcaatacttactcaaatcagtctccctgaagactcaggggtttgaaatttttaagaataacttggtgggtaggggaccagtgagtcaggagtgttgattggttgggttggagattaaatcatagggagttgaagctgtcctcttgcactgagtcagttcatgggtggggggcacaagaccgaatgagccagtttattaatctgggtggcaccagctgatctatcaggttcagggtctgcaaaatatctcaagcactgatcttaggctttacaaaagtgatgttatccaggagcaatttatggaagttcagaatcttatagcctccagccgcatgactcgtaaaccataatttctaatcttgtggctaatatattagtcctactaaagcagtctagtccccaggcaggaaagggtttgttttgggaaagggctgttatcatctttgtttcaaactacaaactaagttcccccaaaagttagttcagcctatgcccatgagtgaacaagaagagcttggagttagaagcaggatggagtcagtttgtttcctt

SEQ ID NO: 654641 - DNA, 1081 bp, Homo sapiens
gaaccggtcatcacaaaggtccctctcatcatgtcccagtgagaggccagcgatggccttcttccgggcataagtaacaccattttctgtggaacatattgttccacttaatcattaccaaatatctggaaaacctgtctaactcagacagcaccaggtgtacaggaagcagcagacaagatcttccagatcacgcagggagaccccgggagccttctggttctcctacatgggcattgctgatgagactcgtgaatgtgcccacatgggcttcttccacattcgtggttgtgcacctcgtcatgtgatggagctcgggtgaattctccctacagtcccaaatcctagagccaaagtgtcctgccagagggctgtctattgtgtcctggttgcccaagggccactccgtgaagcggccatctttggggtaaggaaccatttaccaacgaaggcatggatctagtgtctagaggctcagagccctttggactaggctcgtgagtcatatttacaagacattcacgccaagatgctccaagttgcaatttataccaactttctctgaatcatatggggctaatcacactccattgcttattcctaaacgaatggatctgaatatgacagtgcccattttcccacttggacctggatggcattccatttaggcaagtccaggacttcatttcatattcaacctaacactccatatgttccctcaagataggagcctaatggtcacatacttcaaccgggggcacaacagcgcaataggacagatggcccgcagattttcatcaccaccaccttcaatgggtctggtcaaaagagcacggggaccaggaggaggaggacggggcaaaaacttttcgcaaaggtgctctgcgacaataaagagtggattattccgaacaaaacggctggggccaccaacctgccagtgataggtccgctgtccgaccccccccgcgagaagcttatatcctcaatacaccacacgaacgtctcgtatctgttgtccttttttcttttcttcgtctatttcatatctactattatatcatgctcagcgtggaggaca

SEQ ID NO: 654642 - DNA, 940 bp, Homo sapiens
gaagcttcaggcaccaccactgagcctggcgacagtgtaatcgactatgccgtcttctgtctcgtggggcatcctcctgctgtgcgaggcctgtgctagcctggtccctgttctccctggctggaggatccctcagtggaagatgctggccgatggaagacagatatcgatctcgcactcatgatcctaggtagttcacccaacctttcaacaaagtatcacccccaaacctggttgagttcgactgtctagccttataccgcctcatgactggacatcatccagtcctaacaggaaccaatatcttcttctccccagtgagcatcgttacagcctgttgcaatgtctctccctggtgatcacaggctgacactcatgatgaatatcctgggaggtgcctgtaatttcagacctcacggtagattccggaggctctagatccgattgaagtgtttccagagaactcctccgtaccctcatccagtcagacagccagctcctgctgaccatcgagctatggcctgttcctcagtcgacgggcctgaagctagtggatacgttctgggatggatgttaaaatagttgtggccactcagaaatgccttctactgtctatactttcggtggacacccgaatgaggcccgaggtaaaagcagatcagacggattacgtggtagacagggtattcaggggaaactttgtggtatttgggtcaagtacgcttgacagagacgccacgtttgtgctctgggtgaagttaccgatcttctttagaaaggcaagtggtgagaagacctttgaaggtcaaggcctccgaggacagaggaacttccacgtggacccaggtgaccaccgggaagggtgctatgatgaacgcgtttaggctggttaaccttcagcactgtaacgagctgtccagctgggtgctgctgataacta

SEQ ID NO: 654643 - DNA, 602 bp, Homo sapiens
ggccgggcgcggtggctcacgcctgtaatcccagctctcagggaggctaagaggcgggaggatagcttgagcccaggagttcgagacctgcctgggcaatatagcgagaccccgttctccagaaaaagcaaaaaaaaaaaaaaaaaaaaaaaaaaacaatggtgtgggcgcgcgcgcccgggcgcccccgggaagaagtttctttaaacaccaatcgcggtggggcgcgcgcgcggggcgcccaagaagaggcaaaggggaacaagtgggccacaaacgggtggtccctaaggggaaaacccggggcacagagaccaagggcgggggaatccccacccaatacataaaaaccgccccggggggcacaacgagagggttcgtgtgaaaccacactcccgagaatgggggttctcggagggtctcatatagcggggcgatcattattacacggagggggagtctcaagagaggagacctggcgaaatatctaacaattaagcgccccgggacggggggggatccccgaacgcgcatttctccctgcaccgacacaactacatcgcagacacgacctaccgctcaattaaccacgataacacccg

SEQ ID NO: 654644 - DNA, 102 bp, Homo sapiens
cgaaatctggcagactgtcgccagagcatcttatcgggaaatattcccccgtcatctccttccttcaattctccacattctgcaaggaacgcacaataatag

SEQ ID NO: 654645 - DNA, 378 bp, Homo sapiens
acagatcctgcaggatcccctcttctccgaaaggcacatatttactggggaaaacaggagagcaagcccagagcagggggcatcatggatgaggaaatgatggcagatgactgtgcacctgcctctgtgacccctactctgtcagggtggatccccagaagaatgcccagacactttcctcacttcgggaactggatcggccttagcctgctgcgcctctctgcacgcctgcagagaatgaggtctctctcacaccctccttgccgtgcatcggggtgggatatataacaagccgaggtggtctgtgtggggaagggtacgatggcgcagatatcctttacatgcttccttacatcttgggcgggcggagatgtgaga

SEQ ID NO: 654646 - DNA, 380 bp, Homo sapiens
cacaccactcatctgcattgaaactctagaagtcaaccggacatggtggctatgcctatatcccagcattttgggatgccaaggcgggtggatcacctgaggtcaggagttcaagaccagcctggccaacatggcgaaaccccgtctctaatacaaatacaaaaattagccaagcatggtggtcactgtactccagcctgggtgacagagcaagactccgtctcaaaaaaaaaaaagagaaagaaagtgtcatgcttttctgcattctgtgattggtttaagtgagttatcgaacttgagggcttggtgggaccctccaaatttggcagccagtttggtgagaagtacttgtggtctgaggacacccaagcctgcaggtg

SEQ ID NO: 654647 - DNA, 687 bp, Homo sapiens
  misc_feature (1)..(1): n is a, c, g, or t
  misc_feature (160)..(160): n is a, c, g, or t
  misc_feature (272)..(272): n is a, c, g, or t
nctataaaaatcttagagaaaacttaggaataccccttcccgacaatggcctttgccgagaaatttatgggctaaggcctcaaaagcattcccaccaaaaaccaaagcttgacaagtgggacctaattaaactaaaaagcttcagcacagcaaaagaacntatcaccagaataaacagccaccctacagaatgggagaagatatttacaaactctgtatatgacaaagttccaatatccagaatctgtaaggaacttattttgacaagcaanaaccaaataactccattaaaaggtgggcaaaggatatgaacagacatttcccaaaagaagaagacaaacaaatagccaatgaacatatgaagaaatgctcaacattactaattatcagagaaatgcaaatcaaaaccacaatgagataccatctcacactagtagaaatagcgataattaaaaagtaaaaacaaacaacaaacaaaaaacagatgcttccagcctgggcaacgtaactgggaccccatctctacaaaataaaaaaaaaattagccacgcgtggtggtgcacacctgtagtcccagttacttgggaggctgaggtaggaggattgcttgagcctagaaggtcaaagttgcagtgagccatgattgcaccactgcactccagcctggatgagagagcaagaccctgt

SEQ ID NO: 654648 - DNA, 318 bp, Homo sapiens
gccgggtactgcacttgacatacactcattctcctggtagaggcggagtgagggtgctgttggccatgtggcaccaacgtcccggtaccccacctgctggaacctggtgaatggcactgtggtgccacttgccgagattacaggctatgcccctcttcagacccggacgagaactcctcttggttctgatcgaagggtacgaggtgtattctcaccatccggaagccggactactatgcgaagatccctcgggttccgccgcatccggggcgagagtgagctgtacaccagcttatactgtcatgcacaacccacagt

SEQ ID NO: 654649 - DNA, 149 bp, Homo sapiens
  misc_feature (63)..(63): n is a, c, g, or t
  misc_feature (103)..(103): n is a, c, g, or t
  misc_feature (136)..(136): n is a, c, g, or t
taatttcgtaaatgccgcgtgcaaacgtggcatccgtgcgccagaatttgtacaatgcagcgnccccggacgagcagccgctcaccggggcgtttcttttttnaaccctccaggggccattaacgtgtaataacgnggccggaatagca

SEQ ID NO: 654650 - DNA, 1162 bp, Homo sapiens
  misc_feature (1161)..(1161): n is a, c, g, or t
agcgggttgatcctccccgaaggttccggcagccaagattgcaggttcccaccaagcattgtttccgaactgggccacgagagcgtgtccctgattggcttgctctggaggctgggaagggacctgttagagactgggaccactttctgaagcgcgaggcaggaagttatatgctttttctggagtcctgtagagaaagtgctctctgccgcattgatagcagcgagagctggaggtgttgggtcgggagaccagccgttcgatcccgccgcaggtaggagctggtttccatcctggcaccacggcacacacctccagcctcgagcccggcgctgctgcccgggggtctccttcaggctctttgacgccgttccagggggcacctatccaggcatcctctgggcctctagccagaggactggctcccggcttcagcactccgggctgcagtaagaagtgcccttatcgctctgagccctgccaccatcccgtgaaccaccgaaaccctggtccagcgcgacagccttggacctgggactggacggatccaaaacgctcagcctcggccccccacagacggggctctgcatcgtctctgatatgtcacccaccatctcccacaaggacagcagccggcaacggcggccagggaatttcagtcactctctggatatgaagagcggtcccctgccgccaggcggttgggatgacagtcatttggactcagcgggccgggaaggggacagagaagctcttctgggggataccggcactggcgacttcttaaaagccccacagagcttccgggccgaactaagcagcattttgctactactctttctttacgtgcttcagggtattcccctgggcttggcgggaagcatcccactcattttgcaaagcaaaaatgttagctatacagaccaagctttcttcagttttgtcttttggcccttcagtctcaaattactctgggccccgttggttgatgcggtctacgttaagaacttcggtcgtcgcaaatcttggcttgtcccgacacagtatatactaggactcttcatgatctatttatccactcaggtggaccgtttgcttgggaataccgatacagacaccgacgtgattgctctcactgtggcgttctttttgtttgaatcnt

SEQ ID NO: 654651 - DNA, 1108 bp, Homo sapiens
  misc_feature (1107)..(1107): n is a, c, g, or t
agcgggttgatcctccccgaaggttccggcagccaagattgcaggttcccaccaagcattgtttccgaactgggccacgagagcgtgtccctgattggcttgctctggaggctgggaagggacctgttagagactgggaccactttctgaagcgcgaggcaggaagttatatgctttttctggagtcctgtagagaaagtgctctctgccgcattgatagcagcgagagctggaggtgttgggtcgggagaccagccgttcgatcccgccgcaggtaggagctggtttccatcctggcaccacggcacacacctccagcctcgagcccggcgctgctgcccgggggtctccttcaggctctttgacgccgttccagggggcacctatccaggcatcctctgggcctctagccagaggactggctcccggcttcagcactccgggctgcagtaagaagtgcccttatcgctctgagccctgccaccatcccgtgaaccaccgaaaccctggtccagcgcgacagccttggacctgggactggacggatccaaaacgctcagcctcggccccccacagacggggctctgcatcgtctctgatatgtcacccaccatctcccacaaggacagcagccggcaacggcggccagggaatttcagtcactctctggatatgaagagcggtcccctgccgccaggcggttgggatgacagtcatttggactcagcgggccgggaaggggacagagaagctcttctgggggataccggcactggcgacttctttctttacgtgcttcagggtattcccctgggcttggcgggaagcatcccactcattttgcaaagcaaaaatgttagctatacagaccaagctttcttcagttttgtcttttggcccttcagtctcaaattactctgggccccgttggttgatgcggtctacgttaagaacttcggtcgtcgcaaatcttggcttgtcccgacacagtatatactaggactcttcatgatctatttatccactcaggtggaccgtttgcttgggaataccgatacagacaccgacgtgattgctctcactgtggcgttctttttgtttgaatcnt

SEQ ID NO: 654652 - DNA, 421 bp, Homo sapiens
  misc_feature (223)..(223): n is a, c, g, or t
cccccccccccccccccacccattgtggctttttggtttttaaagggcaaaccgggaagaggggtttttttggttgggggtttggttttggttttggtttttcccagaaaaagaaaggcccaaggaataaggtgggacccggcccctgggggccccccaaataaaggaaaaaactccccttctgggggcccagccccaaccagggggcggccccggcccaggnttttttttttttttttttaaattttaaaaaagggacccccggggggggttagggggcccttaaaaaccccctttcccccccacggtggggccccaagggtggcccaaccttgggggccccggccgggtttgcctttcaaccgggaaaaagccattgggttgggccggtccagggaaaaacccccccccccttttttta

SEQ ID NO: 654653 - DNA, 493 bp, Homo sapiens
gttttacacgtatgtttttctcagacgggagataaaaatgccgagttagttaacgtgggtcatgtgtaaaatccgcccacttgctcgtgattatagtgggcagtagagatgatgacacagtcaatttccatccagccgtgtatcctcatggcgcaagctgcctgtctgactcaggatggcaagctggcagtctgggaggagcatgtttagcacagatgttttgttaggtccacttggtgaggagtgcagacagggctgcctctctctagtcgggagagtctgtgccattccctcgggccctgcacctagcctcattcacatcacttgcccctgtcgagacctacgtttgcaccctttgatagacaccatgttcgctactctgacaggctcagtgtcaggagcacgcgcctgagggcgactgaagacctgattctcttgttccctgttagtataacaccttcaaacttcagatgaagccaatgtccctgctgaa

SEQ ID NO: 654654 - DNA, 335 bp, Homo sapiens
gtaaaagtcaaaagaaacaaacataattttatgttgtcgttttataaatatatttaaactttgagacggagtctcactctttcgcccaggctggagtgcaatggcgtgatctcagctcactgcaagctctgcctcccgggtccatgccattctcctgcctcagcctcctgagtagctgggattacaggcacccaccaccatgcctggctaagtttttttattatttatttttagtagagatggagtttccccatgttggccaggctggtcttgaactcctgacctcaagtgattcgcccgtcttggcctcccaaagtgcagggattacaggtgag

SEQ ID NO: 654655 - DNA, 368 bp, Homo sapiens
  misc_feature (24)..(24): n is a, c, g, or t
  misc_feature (31)..(32): n is a, c, g, or t
  misc_feature (35)..(37): n is a, c, g, or t
  misc_feature (39)..(39): n is a, c, g, or t
  misc_feature (84)..(84): n is a, c, g, or t
  misc_feature (100)..(103): n is a, c, g, or t
  misc_feature (115)..(115): n is a, c, g, or t
  misc_feature (209)..(209): n is a, c, g, or t
  misc_feature (211)..(211): n is a, c, g, or t
  misc_feature (213)..(213): n is a, c, g, or t
  misc_feature (215)..(215): n is a, c, g, or t
  misc_feature (222)..(222): n is a, c, g, or t
  misc_feature (229)..(229): n is a, c, g, or t
  misc_feature (298)..(298): n is a, c, g, or t
  misc_feature (311)..(311): n is a, c, g, or t
  misc_feature (342)..(342): n is a, c, g, or t
  misc_feature (356)..(356): n is a, c, g, or t
taaaaatatacagttttaataganatattannatnnncnttacacttcctctcattgcagaaaccatgaaagaatatgcctttngtaatcaaagtaattnnnnatcatgcaaaanagtattttgttatgacattcgtaagtggagactgtatttcaaaacaagtttatacagacttcaaaaggtctaaagtcaaagtgaaatatatttnantntnactagtnacatctnatgcagctggcatactcatattcacagtttataaagtaaaaccactaaactcttcatgtcggctctganatagatgcatttncattcatacattcgctagttaggtctgttcntctaagggggaagncgggatatatgg

SEQ ID NO: 654656 - DNA, 624 bp, Homo sapiens
  misc_feature (468)..(468): n is a, c, g, or t
  misc_feature (493)..(493): n is a, c, g, or t
  misc_feature (503)..(503): n is a, c, g, or t
  misc_feature (514)..(514): n is a, c, g, or t
  misc_feature (588)..(588): n is a, c, g, or t
  misc_feature (602)..(602): n is a, c, g, or t
  misc_feature (613)..(613): n is a, c, g, or t
agcggggaacaatcacttgcagcaggaggtgtaggtgcagtgagctgagatcacaccactgcactccagcctaggtgatagagcaagaccctgtctcaaaaaaataaaacaaaactaccagaccttgaatcctaatttcttagggttatcaccagaaggaacattggctgcttgtcaataccaccataggtggtagaggcaggaagttgtaactagagatgtctttatcatggtctcagttactataaccatttggatcttagtttccttatatgttgagcaagaagattagcctggagaatctccaaaatccttctaactataacattcttcaattttattttaaaacggtgagattttgtttggtctgagaaaatctcgctgttttagactgaggcagtgtgttatgatagagagcactaaacagagagtgagaagacctaaattttagtcccatgtcctgtcatnatcatgcatagtgactctgggcttnccttatctgnaaaatgatatnggaccgtgatggtgatctatgtttaaggatcccctccaactttaagtgattacattatagacagaatgtgtttngtctttccattganagcgtatctgngtgatctttca

SEQ ID NO: 654657 - DNA, 722 bp, Homo sapiens
  misc_feature (583)..(583): n is a, c, g, or t
  misc_feature (619)..(620): n is a, c, g, or t
  misc_feature (680)..(680): n is a, c, g, or t
  misc_feature (714)..(714): n is a, c, g, or t
  misc_feature (722)..(722): n is a, c, g, or t
gcaccagcagagacagagagaaacaaaaaacagagggatgcacagaaaacaaaatggcatacttaagccttaaaatagggacagttattgtaaataaaaatggtttaaatataccaattaaaaagagattagatcaccaagaaatgatagatgtttaaggtgatggatctgtgaattacccaaacatgtatacatgtatacccaatgtatacatgtttcaatatatgttaccattatacaatgtatacatgtattgaaacatcacagtgtaccccataaacatgtataattattatgtgttaattataaaaaaatttttttaaatacttggcaaaaaaacagattggcagtatgaattttcaaaaaatccaatgtatactatctacaagaaatttacatcatagtacttcctgtactatattgaatagaagtggagagagtgggaatctttaccttgcactggatcttacaggaaaagtttttcatttttccccattgattatgatattaattgtgggtttttcataaatgacctttattttgctgagaaactttccttttatacttaaactgttcagcattnttatcaaggaagggatgtgaactttgtcaaatgctnnttctgtgtaaaatgagatgattttgggtgctttttatctttaatctggttgtatcacatngattcatatgcatactttcaggcttgcatgccanggattccn

SEQ ID NO: 654658 - DNA, 321 bp, Homo sapiens
  misc_feature (53)..(53): n is a, c, g, or t
  misc_feature (91)..(91): n is a, c, g, or t
tagaaaaaatacttttcaattacattaggaaaggcacggtggctcatgccctntgatgctagcagtttgggagcccaaggcaggtggattncttgagccccaggaattttagatcagcccagacaacatggagaaatcctgtctctacaaaggaatacaagggttagctggacatggtggtgcacatgtgtggtcccgactaatgaggtggctgaggcaagagctcatttgagccaaggaggtcaagactgcagtgggctaagatcgtgcatctggactccagcctgggtgacagtgagaccctgtctgaaccaaaaaaaa

SEQ ID NO: 654659 - DNA, 571 bp, Homo sapiens
ataggacctcaagttgtcaaaaaagcagggggttatttaatcgaacggccagtactatacggtctaggtacgaggctggtgcgatcaggagctctcagaacttcagccagtctagaagacacacaaacaagacagcaaggaacaacagaggaactttgctagggcactgcaggcagtgccaagggaagaggacacggaggcaaaagaacggacagcctcctccacgaggaaatgagggcccaggagacaagcaggagaaggcaacccagcgacgtcgcatggccgggagcggcgggtggcctccagggtgtcttataagaggagagtgggagtgatgaggctggcagcggtctgattttgagctctccagtggagaagcctctgatccctctgatgaggattccgaacctggccctccaaagcagaggaaagcccccgtcctcaaggacaaaggctgggtccaagagtgcctccaggacccatcgtgggagccatcgtaaggacccaagcttgccagggatcctcaagctcttcaagcagtaaagaggcaaaaatgtgcaggatggtgaaa

SEQ ID NO: 654660 - DNA, 191 bp, Homo sapiens
actttcgcctacccggagaggcccagaaaattgaccagatgatggaggccttcacccagcaatactgcctatgcaaccctggagcttttcaatccacagacacacgctatgcactgtccttcgccatcataacgctcaacaccaatttctacaaccaaaaagccagagacaaacctgacctaaagcgctcc

SEQ ID NO: 654661 - DNA, 471 bp, Homo sapiens
ctatgatccctgttgagagagcatgctgctgtgggcgctgcgctgtggaaggaccttgcatgcttaatgctgacttggaggattgaccaacagggtctatgcccttggcggttgacagggtcccagatggaggactactaccagatctttggcttacggaaggagtatgccatgctttgcgctttgggccgaatcgtctgaacaggctgggccatggaagagatgcgctgcatgagctcgtggcctaccagcagatgcagcctgtgatggtggtccaggcttagggaacaggagtgcagacttcagcctcactctggcaggggctggctgccgaggttgggcccaggccctgagggtctgctctgctacgggtctgcccttgagtggccttccgtggagggtgtgtgaccaggtggatggtgcagggcctctggagccctctactcaggagcagacctcagccttttctgt

SEQ ID NO: 654662 - DNA, 203 bp, Homo sapiens
  misc_feature (30)..(30): n is a, c, g, or t
ttcctactccattatataataaagcactcnccatttttttgtttgcttgtttatttagtggattcattttccgagacggagtctcgctgccccccaggccggagtgcagtggcgcgatctcggctcactgcaacctctacctcccagctactggagagtctgagacaggggaatcacttgaacctgggaggtagagcatgcag

SEQ ID NO: 654663 - DNA, 298 bp, Homo sapiens
cgtgctcgactctgactcatgatcgctgttcggctccaaagtgtggatacaggcatgagcacgtgctagctaaatggactattttgctcagttggttagttcattatcaattctggatatgaaagctttgtcagatacatggtttgtgaatactttctcccattctgtaggttgtctgttttctaactagatagtttcttctgctatacaaaagctctttagtttaattagatctcaattgtcaatttttgtttttgttgcagttgcttttgaggacttagtcatagagtctttccca

SEQ ID NO: 654664 - DNA, 195 bp, Homo sapiens
acttaatccccacttggtatcatcacccgatgaggcacacagcagaacgcctgaacgcaggccatacttccgatgtctacaccctagatagctcccttacccctactcatcgcactaatttacactcacaacaccctaggcccactaaacattctactactcactctcactgcccgtgtaactatctccgcctta

SEQ ID NO: 654665 - DNA, 207 bp, Homo sapiens
tctttgacccacatgtgagagatacaaatatagacacaaatgtgaacttatcaggaaagaactgtaaacttttattttatgacaggaaacagataaaatgtttcccatttctcaactaagaaaaataagttagtgctgacttagccagctgttactaatactcctttgatactttaagaaaatttagtcactggattagatacattg

SEQ ID NO: 654666 - DNA, 159 bp, Homo sapiens
atgttatagcagaagctctgaaggagagggccaagctcgtggacagagactgacaacgatggggaatgatcctaccatgacggcggatgacgatatgtgcaccaggatctacgtccgcagagtgagtggccacaggtagaaccgcggccgcataccacc

SEQ ID NO: 654667 - DNA, 936 bp, Homo sapiens
ctcgatactatcgcgccgtgcgcggtctgttcaatgttgtgagagccctttgcgcataaatggtgccgccactttcttgattggcgaatttctccccgacgccgtgatattccgggtgccgggcgcccgtaagtggggacttaccccggggatactaatggttcccgcgcgcggccgaacaatttttcccgggtgccgagcaggctccaaggtgccatagtttgaaagcgctactttggggatggccccacatttcatcagagatgcgcccaacagaagcgttctccacgttcgccacgcggggattttgggtgtcgccggtccccaagttgagatgcaaaaataggcggtttccacaatgtggggcagccccttaaaggggaatgccctttaaaatggggcaaacgtgtaattaaggacaccccctaggggttgtgttgaaaagaccccgtttccgagcacacttgtaataagaaagagaactgtcggggatgaaaaaaaatactccccgcgggtcccccccaacaagcaccacacgtgattgacccaccctacaattaggagtgtgttttttggaacccgcagtacgtttccacccccacttattgatccacgctacgaagaaaacctttaaacctttggggcaccattcctacatgcattaactctctctaccatacttcatcaacctaacattccagaccctcatacatcttgtttacaactcataccaagactcattttcacaacaacgacatcaactctcccccacgtccccccccacctctcattttttctatcttcaaacgacatctcatgagagtagccgcgcagcctcccccctctcccccctcctcgaaaacaagtatctcccatccacaaggactactcggacaacgaacaaacccctggtaccccaaacaaatgtcccgacaa

SEQ ID NO: 654668 - DNA, 163 bp, Homo sapiens
cggcgtgataaccgccaagctcgccagctcataggcctgtacgttcacctgggcgatgaagttgtcaccgcgatacgtcgtcgtggcctgttgatttacatagtcagcgcttttgacgccgatctggttgctctgcaggtcctggaagtagtacgggtcgctg

SEQ ID NO: 654669 - DNA, 195 bp, Homo sapiens
aagcatcacgcctggacaaattgatgacaatatgcatctgaccgacgctaagggagatctcagaaacccgatggaggcaatgatccacacatatttacttcatttaaaaacctgcgcaaagcttggcggaacgaaagctggtggcttaccatggaagtgaaagaccatcactgttctgaagagggggttttcaaa

SEQ ID NO: 654670 - DNA, 128 bp, Homo sapiens
attgatgactcgctcatcggtggaaatgcctccgctgaaggccccgagggtgaaggtaccgaaagcacagtactcacaggtgtcgatattgtcatgaaccatcacctgcaggacacaagtttcacaac

SEQ ID NO: 654671 - DNA, 105 bp, Homo sapiens
tgcaccatggtctgtgtgtcatgtgtcacatgtgtggccatgcacacatgtggcccctgcccagtgaccatgcccatgcctgggagacggggatgacgggctcca

SEQ ID NO: 654672 - DNA, 135 bp, Homo sapiens
cctttaagggaaaaccccttttttttccggggcccccttttttgttttggggcttttcccttttttttcccccccccggggtttttttttttgaaaggttttcccaaaaatttaaaaaaatttttttttttttga

SEQ ID NO: 654673 - DNA, 862 bp, Homo sapiens
  misc_feature (862)..(862): n is a, c, g, or t
ggcagcacgactcgcgtagccgtgcgccgattgcctctcggctgggcaatggtcccggattgccggtcgacgaccgccccgcgtaatgcggctcctcggctggtggcaatgtattgctgtgggtgctgggacttcccgtccgcgcgggtgaggttgcatgaggaaagtggtcgctgtaagtgtgtcagaggtagctagcctgctcaccctctccaggtgggggctgtgtacctggttgcaggcagggagctcctgcatgagcccgatgggccgggcacagggctgccatgaagaggccaatgcggtgctggcgctgtgacacccaaggtcgatcacagtggtgatgctggtctgtggattcctgggagaagctgacgtgaccagaccgtggcatgttcagagcctagcggcgtcacctgtgagtgctggacggagcgagaaggactcacggtgtcaacgtccgagagagcccttttctctctggaatggcgctggagccaccacttccctgacagagcacgcaggagtattacccaagagcccagaagtggcggaatctggatcggcagccccgacagaggacttccaaataacactgaaagtctgaaaatccccaaaggtgaacttgtgaggagagcaaacattaccggcattagaaaaatttcctctggaacatttccacatatggccacaggaccttttggattttctgaacccaaggtagtgctgtctcttatctggtttaaccccgggggccgttttctgcaattggccctcattaatcttgccggcattccacgcctcatttggcaggtgcttcagcacagcttcacgggggcggagcgcaataatttaacgaggn

SEQ ID NO: 654674 - DNA, 484 bp, Homo sapiens
  misc_feature (5)..(5): n is a, c, g, or t
  misc_feature (70)..(70): n is a, c, g, or t
  misc_feature (102)..(102): n is a, c, g, or t
  misc_feature (105)..(105): n is a, c, g, or t
  misc_feature (117)..(118): n is a, c, g, or t
  misc_feature (144)..(144): n is a, c, g, or t
  misc_feature (165)..(165): n is a, c, g, or t
  misc_feature (203)..(203): n is a, c, g, or t
  misc_feature (213)..(215): n is a, c, g, or t
  misc_feature (330)..(330): n is a, c, g, or t
  misc_feature (339)..(339): n is a, c, g, or t
  misc_feature (352)..(352): n is a, c, g, or t
  misc_feature (363)..(363): n is a, c, g, or t
  misc_feature (378)..(378): n is a, c, g, or t
  misc_feature (381)..(381): n is a, c, g, or t
  misc_feature (477)..(477): n is a, c, g, or t
cagtntaccttgttagtggtaatctttgctttgacaacacatgggaaactagaaacaaatgttataaganggaggacaatctgtcacttttcacaagttatnaanctaaaaataggnncttttaagtgtcagtcaaaatataancagttcttattctctttaatncaatttatgactcagtttttacaaccattttaagactntgagccaaannngagagagaaggaaactttcagacattaactattcatggaatcctaaaaccacacttttacacagattactaactaatcaacatgttacatcactaaaaaaaaaaaaaaattaggnttgtaaganatgaaattgcagnaataaattttntttttaattttcagnagntaaaaaagttttaatactttaactgttaacaaggtcttagttgatatccagttaacctaatactgcattaatgtttttattcttttcttgaaaatnctcaaat

SEQ ID NO: 654675 - DNA, 877 bp, Homo sapiens
  misc_feature (424)..(424): n is a, c, g, or t
tcgacggaaactggacactggacgtctagttcgccatgagactcctcccccgcattgcgtgcatgcttctcttactcgtgttccctgcctctgtcttgttccgaggcggtcccatatgctcgttagcagtggctacaatatcttacagaggatgaagaatcagtcgaagattccataattgaggatgacgatgatgaagccgaggtagaagaagatgaacccacagatttgggtacaagataccagaggacgaagatgtgtctcggtgaaccgtgaagcttcaccgagctgcgagtatacacactcatacgtgttttgtccaaggcagaaagtattttccaggcaaataacgattgtgacagttgcctggtaggtctttaccaacgaaggcgtaccagcaagattctctcatgtgtctgaatcncttccagatgcctcgattctcgttatccgtcaggactcaccagattttatagtccagaaattacacagactcttcctctgtaacactgtacgtgccaccccatgagacaggcaacttttgagtactctttcattcctgcagagcccatgggcggacgaccatttggtttggtcatcaatctgaactacaaatgatttgaacggcaatgtattccaagatgcagtcttcaatcaaacagttacagttatttgcaccgagaggatgggttagatggagaaacaatctttatgtatatgttccttgctggtcttgggcttctggttattggttggccttcatcaactcctagaatctagaaagcgtaagagacccatacagaaagtagaaactgggtccctccagctccgactgactgttgacctgccgttgggattcctcaggaaactttgaatc

SEQ ID NO: 654676 - DNA, 286 bp, Homo sapiens
tataatctagcaggctccatctatacacgatataatggagagtcagacacgatactcacatatcgacaagaacttgtacagggaggcatagcaccgcagtaggtgaatacacctcgaccaggctccatcttaacgatctctggaggtcaacacggaacacacgtaataccacagaacatgcacagggaggcatgcaacgcacgatggtgaatacacgtcgaaccagacaaggacaatgcaatgcatgaatcgagatactagaaggaatcctactagaagtcgacca

SEQ ID NO: 654677 - DNA, 1102 bp, Homo sapiens
gcctcttcgagcactgccccgtagaagaatgccgaagtgtacctggaacgggctgggctccaatcaaggtggagccggactcgccttctcgcgcaggagcagttcgggtcacgcagggaatggaatgcctagtggaggtctgtacccgcagttcactactgtttgtccacaggtccaaggctaggagacagccgacgggtagcccagtgacgagcagatgactctagtgcaggtcacggggaatttctattgggaaagtggggggctcatgacacagaatctgagttaccgaggccacttcaaacgtacgccgaaggaaatggacacagcgagaagaggatgcgagggaggcaactgctcggagcctcacacgttcttacttcagatgacaatggataggagaaggaaggagtccaatactggagtccgttcccgcatgttctcattggctacgtcccagaaagcagtttggtctggtcgtaggagagactctgcgctggtagtccctagctgcgtatggcacggccaggatccgatgctccagtgcagctggggtgcagttgcggggccgcaggggtcggtcctagcgtcgcagtctgggtcgctaggatggagcccctcgcgggcgaagggtgatcctgactctcggtaccgtggaggcccagccatcgcttcgcgtcgcgccattccgtcagctggtggcaaccgtgcggccgtctacgatgcttccagcgagggtggctccctcgtcaatcctggacggtccgctgtgtggaacccgggagggcccaactcaagtgtcccagagaacgccacgtattcaaaccatgcaggggatcctggaatgtgaacgcgtgagacctccggtcctgggcaaggtgcccaagtgccaacagtggtcgtaggatcacgacctttgcccttgacgatcttcatgacctttgaagcctgggggggaagaaacctcactctcgcgttatcccggtgccagaacgaaccaagcgctagtccgttgcgaagaaactttcgggtgaccttgtcatcgcccagatgtctaccctagcggtacaccaggaagtgagtccgggctaatactccttgc

SEQ ID NO: 654678 - DNA, 158 bp, Homo sapiens
tgacgttgattaaggttttccccatcccctcaatctagacggggagcccctgcgcatcaactagctcccttggccaggagcgagcgaagctgtggcctttgtgaagctagcctcctcttctcccctcacactacagccctagtgggggagaagggggt

SEQ ID NO: 654679 - DNA, 109 bp, Homo sapiens
gtgtcaaatggccggacatcccagacacgaggggtattgtccattgcattggacaaaagataagagccttcagaacttaaactcaggccagtcactgaatctgcatggc

SEQ ID NO: 654680 - DNA, 198 bp, Homo sapiens
ttattgtctatgaatggttattaacaagtctatataaggttaggattccaattctaaagtggtcacttggagagcctgtcagggttcaggttgtatgtcatgtaacgaggagtagcactgaattgggcataagacttaatgaccttatttacagcttccaagaaatccttctcggtagcaattttacgccgtgctctg

SEQ ID NO: 654681 - DNA, 862 bp, Homo sapiens
ccgggggctgcgttggcgtctgtgggtttgtcttcgtccttctgtgtcgtgtgtgccgcggttcgccggttggggggtgccacgcgggtgccaccgtgccggactgtgtgttcgccggtaggcacacgggttgttccgccgcttgtggtcaaaaccgtcggggtgggtggccccccatacttgagaggcttgggcgacaagggcgccccctctggtttggtaaggagtttcgctggctaagcaccccggtctctgaggcgcgtcttgtccacgaggtcgggttcccccacctgggggttggccattccctgttgcgggcgctgaaatgtaacaaccaccatggtatcccgagggcgatgttaagccaaaacgcgctggcaacaccaaaaaaagggtcgccccagggaccagtgccccacgagacgctcgcccaactttttcgcctcacatagatcctcgcagaaatgctcgacaacgagtttctattcactcctctatgatgcctgcccccccccctctattatatccgcagtaggcgtaatcctgccttttatggatggtctgtctatgtgcgaatgcggccctccttaactgtcgatcaattagaaaaccggtcctcaagacagatcacgctggacgcccacgtaggacgccactccgtccatacggaatacggaacaattcgttggaggagacccacgcggtcgtttatcttcttctcttcggtcgggcaccgttctatgcatggaatcagtcatcattacagaccctgaagactttttcctaggtggaattcactcttgggcccccacaaatctctgccccccaggtgtcagcacccctataaaacgcccacataaca

SEQ ID NO: 654682 - DNA, 596 bp, Homo sapiens
  misc_feature (140)..(140): n is a, c, g, or t
  misc_feature (181)..(181): n is a, c, g, or t
  misc_feature (189)..(189): n is a, c, g, or t
  misc_feature (191)..(193): n is a, c, g, or t
  misc_feature (221)..(223): n is a, c, g, or t
  misc_feature (273)..(274): n is a, c, g, or t
gattgtgttaatagggaatgcccgggaaacccagtctcttctaatggttatactaaaaaaagagtctgattacattgtgttttaaccggttttattaagtcacttcacttccaatgaatattcattaaatataccccttntgttctacaaaaaatgaattatctgttacgaacccattttnttatactntnnnattaatataaggaatatattttacaatnnnatgtttctatatttatagattaatatttcagccatttgagttgaaaatannatttttagtcattctcccttactggttgaatcagaagattaaccgtgtctgatttgaacggccttattatgggtatattgaagaatattttggccaagtttaagaggattactattatcaggatggctagcaaacttttctgtttcaatttaagtatataaagaaacttacttactcttagaggctctccacaccccttaaaacaatgaaataattatgtaatttaaatacattttagttttaaacatacaggcatacctcagagatgttgtaagttctgttccagactgctgcaataaagcgaatatcacaaaaaaaaaaa

SEQ ID NO: 654683 - DNA, 181 bp, Homo sapiens
actccccctaccctcggcctcccaaacgtgctgggacttacaggcatgcgccaccacacctggcctaactacgtgcctttacaattgttgtttactaaacacgtccaacttttgttttgggactttcctacataaaatcagtaacacaaaaacaaaaaacaacaaaaaacaacaaaaaaca

SEQ ID NO: 654684 - DNA, 106 bp, Homo sapiens
cctgtcatgtacagggcttcatgtaccgggaaggagagatagggcacaggtacattgaggtgtttaagagcagccaggaggaagttaggtcatactcagatccccc

SEQ ID NO: 654685 - DNA, 2188 bp, Homo sapiens
tgcttaccaggtcttctacccggtgaaccgaatgctctgtcagtctacctcactctgcgtcctacggaccgcggcccgtgtccctcgacaaagccagatgccactccccggagggacccaagccaagcaggaatccacgggagagatggaacaggacgcaaggaagtggacgcggaggcaagagaagaatgggagacgcagcaacggctaaccaggagacatatgagacggacacgaccaaatgcacctagacagaaaatggaggacccggggacgacaccatatcacggcgcggataaggcacaccagggggacacgaacagacatgaagagaacacatggcacaaaagggaggaaaggaatacccagtatacacattaacacacagtgcacgcatagctggaaaccaggaaatcacaaaagaatcggagaggaacccgaccacgagacagcacaaccagccgacaacacacccctaagaacgcactcgaacaaaaaaggaaagcaaccaacggccgtcacatcgggccgcattggcagaggtatcccagcacagggtctcgaacgacttctacccagaaacagtggaaaagtgggagtgaaaataacgacgtttgctcagaaacaagaattgaacatcaacgtagtggacacccaaactatctccgcagacagcattaactatccccacaatgaacaatgtcgacaacagtggatgcacagtgtgattacatacaagaacacatcacagaaggaacagggaatagactaccatggaggtacgaacaggcacagcggctcagcagtgcaagcacatatatagccatagtacgcttggccgaaccagccactgtgggcgcaattcacatctctgtactaatgagtaacacagaccaatctctacagacatggcggccctacctgacgtcggggggacgatcgtttatccggcagtttcaacaatgtaatgtctgcccatccattcagtgcatattactgacaaaaggaaaacctaaggagagagcaactagcccccacagcatggtcttgcgctgaccctatcacatgtgcgcacacccggattatcattgttacagacacaacgctgtacatggtggcttatgccctaactgaagcacaacgcgtacatactctcgttttctcttcttatccactcacatatcattctgtgttcacacacgacaatccagaacaaaacagcacgatcagaaaatcaacatacaagcagacgaacaaaacacacaacaaccaaaaccacaagcaagacaacacacaaccagacctcaacaagcatcagtaaacacaacaatacaaaacaaacaaaacaatagaaccaacaacatgaacacaacaaaataaatacataaacacgagcacagcacaacggagaggaaccagaagcgacaggaagagaagcgccacgagagcacacacacaacagagaaacaagacggcgaaagagagagaagaagacgcagacacgagcgagcacgccgagagaggaagaaggaaggcgacgagaacgaaagaaagcgcgagaagagcacacagacgaaccacagaagaacgaagaagaacaagaagcaggaaaacagcgaagaacaagagaggcacgacgcgaagcagagaacgacgacaagccgcacgcgacaacagaaaaccaagagaagagacaagagagaccaaagagaggcaaggacagaaacagcagcagacaagaaagagcagagcagcaaagagaaagacagggagacgggggaacgcacagcaccaggacgacacgccgcacgagcgcagccacgaagacagcaagcaggcgagcacgggggacgccagacgcagaaaccaagaagcacacgaagcagaggcaaaacggcagagcgcagacaccaggaccaacaagccaggacgcagaagacaggaggacggacgccaaagacaggaacagcacgcaagcgagtgtagaggacaagagaacgagcacgcagacgcacagcagaagagcagccggaagagcaaacgagagcgcgacagcacccaacgacgaggacgagcagcaaagccacacagggccaaaaacgcgaagcaccgagcaccgaaccaagcgccgcggagcgcgcacagatccgcacaccaacagcggcacccacaccagccgctcaacgcc

SEQ ID NO: 654686 - DNA, 296 bp, Homo sapiens
tcactttatacttctaaaagctataataatgttattcacagaagcacttcaatctaattgccttagcctctgatctcactttcaataatcctccttattgtaaccgtatcaggggagtgtacgcataataaataggaattttgcaccatttttcttgactgttactttgcattgtcgtgacttggagcaccctgtggtttctgcattagctgtttgcatgtatttagtaggttagaggtgggaactagagatcagagaattgtttatggcagcagagttagcagtaacttgagagg

SEQ ID NO: 654687 - DNA, 145 bp, Homo sapiens
gacccaggtatacactttactctctcccacttcgccgtgcaacgatgaggtaatgaggtcagtggggtaatgaggtggagatcctcatagaagtcgaacctgcattgcatagcaaagctatggcacatggcctgacgattttaca

SEQ ID NO: 654688 - DNA, 354 bp, Homo sapiens
tcaagaggtgaatgtgacactgacactgaggagaaggaaacgtgtttttttgagacggagtctcattctgtcacccaggctggagtgcagtggcacgatctccgctcactgcagcctccacctcccgggttcaagtgattcccctgcctcagcctccccagtggctgggatcacaggtgtgtgccaccacacctggctaatttttgtttattcattcgtgtgttaatggacacaggttgcttccacctcttggctgttgtgaattgtactgctgtgaacatgggtgtacaatgtctgagcccgtgcctccagttcttttggggtgtatagccagaagtggaattgctggatcag

SEQ ID NO: 654689 - DNA, 104 bp, Homo sapiens
actgtaccccagctgtatcttccaaacagctttcagcaacatgaactttcccattagatacatcaatcactcgggctatgggaggtctgaatctttcaacggca

SEQ ID NO: 654690 - DNA, 104 bp, Homo sapiens
tggtccgcttctgcttctgcctgcttctgcttctgccgcttctgttctgctgcttcctgcttctgccgcttcctgcttctgctgcttcctgcttctgcctcccg

SEQ ID NO: 654691 - DNA, 771 bp, Homo sapiens
  misc_feature (88)..(88): n is a, c, g, or t
  misc_feature (93)..(93): n is a, c, g, or t
  misc_feature (128)..(128): n is a, c, g, or t
  misc_feature (139)..(139): n is a, c, g, or t
  misc_feature (142)..(142): n is a, c, g, or t
  misc_feature (145)..(145): n is a, c, g, or t
  misc_feature (147)..(147): n is a, c, g, or t
  misc_feature (152)..(152): n is a, c, g, or t
  misc_feature (202)..(202): n is a, c, g, or t
  misc_feature (238)..(238): n is a, c, g, or t
  misc_feature (246)..(246): n is a, c, g, or t
  misc_feature (258)..(258): n is a, c, g, or t
  misc_feature (281)..(281): n is a, c, g, or t
  misc_feature (290)..(290): n is a, c, g, or t
  misc_feature (295)..(295): n is a, c, g, or t
  misc_feature (300)..(300): n is a, c, g, or t
  misc_feature (320)..(320): n is a, c, g, or t
  misc_feature (327)..(327): n is a, c, g, or t
  misc_feature (341)..(341): n is a, c, g, or t
  misc_feature (355)..(355): n is a, c, g, or t
  misc_feature (417)..(417): n is a, c, g, or t
  misc_feature (463)..(463): n is a, c, g, or t
  misc_feature (477)..(477): n is a, c, g, or t
  misc_feature (479)..(480): n is a, c, g, or t
  misc_feature (599)..(599): n is a, c, g, or t
  misc_feature (606)..(606): n is a, c, g, or t
  misc_feature (610)..(610): n is a, c, g, or t
  misc_feature (612)..(612): n is a, c, g, or t
  misc_feature (616)..(616): n is a, c, g, or t
  misc_feature (625)..(626): n is a, c, g, or t
  misc_feature (631)..(631): n is a, c, g, or t
  misc_feature (699)..(699): n is a, c, g, or t
tcctgttgtttgtttttctaatttgggccttaatttgtttatttgcccatttaagcaactaccagtttctttagtcaacactaacggntttcncttttcagctagtcaacaaagctttttattttttnccttctcttgnggntancnttttngtgttaccgcagactacatttttctttccattgttgtgactgtccacaanttaaccaggttaattttcaaagatactttgggaatnctccccanaacaccaccggntttttttttttttggtttttaanggcttaggntttgngggtngggaacttggttggggcggngcttaancaatttttggcctnttcttgcccttttngttttccaccaaaatgccctatcattttttttttttttggtttactggagggttctgtagtncgggttgcgggaggggaacgtttggtgctttttactttcttttttntcctctgctctttncnnttttttttctggtctgtatgggctattttttcgtggttctactgcatataaagccttttcatcaaagcattaacaatgaataaaataacatgattacatttaaacaacgctgaccattnccccccntttncntttnttgtttgtnnggggngttgacacttagtaagtacagaatgtaatgtcagcctgcaacttcatttttataaaggctaaaacttntttatatgggatattgttctatatactacgcgccaatctatattttaagtcctgtagttaggtatttataag

SEQ ID NO: 654692 - DNA, 630 bp, Homo sapiens
atgccccctgtggaggagctggatgtcatgttcagtgaactggtggatgaactggacctcacagacaaacacagagaagccatgtttgcacttccagctgagaaaaaatggcaaatatactgtagcaagaaaaaggaccaggaagaaaacaacgggagctacaacgctctgcgccctgcaattctacattgactcagctcaattccatggcatgcctagacacaactcctctgactgcgctttagcagcaaggaagaagacagcacagacagcacgtacaaactactagagcagctttaaagacacgcactagaggacaaacaccaatgaggtatatagtaaccagattcatcgacttggatggcctatcatgtatcctcaactttctaaagaccatggactacgagacctcagagctctcgaatacatacttctctcattggctgtatacacacgcgttcctgcaacaactctcacaggccgcggctcacgtcctggctcattctgcagagtatcaactgtacattgctcagtagtctgagcacagagcaacatctactacgaagcgtggccgtgctggacatcttgggcgccgctgtgcctggttcccgcggggccaccagaacggtc

SEQ ID NO: 654693 - DNA, 123 bp, Homo sapiens
cccgcgcacagttgggcacaagtcacatggcaactgagcaagctgctggaatgcagactaaacgaagatctaacaccagaaaaccaccaaaattagatgacatgctcaagcagatggcacgtt

SEQ ID NO: 654694 - DNA, 880 bp, Homo sapiens
  misc_feature (522)..(522): n is a, c, g, or t
aaactcctctaaaggaaatggtacatttttggaaatttatccttatccctcttgcagctaatgggctcttaccaagtttaaacacaaaatttatcataacaaaaatactactaatataactactgtttccatgtcccatgatcccctctcttcctccccaccttgaaaaaaatgagttcctatttttctctgggagaggggggggattcgatctagaaccaaattgtagtgtgtcccatataaaatttgttgcatatggcattttctaacttaggaagccacaatgttctgtggcccatcatgacattgggtagcataactgtaagttggtgctcccaaatcactttgggttagaagaatttctgtgatactcttatagcctgccttcaattttgatccctttattcttctatttgtcagcgtgcacaagattaccttcctgttttagccttctgttcttgtcaccaaccattcttacttggtgggccatgtacttggaaaaaggccgcatgatctttctgnctccactcagtgtctaaggccaccctgcttccttgtgttggttccccacagatatctcctcatcctatttactgcaggcacaatctctcttagttgatgagacttgtgtttattccttaaaacctacctattctgatgtctgccattgctgcttaaaatcttcctcttcttctccttaaactaaatatgtgggaagtataccagggccttaaaattctccggttggaaaacaaaatgcttaaaggtttttaagagcacaaaggaagttttgtttgcccgtgccaattgggggaaaaaaaaaggggcgggtaacgggggggttttcctgtagtactccactcatcccccacctctcgcg

SEQ ID NO: 654695 - DNA, 1314 bp, Homo sapiens
catgctccttaagagtcatcaccactccctaatctcaagtacccagggacacaaaaactgcggaaggccacagggacctctgcctaggaaagccagggtgaaggtacgctcgagcgtggtcatatgaggacaagtcgacgagagatcccgaggacgtctacagtcagccttacgacatttgaagttctacaatgcacccatcggagcatgcaaagaaaagcacctccgcggagcacggagacaccgacaatcgagcaccgtagactcacaagatgaagcaaacatggtgacatcagaacagctgaagttgccatccaccaagaaggcagagccgcgcgactcgggcaacaactaaagcaagctgacgcagtgtagctacgacacaatatctagagcaacacaagggtgaccacaaaccccgagagcagtatgctgcatgccaccatcagctgactcgcatacaccgagtgctctgcagagagtaacccaaccaagctccgagagcagaccaccgagccaccgagcaacgggccacgactgacgagcgcaggtcaccgccgcactacagacaaagcgggccccaaccgcgcgcacgaccaaagcaccgcagaacgactcaacatcgcacaccgcgtgaccaagagctcacacagccaacgccacaccctacggagcacccgccaccgcacgccctggcactcacgccccccaacctccccgccgacgcaccaccccagccccaccccactcccccgaaccaccaaaaccacccgggccaccaccgcacccacatgcctccacgaggccaagacgccagctcaccaggccaaacacggaccggcgcacaacagccgccacgccaagacaccaaagaactcaacaggcccacagccacccaaccaccgtcaacaccaccacaccaaccaccaccacaaccaacagccccaaccaacccgcccagacataccgcacggacaccactcgccagcgagccaagcaagtcacatggaacgagactcacacacagagaccaccgcaacaacgcgtacggcggatcccaccactacacatcctcgcgcaacccatccacggttctggtctagaactccatcacaccagagaagagcagcaaacagagcgaaaacgaagcacgaccacacatagaaaaatagaggaggaaaccggagacgaaacgacatagacacaaatcctaagagagaatacacaacacacaatcgacaaacataacgagaaagccagcagaaactgcacacacacgtgaactcgcgacgactcacactgacaacaccccca

SEQ ID NO: 654696 - DNA, 112 bp, Homo sapiens
actcttgagtatcccccagaatcatggtgaccacacgaggggctcgggaaggggtacgctgtgtccgtcgagacaccaggatgcccaccaccggcgcccggtgcatcagctg

SEQ ID NO: 654697 - DNA, 270 bp, Homo sapiens
gctcgactcattttgtttgttatgaaataaaatcatatagcatgtactcctcccgcctcagcctcccgagtagctgggattacaggcatgcgtcaccaagcccagctaatttttgtatttttagtggagacagggtttctctgtgttgtccaggctggtctcaaactcctgacatcaggtgatccgcccaggctcccaaagtgctgggattgcaggcgtgacaccgcacctggcccaagaaaacgtcctttaaaaatgtagtcgacgcgg

SEQ ID NO: 654698 - DNA, 820 bp, Homo sapiens
gcaactgtgatattcatcatcgacaaaatgtctgtctttgtgtctggaagtttgttagaacaggaaagaaggggaaaagagattaattagcgtctgaggctggtaagctggtgaagacccgaataaatgaactccttttagtttattacaacaagaagaggttgtgatatcaagagattcgctttcttcgttgttgacaaatactatgtttcaaaaatcttaccattgtcgaaggtcaagaatttggtttaggtaagcctgtttaaacccgattaagcaaatatattttaagtgctcaaggggagagaaagagtatgaggggaaaaaacaaacaagtgatagtagaagaccatagtgcaggtatagtatggacacagtgtatatgaggctgtatagttgaaactgatattggtgtaccgaatttcgacaggggttaccatgagaagataaaagtttaactaagactttagcgtagcatgtcaacacattggtacatgtgaaacagagaagcattaagaagtcgcagtgagctagtatcaagtacgtgtgtatggaagatactcagcatacttgggatccagtgtcatgcaggattgtgtcgggttaacgtgtgcggtaaggacgggaaacagcttcagttaaccgtggaattccacatcgggcacgcaacgcccacccgccaccacactcccagcacacaactgcccactccctgcgcggcgcgccacagggcgacccccgcgagaaaggaggaccagacagaccgggaccctgaggagcacacggcacggggccacgaggcaggcacacaacgcgaacc

SEQ ID NO: 654699 - DNA, 383 bp, Homo sapiens
  misc_feature (296)..(296): n is a, c, g, or t
ctcatccaataagtgttccctccttattaagttttgttcccgaaagtgaagtccatgcctttagaatgatacgcattttctcacccaaagaatcgtgtcttcacacggttctcaatacctgcagcaattcccttaccgtgtctgtagaaattctgaacctgtgaaatggtcatttcaaagcacttggtcttcacttggcttgaatgatctgccactttatagcatcagtgcaagtgtaagaatccttaagagttctgcaagtgtctgagctcacagccataccggtttccactganaatccacaactctggttgtgtcacatcgcacatagcatacagcggcggctctctgcacgcctacatggacagtgtctggcacgtgcg

SEQ ID NO: 654700 - DNA, 126 bp, Homo sapiens
gccaattatagcaccgcgggggtacaggtgccctcttaaggggcagtgacagtctctctcccagcacgcttcttaatcagcatgcgggctgtgacatgcggaaaccaggggcacaggctctgaatt

SEQ ID NO: 654701 - DNA, 207 bp, Homo sapiens
tgcggattatgccacttgggacatgagtacagatccactgccgtcaactcttcttgaatgggacggctccataacctactgaacccgtgagttggccaacgtattaacttatgctgacgtttggcgcctatgacttggtctgctccagaactttatgtccgagagtgaaggcagctggcttgctcctactttcaggaagggatgcac

SEQ ID NO: 654702 - DNA, 195 bp, Homo sapiens
caccacccatcagctacaatctgcttcaccacccataagctacaatcgctctcaccacccataagctaccaatcgctctcaccaccccataaagctacaatccgctctcacccacccataaagctacaattcgtctcatccatcccaaatttagtgcccttgatccaactgttctctcaagtttgcagtgccctc

SEQ ID NO: 654703 - DNA, 367 bp, Homo sapiens
cgtttactctcacaactggttatgcacgtgtcgcacggctacactaccgagcagtggatgacaacctccttaagttccttgtctgatgatcatcaacgtgtagcgcctgagtggtatcttcctatcattcccatggtttcaataaatggtgctgaaggcattggtactggatgggcttgtacactaccaactcatgcatgctagggacaattgtgcacacaggtcagacgcaatgctcagcatggcctggatcctcatcccatgcttccaaactcacaaaaactttaaaggcccgcattcaagcaacttggtcaaacacagtatgcagtccgtggtgcaatattagtagtggcacagcaaccacagt

SEQ ID NO: 654704 - DNA, 341 bp, Homo sapiens
gggaggctgagcctacaatgaaccatggtcatgtcactgcattccagtctgggcgacagagtaagactctatctcaaaaaaaaaaaaaatttcctccggtaaggtggggactgaagaaagaaatagaaacttaactgaacagggaagtagaagtgttggcccaacaaactgacgtgagacagggaagactgctaaaagggaaggaaggaaggattttctggtacttaacattcttcataaatctccggaaacagagtaatataaatggtggagggcatgtctggggggagttcccgggtatagcctttcacgcttggtggacatgggcgtaagggtaccga

SEQ ID NO: 654705 - DNA, 178 bp, Homo sapiens
aaagcccctgatgctggaggctgtattcacgctgacccagacctggggatgccgagtcctacaggatgctaatcgtaagaggcttttatacaacaggaaaggccgatcagaaataatgctgatgagtcagacaacacagcgaggctgttttccagacctcctatgaaaaaaaaaaata

SEQ ID NO: 654706 - DNA, 423 bp, Homo sapiens
gcacgaggccgcacagactgcgcgtgaggaactcgataatagaaaagtagaaaagatattgagcagaattcctcttctcccgcctctcaggaatgacacacatgagagctgtggctcctcggcttatgataactcatattgtgaaccacaacttcaaatcctatgctggggagaaaaatctgggacctttccatataacgcttttcctgtgttatcgggcccaatggcagtggcaaatcccaaggtattgaatctatgccttttgtggttggctatcgagcaccataagaacttagtgacacgggaaggtcattttccaaagataattggttagggaggggatgattatgaaggcatttcttacagtttctatgtgttcacaaccggccgcggagataatacctctgtgtattacatgagggg

SEQ ID NO: 654707 - DNA, 168 bp, Homo sapiens
tgtcattactagaagactacttttccaagactgggcggtaaagtaggcttataaaacaatacagcaaaagaccgccaagtggcctaattgtttccagctgtgcttgccaatcttagcatggttactttccagaatgtcactcactaagttttacttctaccagtgtag

SEQ ID NO: 654708 - DNA, 241 bp, Homo sapiens
  misc_feature (25)..(25): n is a, c, g, or t
ggcccgggccccccccttgggcctngggggttttttcctgggaatttggttaacccaaaaaaattttttcgttttggttaaaaacccgggggattaaaaaaaaaagctggaattcccgtttgaaaaaatttttttttgggtgaggttttttaaaaccggttttttttaaaggccaaaaaaatttttttttctttttttggattttggaaaaccccttttataaaaatttgggggctgggga

SEQ ID NO: 654709 - DNA, 107 bp, Homo sapiens
gggggatatttaaggaagggggggaggagctaaaacccttctaaagggggggggggtttagggccaacaaggggggaaaattttaaccccccaaaaaggttttccca

SEQ ID NO: 654710 - DNA, 217 bp, Homo sapiens
  misc_feature (48)..(48): n is a, c, g, or t
  misc_feature (58)..(58): n is a, c, g, or t
  misc_feature (96)..(96): n is a, c, g, or t
gtatagccaacgaatccccaacagatgacccccaccgtgcacaccccnatggagagtntccggaagtatacaaagatgggcaagttttccagaaantcagaggatattaggcccacttttattgacagcccttgttggtttttcagtttaatcccacaaatttttattttctctggcataaatcacaaatcccattaatatttgtcatatttgtcgt

SEQ ID NO: 654711 - DNA, 324 bp, Homo sapiens
tacggaacttgataatagaagatctccaccctggtctagaacagaggaaagacctaagttagtcttattatatttgttaattatttaaaatatgctctaacatttatgagttgaagactattttacaagatttgtctggttgctcataaaactatttaagtaccaagcattataattagcctgccaatattgtctccatgatctagcttctcctcacaaaatcctagacgctctcttgaggatccagaactattgtatatatcatatatctttgatatcaccagatgttttacatagatacctggtcacacttatgagaagctt

SEQ ID NO: 654712 - DNA, 300 bp, Homo sapiens
gcagttcttgtatatttagaggagacggtttcaccctgttggccaggctcgtctgggactcctgacctcaggtgatccgcccacctcggcctcccaaggtgctgggagtgcaggcatgagccaccgtgcccagtcaactccttctcaaaaaaaaaaaaaatagggcggctttctctttcaggtgtcctgattggggtgatggtaaatgccactctacttataggggatctacctcagaaggctattggggacactggaaagagaaagcagcactattttttttttggggggactcctcta

SEQ ID NO: 654713 - DNA, 126 bp, Homo sapiens
tcaacgcactgtcaagcggcagtgatgtgggagctgaggagcacggggctgtgagtgacgaggccgcgtccggggctcacatcttggcactgactccccaggacaacttggttccccacccaattc

SEQ ID NO: 654714 - DNA, 195 bp, Homo sapiens
catgatccaggacccgacctggcggacttgctgcgcgattgcggcgcggtcgtccttcgccaggctctgagtaatgacggggccgaggatcgggtcgaagctcgatttcagtttctgcggtatcgagctgatctgctgcgccatgtagtagatgccgacatatttgggctcgaacatcacgcccaggatgaagcg

SEQ ID NO: 654715 - DNA, 169 bp, Homo sapiens
tatagacctgcctggttgatcctactgtaggctggcagcaggaagttgagcagccaacacacaaaactaccgtttgtgcataggtaatgaccgtggtgatattatagcatacctgggcatatcacataccatgaagtaggaatagtgggctctgcaccaggcgtaagtg

SEQ ID NO: 654716 - DNA, 506 bp, Homo sapiens
atctctttgccggagaggtgctgaatgtgtgaataccgtggggcaaagagcttccaggctcaagagtcagaggtgaacagccaaggtgccccacagactgtgaaaagcaaagggctcgcatgcaaagcctcatgagcgccagccgtgcttgctccaccttgttggtccctgcttgtactagtgagggaatttcctgcctgtccagtgcttcaactcagaggtgctactgtgttgatgctgagggtcaggccattcctggaactcgaagtgcaatagggaagcccaagaaatgccccatgccctgtcaattacaggctgagcaatcttttcctcaggacggtgaggccctgctctctaactccagcatgctcccaccctttccgacacctacatcccacagtgcagcacctgatggcagtggatgccaagtgcaatgaattgggcctcccgagcagtcttcgagttgtccaagatgggaggctcagacagggccaggatctgacgcc

SEQ ID NO: 654717 - DNA, 631 bp, Homo sapiens
  misc_feature (302)..(302): n is a, c, g, or t
  misc_feature (592)..(592): n is a, c, g, or t
  misc_feature (595)..(595): n is a, c, g, or t
gtggtcccaagaaacacctgaagcgtgtactgctccaaaacattggatgctggataagttgactggcgtgtttgctcctcgtccatccactggtcctcacaagctgagggaatgcctgcctctcatcattttcctaaggaacagacttaagtatgccctgactggagatgaagtaaaaaagatttgcatgcagcgattcattaagattgatgggaaagtcaggaccgatataacctaccctgctgggtttatggatgtcatcagcattgacaagaccggagagaacttccgtctgatctatnacaccaagggtcgctttgctgttcatcgtattacaccggagaggccaagtacaagttgtgcaaagtgagaaagatctttgtaggcacaaaggaatcccgcacctggtgacccatgatgctcgtactattcggtacctgatcccctcatcaaggtgaacgacaccattcagattgatttggagacaggcaaataactgacttcatcaagtttgacactgggaacctgtgtatggtgactggaggtgctaacttgggaagaattggtgtaatcaccaacagagagagacatnccngctcttttgatgtggttcatgtgaaagatgccaatg

SEQ ID NO: 654718 - DNA, 870 bp, Homo sapiens
  misc_feature (38)..(38): n is a, c, g, or t
  misc_feature (63)..(63): n is a, c, g, or t
  misc_feature (74)..(74): n is a, c, g, or t
  misc_feature (92)..(92): n is a, c, g, or t
  misc_feature (95)..(96): n is a, c, g, or t
  misc_feature (103)..(103): n is a, c, g, or t
  misc_feature (127)..(127): n is a, c, g, or t
  misc_feature (132)..(132): n is a, c, g, or t
  misc_feature (157)..(157): n is a, c, g, or t
  misc_feature (234)..(234): n is a, c, g, or t
  misc_feature (252)..(252): n is a, c, g, or t
  misc_feature (300)..(301): n is a, c, g, or t
  misc_feature (332)..(332): n is a, c, g, or t
  misc_feature (336)..(336): n is a, c, g, or t
  misc_feature (348)..(348): n is a, c, g, or t
  misc_feature (353)..(353): n is a, c, g, or t
  misc_feature (393)..(393): n is a, c, g, or t
  misc_feature (395)..(396): n is a, c, g, or t
  misc_feature (405)..(405): n is a, c, g, or t
  misc_feature (408)..(408): n is a, c, g, or t
  misc_feature (411)..(412): n is a, c, g, or t
  misc_feature (427)..(427): n is a, c, g, or t
  misc_feature (436)..(436): n is a, c, g, or t
  misc_feature (445)..(445): n is a, c, g, or t
  misc_feature (454)..(454): n is a, c, g, or t
  misc_feature (484)..(484): n is a, c, g, or t
  misc_feature (517)..(517): n is a, c, g, or t
  misc_feature (591)..(591): n is a, c, g, or t
  misc_feature (644)..(644): n is a, c, g, or t
  misc_feature (746)..(746): n is a, c, g, or t
  misc_feature (773)..(773): n is a, c, g, or t
  misc_feature (854)..(854): n is a, c, g, or t
gacaagcttcatacagtatgtatgtccagttggcactnttcaagtttagtttcagtgttaaangtgctacagtnacaaaccacattttaggnagnnttttttnttgagatacatttagagaaatttntttangttgtacacaacatatttttgtttnagctacatgatctaaaagtttaaggtcccaggtgccccatcctgaacttggaaagtgtagccttcagaggtagtttntggtacaacgttttgatnttcctcttcctctacagagaaatacttctcaatttagcttaacggggnnttatgcgcaggctcattttcatggttttgtngggnttcagttttgtntgggngtccgcattcttcaatcattattctaagtttctcagtttngnntggtttctnggnggnntgggaggtatttggngtggggtcnggggtgggnggggtgatnttggtgtcttttgcggtttgggggttcatnggcggttctgttgtgccggagtgggcggggtgngggatgtgttcagctgttccggcggtggtgtggttggtcgcggggggcgcgggttcgttttgtgtgttggggtntgcgcttaggggggggcgctgacaaggaatgggactaatccatgattcacaanttgctgtatctggtcctggcggccggctgtgatgtttgacattgtccacgtagcttccttctgaatgttagttttggggttggtgagcaggctgggaaaganggcgagtgctcctgcatcaatcacaanctgagtctgttcatctgttccagtgacaatattccctatggctcttagggcaggagtcacaattggcaattcaggagctcntagaagcttcacaagt

SEQ ID NO: 654719 - DNA, 582 bp, Homo sapiens
taatcggtcttttttttttttaatcaaaggtcccttactggccctgttccataattacccgtaaccagggaaaaagggaaagaaaccacccggcacaggtaaggcgtcactcctccacaacattcccatttcattccccagaaactaatctctaaacaaccccagagctcacatcatagcggtacaaccaatttgcactacattggagaaggcggctgagagaccatcgtgcgcacaactgacgacagcctgcaacaacacaacatttacagtgtctccctcaccttcacatctgtcggcggtgttatccatcgaaagagcgcaaaaaaacttcaggaaacacctggaactcaccaaagcacccaccaatactgcagacagatctgctggcaataatatctcctacaatcgcacagtttatgtgtgaatacagcgccccaaacaaacacatcgtccacaaacgagagacaatgcaacacggagacagccatcgcaccccgaaacttcccaccgtgatggtcatggaacggcgtgtctctgcgatctgttcacccaactgagtccgttgtctagcggaatcgc

SEQ ID NO: 654720 - DNA, 200 bp, Homo sapiens
tctagaggatcgctgttctgtcttccccaccacaagactacttccgcacttcgacctgagacacggtctgcccaggttacgggccacggcaagaaggtggccgacgcgctgaccaacgccgtggcgcaggtggacgacatgcccaatgcgctgtccgccctgagcgacctgcaggcgcaacaagcttcgggtggacccgg

SEQ ID NO: 654721 - DNA, 405 bp, Homo sapiens
  misc_feature (6)..(6): n is a, c, g, or t
  misc_feature (87)..(87): n is a, c, g, or t
  misc_feature (145)..(145): n is a, c, g, or t
  misc_feature (206)..(206): n is a, c, g, or t
  misc_feature (288)..(288): n is a, c, g, or t
ccaaanctaagggtttaacgtttaaaactatgcccactcccaaatgtcaccgcccataaaatttttttcaatgtagcattttcccanccctacttcaatatctttttaaagaaatctacccgaaggcccaggcgcggtggctcanacttgtaatcccagaactttcggaggccgaggcgggcagaacacgaggtcaggagattgancccatccctggctaacacggtgaaaccccatctctactaaaaatacaaaaaattagccgggtgtggtggtgggcacctgtantcccagctacttgggaggctgaggcaggataatggcgtgaacccggaaggcagagcttgcagtgagccaacatcacgccactgcactccagcctgggcgacagagaaagactccatg

SEQ ID NO: 654722 - DNA, 174 bp, Homo sapiens
ctagacgatccccttactattcatcggtcaccgggtcatagtattgtgtgtgtgttgaattcaactacgggtgccgataatagcgaggtgtcagctattcatcggcacctgaaatcagaacacaggcagaagctgaaagccatagtatagtggtgtgttaaattcaatacggga

SEQ ID NO: 654723 - DNA, 373 bp, Homo sapiens
  misc_feature (136)..(136): n is a, c, g, or t
atgatcagtgcattgtgtttagatatggatccaagagtagacacacatgtctgtgacacagtggcatagtgaggaggctgggggtgaggctgcggttggtaacaagtgcatgaacatcggtggacggggccagatncgctcgatgtggtcttgcacagaggtgtccttctcacacttcgcacttctcctcgggcgtcgcctgtgccgcatgccctgccagccaggtttcctcgcatactccttctatgctccaaggtgtctccaactttctatagggatgtcccttgctgtccctgcatcgctcggccctctaattccctagacaggttgccacgtgcatgccgtccggctggccttcctccccatggcaagc

SEQ ID NO: 654724 - DNA, 125 bp, Homo sapiens
  misc_feature (66)..(66): n is a, c, g, or t
cttttttttttgggggaaaaaaacttagaaattttaataaatcctcccaaagggaggggggtaagnggggccaccatccctccccttgcaacatagcagcccttgttggaataaaaaaaagaaca

SEQ ID NO: 654725 - DNA, 184 bp, Homo sapiens
ttttatctatcatctatctatccatccacccatagcggcttttattttatctatctatctatctatctatccatccatctttccatccatccatccatccatccattccaatcttgtatattctctggggatatatgaagtggtagatatatgaagatgtgcactttttggtgtacctgtgctc

SEQ ID NO: 654726 - DNA, 1134 bp, Homo sapiens
  misc_feature (2)..(2): n is a, c, g, or t
  misc_feature (5)..(5): n is a, c, g, or t
  misc_feature (380)..(380): n is a, c, g, or t
tnttntccccccccgctagctcctgcttctgcattcagaggtacttcctgtattatcccttgttagtactgcgtccagcatcactctgtctgtcgcgcgttgtgatgtattctctcctccgactgctgtttcctaataacccgctcccctcgcgttattctatgccggggatatcttttttcacgggacttcttctcccttgcctttgggccacctttacgaccgggtgccacaaaacacggggttccccctcctattcccggattgtccaacacacgctcagttttcccccttttgagagctatgttataaagtaacatgaaaacgttgtcccccgcataacctgcgtcaaattaaccccgtgactcacaattcccgcnccccatatttccattcatcacaccaggtcattttaccctccctgtcaaccccacacaggcatgctcataaggaaaggttaaaaaaataaaagggactcggccaatcttaccccccctgtttacccaaaacatcacctctagcatcccccgtattagaggccccccctgccccggacaccaaggttaacggccccggtaccctaaccctgccaaggtagcataaatcacctgttccctaattagggacctcgtatgaatggctcccccgagggttcaactgtctcttaacttttaacccgtgagaaattgagcctgcccctgaaagaggcgggcactgacacccgccagatcgcagaagaccctatggaggctttaaatttaattaaagccaacccgtatccttaccaaaccccccaggtccttaaacattacccaaacctgccatttaaaaatattcggttggggcgaccttcggagccagatacccctacctccgagccagtacaaagcttaagacattccacccagtccaagcgaactactatactccaattgatcccaataacttgacccaacgggaccagttacccttagggataaaccagcgccaatcctattttagagtcccataatccaaccaatagggtttacgacctcgatgttggatcaggacatcccgatggtgcccaccgctattaaaggttcgtttgttccacgattaaagtcctacgtgatctcgagttcagaccggaga

SEQ ID NO: 654727 - DNA, 196 bp, Homo sapiens
cccggttatgtcagaaggtgctttaccttttgacaaggagactggctttcacagaggtttgggtcggttcagtttcttcagaagaaggactcggaatgcactacaacaggaaaatcatattatagatggagtaaaggtccaggttcacactagaagggccaaacttccgcaaacatctgatgatgaaaagaaagat

SEQ ID NO: 654728 - DNA, 671 bp, Homo sapiens
  misc_feature (20)..(20): n is a, c, g, or t
  misc_feature (502)..(502): n is a, c, g, or t
  misc_feature (526)..(526): n is a, c, g, or t
  misc_feature (534)..(534): n is a, c, g, or t
  misc_feature (599)..(599): n is a, c, g, or t
  misc_feature (613)..(613): n is a, c, g, or t
  misc_feature (626)..(626): n is a, c, g, or t
gtcgactctagaggatcccnatatatccgcctatcctgagcatgacatgtttttccatttgtttgtgtcttctctgatttctttgagcagtgttttgtaattcttctagagatctcctagagatctttcacctccctggttagctgtattcctaggtatcctattttttctgtgtgtagcaattatgaatgggattgtgctcttcatttgactctctgcttgacttgatgtataggactgctagtaatttttgcacattgattttgtatgctaagactttgctaaagtttatcagcagaagaagctttggggccaagactatggggctttctagatatagaaacatgtcatctgtaaacagagacagtttgacttctgctattcctctcttccctcctctgtttggatcccttccagttttgcacatcagtgtaatgttggctgtgggtttgcatggctagctctcatcattttggcccttctgctagaaggccaagagggnccagtgttgttgttacctgaaagnaagtgcanccacaaaaatgcagtgaagaaaaaatgtattatgcatatgttaagtaatccaatgagattattancagacagatcaatnagttgatgagtgntgctgggatgtgggggagttatatcactccaggttttgctgggca

SEQ ID NO: 654729 - DNA, 161 bp, Homo sapiens
tgtcgatcagtgcatctgactgttcgtctgcctcttgcttagcctgtgtgacctcaggcacttgtgttctgggcctcagtcttctaatctgtggaataggaatgacaatgtcacctgtatcctgaggctgttgagggttaaagcctttattaccaagtgcc

SEQ ID NO: 654730 - DNA, 351 bp, Homo sapiens
gaatttccggctctctggggacaggccgtaggaatggagtggagtaagtgtgaatacaggtcaatggagtagagactccctgtcctctgggggcaggcgaggaatggaagatagagtacgtgggatacaggtcacgggcagagctcctggcctcaatgatgcctcctgatctatcgctgggcctggacgaccaacactgggatgatgatgagcagaatggtcatgaagatgcccaaaatcagggcccagatgttcaggcacttggcggtggaggcataggcctgggccccggtcacgtcgccaaccatcttcctgtccctagacttcacggagtacgcgaatgctatgaag

SEQ ID NO: 654731 - DNA, 128 bp, Homo sapiens
  misc_feature (6)..(6): n is a, c, g, or t
  misc_feature (94)..(94): n is a, c, g, or t
  misc_feature (119)..(119): n is a, c, g, or t
atggcncctgtggtcccagctacttgggaggctgagtcaggaagatcatctgagcctaggaaagtggcactttcatgcactcacccactgcacntccagcctgggcaacaatgagagancctgtctga

SEQ ID NO: 654732 - DNA, 121 bp, Homo sapiens
  misc_feature (117)..(117): n is a, c, g, or t
cggcacgaggaaaatttaagctggcacatattctcagctactctgaaggctggggcaggaggttcacttgaactcaggagttcaagtccatcctgggcaacatggcgagactctgtntctt

SEQ ID NO: 654733 - DNA, 227 bp, Homo sapiens
atgcgtgccacggaattggaatacgcaatcatctggatagcagcaaggcgggaagagagtgccagtgtgctggagccatctttgctcacagtgatgatcggggcataatgtggtcaagagcagcaccaaaaataatggtcctttcccatgggatgaaaagtgcgtcctcccaatcaagtgtcctgaatgcatggaattggtcgaagatgacagacaggtcagcgtag

SEQ ID NO: 654734 - DNA, 894 bp, Homo sapiens
cggaggctcctgggctgagccggcttgacagagcccgggaaggcagcgagactgtgggcgccggcccagccccgtcccgtgtcttcaggctctgtgccgcgtgacgcctctggcctgcgcggcgcgcctccctccgcgtgcgccgaactaacacggatacgcggcgccaggttgctatcagtaaaggctgggaaacagcaggtaacgagtaagaggcacgctaaggagggagatacatcaaaggacgcagaggccagccgcccaaaaaggcaaagacaagcaataaagaggcaaccaagacgaacggagagagacacacaacagcacacaccagagcagcgccagacgcggcggcacacaggacgaaggagcagcgcgaagacagacagaaccacacaaacaagagggaagagacaaacaacggaggcagccacagacgcacacacggcgggacagagaggcacagacgacgcagaggacagcgcggaggagaaacagaacagaagagccacaggaacagccagcgactgcgcaagacgacagatcagacgacgaccagacaaacccgagagagacaaccagcgacgacaacagcagaaagcacaacagacaggaaccaaaaagaaacacgcaaaagaacacgggcaccagaatgacacagcagacgacagggcggcacacacagacgaagccacagggacaagcgcagagacacagcgacgacaacaggacgggaaagccaggagggccacgcgacaggagggcagcgcgagagacagagaggaggaagagcaacgaaagcggccggacagagagtaacgggacggcaagagagcgagcaggaccaacgaccgggaagccagaaagaagcagacggaggaaggaagaccaaca

SEQ ID NO: 654735 - DNA, 292 bp, Homo sapiens
  misc_feature (23)..(23): n is a, c, g, or t
  misc_feature (39)..(39): n is a, c, g, or t
  misc_feature (56)..(56): n is a, c, g, or t
  misc_feature (67)..(67): n is a, c, g, or t
  misc_feature (287)..(287): n is a, c, g, or t
tctccccgcctcagcctcctgantgtagctgtgacctanatgcgtgcacccactanacccggctaanttttgtacttcttagtacaaagtttcacccatgttggcccaggctggtcttgaactcctgacctcaggtgatttgcctgcctcagcctcctaaagtgctgggattacaggcatgagccaccatgcctgtcccattatgtatattgggcggaggttgcagtgagccgagatcgcaccattgcacttcagcctaggcaacgagtgaaaacgccatctcaatntaaaa

SEQ ID NO: 654736 - DNA, 1043 bp, Homo sapiens
  misc_feature (357)..(357): n is a, c, g, or t
agcggctactcattagccggagaagaggacaaatgatactcgagatgagaaccagacgtaacagagaccgaaaaaccgaggctggagagaccagtgatccattccagcatgaacaaatgtcgagcgcacgaaagccaagaactaggcacgagcgcgagctacgaagtatggcagtcgagagctccgcgaaagagcgatggtggcattggtctagaggtgctgctggcgacagatggtcatgagtaggcggcccccgtttgcgttccgcgtggctggaccgaactgggcattcggtgttgttccgttagtggccgtgtggccaacatggttgcatggacgggctggatgaggacgagngcaaaagcgccgtgcgagcgtgggccatcgagagaaacagactgatacttttgcaagccacacgtattttgctttcgccagaaagaagctgagccataagacttattcgaaggatattttctaatctagattgttggaattacgcgaatgcggcttctctacgagtaattgttcagtcatcatgccgaacattgcacctcgtgttcaattcttatccacttgtatttgggcgccccttcccatgacgtagtggccgtgaaggcggtcctgtcgtaacgaacaccaacccgggggcggcaggatccaaggggccacggaatcatgtatgcacacgaacataacaaacagagcaacgccaaagtcgtgctgcggcaaaagggggccctagaaggccgggcaaacccggggtaacaacaggaggagagcccgatgaaaacggcgtgaccggtgagcttatcccaagggaaaaagccccaatatccagtttgcagaatgacgttccaaatatgcctgtataggcgaaagcacccgacgggttaggctgggttcggactcctgggtaactaagaggtcgcaaagaacagtgggggccataacggagaatcaatttcccccaggaacccaaaagggtttcgaggtagtggggacacagtcgaaccccttaagtggacaccccgtggaaacca

SEQ ID NO: 654737 - DNA, 192 bp, Homo sapiens
tttgtagtgtgtcacagaatattcatccatttcacccaggcattgtgtccccatatcctgattaatacccacagtcagccttcctccgaagatgagttactgttaccttcagttaatattggcagtggcagctaccaacatgtatgcactcaagccatcctactgactgacatggtccagagaggcagcgag

SEQ ID NO: 654738 - DNA, 106 bp, Homo sapiens
taatcagaggatccccctcaacgcttatacttcctcaacgctttactttctcaacgcttatacttataccgggaaagatgagaaaatgcagcggactcggacataa

SEQ ID NO: 654739 - DNA, 339 bp, Homo sapiens
  misc_feature (16)..(16): n is a, c, g, or t
ccgcgtcgactaacgnactcactataataggtgtacaaatttttaatttaatatttaagatttatcaaagaacttctaaagatgctcaaaggtaaagagagacatggggtaaccagttcccacacaggacagacacatggcctgaacctgcaaatagtgtttctcaacagcaaaggcgctgcgcgatcgctcggacatcgatacgacttttgttttgttggtttttttttttttttttcaggtcagtggctatgtagcttaggctgacctgaaacttggtatgtagacatggctggtctctatggagatcctctgcctcctgactgcagaggtcgacgc

SEQ ID NO: 654740 - DNA, 145 bp, Homo sapiens
atagaggtcttgtggcgaacgatctcactatttcaacttaatggtaagaagccggtcgctatcgtaggagcccgggcgtggaaatagcgaggtgcctaagttggggcacttttggtatgcagaactgggggtaccgagctccaaa

SEQ ID NO: 654741 - DNA, 429 bp, Homo sapiens
  misc_feature (14)..(14): n is a, c, g, or t
  misc_feature (31)..(31): n is a, c, g, or t
  misc_feature (426)..(426): n is a, c, g, or t
  misc_feature (429)..(429): n is a, c, g, or t
tgcccccctatgcnatgccactggcctattnccctcctatctggaaatactctttcccccctagaatacccacatgacctcacctacatcacccttcctttagcctcgttgatgaaacgtcactttgggccttggccggtggcctcaccctgtaatccccaacactttgggaggctgaagcaggagaattcacttgagtcccaggaattcaagactagccctgggcaacatgatgagacctcccctctacaaaaggtaaactaaattagctgggcgtggtggtacatggcggtggtcccagctgctcaggaggaggctaaagtaggagaatcacttgagcctgggaggctgagggtgcaatgagtcatgattgtgccactttactccagcatgagtcacaaagcgagaccctgtctcaaaaaattnatn

SEQ ID NO: 654742 - DNA, 93 bp, Homo sapiens
acaggctagttcataaacaaactgaatgtgtaactaacttctcaaaatgactctatttcataactcggacaatttctgggtggtgactgagta

SEQ ID NO: 654743 - DNA, 403 bp, Homo sapiens
tatcctgtgtcggggttgagaaactttccctctcggctcggagacggcgccccgcgcgtgccggagtggcgactctgccaggctcggagtgaaccggcagctctccacgcccctgaccgaagcctgacccgactgcctctctcatagagacggggtttcaccatgttaaccaggatggtctcgactctcctgacctcgtgatccgcctgcctcggcctccccacagtgctgagcttaccggctttacgtcgtggacactgaacatttactttggctgatcctcatcatgaaccgtgcttttagcacgacgaccagctccttggcagtccagcagtggacacagccacaccacggacccgccgtcgtgcgacgatgctgaccggaccctaaaggctgaaccgac

SEQ ID NO: 654744 - DNA, 669 bp, Homo sapiens
aaaactacgaatgcctaatccaaggttcccaaatcagcccgcacatccacctcggtatttttagtgataatcacgtacaagggggtacaaacgttatcttttggaggctaacgttacgtacttatataacgcaaggataggaagggggcttcgatgcctcttcgaccggataaccggctcgaacgaccgatatagccgacaccgccttaatatcctacttcgtagaaccgttcgaataccccatcgactaaataggataacgacctttaaaaacgacggtataagacccgatatccatgattacttccattttgacgccaaaggaccgatcgttaggacgtcccgattcctaagataaatcggcctaagaccccgatccgtaatataactaactattctacgtcaaatcgccgttactagacggataggacgtcgagccggatactctgtctatgaacgataccccgtcggaaaattcgaatgccaagatctaggacggttcggcattagcgtctaccgagcctacttcttagcgaacgaaaccgacgggaacggtggactacgctgccccgtcgtaagatgttgcgcgccagccgcgtccgatagaggcgtagaaagctttaccgcggccttgggaggcgggttccactccggacgttgtttcgacgg

SEQ ID NO: 654745 - DNA, 168 bp, Homo sapiens
ttttttttaaaaaaaaaatttccccccccccggggggggcccccttggggggggtttttttgggggtgggcccccggtccccgggggtccctttttggggtcccccccccccggtttttttgggggggggtttttttttttccccccccccccccggggggggtttta

SEQ ID NO: 654746 - DNA, 336 bp, Homo sapiens
tttggggggtttggggggggagggaatccaaattggagttgggggagggggggatcagttcaggatacccccgcctggggtcagggccagggggggatggccccccttgtatccaaaagttcccaggggggatttttatggtggttgggactggaggttgtataaggtgtttttggaaggaaggggccggggttggaatttgttggtcccccctgtcccccctggggttgtgaacccccccccccccctttttttgttttttaaaggccttttggtttttttaaatttggccagcaagggcccctttttttgtccaataaaaattggaaatgccga

SEQ ID NO: 654747 - DNA, 154 bp, Homo sapiens
gcgcaaaagccgccgcggcaggtaccattgcggctttatgccggcaataacctgaatgcggccaatgacaatcgtgcggcggcattggtagtgcgggtttacaccttaaaggaatcgaccgcctttatgcaggcgcccttcgacgcctttgtcg

SEQ ID NO: 654748 - DNA, 318 bp, Homo sapiens
aaacacgaaaacgataaaaaactaagaactgacagagatggaaataaaggaggtaacgagagagtggaggaagccaggtacggtggctcacacgtgtaatcctagcactttggtaggccaagccaggcggataacttgaggtcatggcgttcgagaccagcctggccaacacagtgaaaccccatctctactagaattacaaaagttagctggatgtggcggcaaggcccctgtaatcgccagctagtcaggaggctaaggcaggagaatcacttgaccctgggaggcagaggtttcagtgagtcgagattgcgccat

SEQ ID NO: 654749 - DNA, 529 bp, Homo sapiens
agctggcggcggtggccagtcggtgttgccttctcggcgcgccctgctggccggctggggagcctgtgatgcctggtgctccctgcgtgggcaaggtactacttatctgagaatgtggcgtccctctgagtgcaccactggtcctgggactacaccacagattgaactgaagcttgcatgctggcggcctctggacccctggtgtgccttggttgtgttgcctctgtgccttttcctctgagtgacaaaaccatggtattgggcatcaggagaacgccaagaacgaagagattcttgaattccctcaatgtacgtcctggcctggtggtgggttctgagcccaacttcatgctcttcgagcaagtgcggaggtgaactggtgctggggtgcgcaccctctcttcgccttcctgctgggaggccctgccagctcccagctgacgactgccaccgcgcttatgaccgacccaagctcatcacctggtctccggtgtgtacgcaactgatgtttgccttggaactttgagat

SEQ ID NO: 654750 - DNA, 106 bp, Homo sapiens
ggccccctgtggaattggcccttgcccccctgtggaattgtgtgtggttttagagggtttctgtttgtgaaatgtatgtattaaaaataataaaattccagaaact

SEQ ID NO: 654751 - DNA, 586 bp, Homo sapiens
  misc_feature (276)..(276): n is a, c, g, or t
cggcacgaggcctggtgccacctgggaggcagctccagggacaggaggggaaaggactgagaagacgccagtcactggtcctcccagggctcctgctgctgctggggctgagctcagtgccccctggtggacaggagtggatgtgctgaataaaggcccaggtggccctggccatgtcagaagtggccttggaaaccacaggacttttcctgccctctagaggaatacatgaaggcacagctaggctgagggccaacaagttgcacagctgatggncggcagattcaggacccatgcccagttccctggcttgcgttatctcctctgacaagtgtttactgagcactggttctgctaggccctattctaggcactgggggctgtggcacacaaagacctatgcgctgttagtaaataaaccacagctgcgggaacagctgcactgccgcccggcgtctgttattaccatcattgtggctgagtaacactctggttgggtagtggcccagtttctcacacggagcttgcctggcctggttctcggatggatgatgtgtgcccctcaggggctggctggcctgtgggc

SEQ ID NO: 654752 - DNA, 609 bp, Homo sapiens
gatggaatccagagacgctgtctgcttgctgccttaggacagttagctgaatggctgattaacttttaaaatacccagttgggttaatttttcttagaatctgttgctaagactggggacgctgttttcttttacaaggggaaatctaagttaatttcagggcattcgaaagggggaaggactattattgcattttgggaattgagaagggagtttcagatgaggatattaaaagggcttaccgaaaccaggccctcaaatttcatccggccaggaccaaatctcctaaggcagaggatttaaggaggtcgcagaagcttatgaggtattgagggatcctatcttccggcctcttaagttctgcctctttattttttccagtctttctgccagcctcttttcccctttttttcagcttgttaaggttatccttaaattggattctcaggcatatcaaaggttgaaggccgggataataccatggtttaatctctgatcatatgatcgagctttgcagagccctgatcgaacatgcctctgtggccctttttaattttagcatctttgaattatccatcctcttcattggctttaccatgttaccccggt

SEQ ID NO: 654753 - DNA, 1348 bp, Homo sapiens
gacgactgtccgagctggtccccgacggcggctgtgttgttgcaaccttattactccatcttctacttttttgtccgatcgctgcggggtccgttacgagagggaacctcgatggagacaggttcgagaactcctcagtccccgtcgcaaggcggttgccgagcggcctccagagatctcagggatgcagagcggctcgcagaagctctgagacgcacaagaccggacgtctcgttctcctcgtctcgtggcctgcacagtgcttcgacattgcacttccgtcgcttccgtacctcacctctttcaggccgtgggcacccagtcttacgttacaccgtgtgccagagcaataacctcggcggcacccttgctttcacatgcacaggtctgacacgtaccgtccagtgcccggacattccggcccacaagtatggtcgagataagagtgcgaaccacaaagtttgcctagacctcattgttggtttaagacacgccattgagcgcgttcttcacatacgacggcacagcaggagcatgccctgggttctaggccaattgtgcattacttgtgcattaccaatgtcaactttccgcaggatatttaagccactcgtacacttgcacccatgtgcaaagaggtatccctcaaccgtgataaggtctccccccggccgtcatatacctcctttccttgccccatgttaggtggggcacagcttttcgggagttatgggtaattccaggacagactgaacaagctccaaagaaccaggatccaatcacaccacttattcaatgtcccatggccacgtttggacctatggggaaacgaaagccgtcctcggaatacgcagggaccaaaggcccctgggtatgcgggtccctttgaaccccaatgggttgccccctttagactttcccaaggcctttgcactggaagaaaggtacttatctcgcccaagtggttttcacaacttacatggcgttccccttcttaacgcacccactgctccttggtgaccccatacaaaggctgaagcgctcccgtacaattacatgattgggaatctgcgtgtgctccgccgctgtccaaaggcggtgtgcctactttcgcttccaagaaagaatccccaatcagaccttggggtgccccatttcatccccacaaaggtttccttgcggagaatcgttcaacagaaaggatatcccgaggattgcccccttgacaaccccacgggttaaagagcccattggtcgccctttccgagcctttggtgtaagtgcccacggagaaaaccttcccgaggacaacgcccatgacttgcacaagtgggaacccactgagcgt

SEQ ID NO: 654754 - DNA, 327 bp, Homo sapiens
  misc_feature (47)..(47): n is a, c, g, or t
cgcgctcttgatgatccccgatgagtaaaatcttgtgttgacacagntagtcatcgcctataaatccagcaattggggaagccaggacaggaggatagcttgaggactggagtttgagaccagactgggcaacatagggagacccccttctctaacaaacataaaaaaattggccaggcctggtggctcatgcctgtaatcccagcactttgggagaccggggtgggcagatcacctgaggtcaggagttcgagacccccctggccaacatggtgaaaccctgtctttactaaaaatacaaaaaaattagccaagatttactcatcg

SEQ ID NO: 654755 - DNA, 375 bp, Homo sapiens
  misc_feature (357)..(357): n is a, c, g, or t
ggagagcagagagggagcgcgccttgtgtcgctgtccttgtcggcggctcctcttgagagctgtggcgcccacgagaggatccctcacccgggtctctcctcagggatgacatcatccgtgcacctccttgtgcttaaggaccacctcctctccatgctgagctgctggcaaggggcctggtggccatctacacctcacgagggcactaagagcacggtttcctggatcccaccaacatacaaagcagccactctctgacccccaggaccaggatggccaaggatgaagaggaccggaactgagcacccagctgtccctcttacctaaagacttccaatgcgcctataatgtagggngggggggggccccgcccc

SEQ ID NO: 654756 - DNA, 395 bp, Homo sapiens
ggtatctctaacattatcaagtattagctgttagatgcacaaaaaccataccgagttcttaatgatagggaaatcacagtccagtgtaggagacaagctctttaacataatatggtgagtactaaaataggctgggcacagtggctcacgcctgtaatcccagcactttgggaggccaaggtgggcagatcacctgaggtcagtagtccaagaccagcctgaccagcaaggagaaactcccatctctactaaaatacaaaattagccgggtgtggtgatgcatgcctgtaatcccagctactccagaggctgaggcaggagaatcgctttaaccctgaggcggaggttgcagtgagctgagattccgccattgcactccagcctgggcaacaaaa

SEQ ID NO: 654757 - DNA, 102 bp, Homo sapiens
agctcggtacctacttttcacagggaacgaaagaaaaaaaaaacctcttacaagttaggaaaggaaacttatctcaacttgataaataacatctttatttaa

SEQ ID NO: 654758 - DNA, 311 bp, Homo sapiens
acgggcgatgtactgcgactgccgggtcgaagagtacgccttcacggaaatcgacaactcggtgtcggcgggtctgtccgtgaagggatcgctctggggacgccccgatgacaccgtgggcgccgcgttttcgtcgaatggactgagccacgaccaccgcgactatctcgcggcgggcggcctgggtgggttcctaggagacggccgactcaactacgggcgcgagcaggactgggaggcttactacagcgccctggcgtatcgggggatacatctttccctcgactatcagctgatcgtgaatcccggct

SEQ ID NO: 654759 - DNA, 292 bp, Homo sapiens
tgctctagaggatctcacactgggttcgagttcttactgggtggagtgcaggggcgatcttggtccctgcaactccgcatccgggttcaagtgattctcctgcctcagcctcccgagtagctgggattacaggcacccaccaccatgcctggctaatttttgtatttctagtagagatggggtttcaccattgttgaccactgctagatctcgacactcttgaccctctagctgatgtgcccactttcgaccctcctcaaagctgctggcgattatagcgaatgacgttatg

SEQ ID NO: 654760 - DNA, 86 bp, Homo sapiens
ttcaagcttctaacgatgtacggggacatgcctgcaaccttgcatccatttgggctaccccacccaagtatacaataaagtcttcc

SEQ ID NO: 654761 - DNA, 509 bp, Homo sapiens
tggctctaaagggggtaaagggggtgctatagggtaaatacgggccctatttacaaaaattttaaggggaatataattctaggacaatggcgataaaactgtggttggctccaaaaatttcaaagtttgaccgtagttataccccgcggttcgtgtagcggtgaaaaggtggttgggttaagaacgtcgcgggaaatggcttcgtgttttataagcctatgtgtggggacaagctcatgagttgcaagcacgtctggctgaaatgtaattatttatacagaagtgggggcttcaatcgggagtactactcgattggtcaacgtcaaggagtcgcagtgtcgccgggttctaggaataagggggagaagtatcgtcggagttcgaacgattagtccgccgtagtcggtggtactcgtaggttcagtcaccatgggtggccaatggattcgatgggtaagcgaggggatccgttgacctcgtctgtatatgtaagaggatgcgtaagggat

SEQ ID NO: 654762 - DNA, 527 bp, Homo sapiens
caacctaacatggaggaaccacaagaacacaagatgaacacatactacagacaaaaacattgaataagagtacctgcacaagtctttccagatcatacaaataacatatgtttctatgtaactatccacaacatctaacttcctcctgatccacagagcacaagactttatacccacacaatgcaactcaggctcataaaatatgagggctggcaaagactttggcatactcatatcgatcctccccttggattctgaacagactaggccattaaatgatcccagaaaacatcttttaaacaatatatcggaaatccagacagacaacggaactacaatccaacactattaagtaagtatacaaatttaaaaaaatttaggataattatacctgtatttactctaatcttaagtgtaaacagcaataactgctgtccacaaaacgcatcccttaattcactcaacaaagactaattaagtacctaaggtctccaaagacatctgctaggttctcgaggtaagaagaa

SEQ ID NO: 654763 - DNA, 805 bp, Homo sapiens
gctctctctaagtcacgggaactgcccttgctacttgttgacctgccctttactcagcagtttatgttctgggaagccctgggattctgctaatacctatcactgtaggtgctgaagggaaacagggatgaagaacatgaccttcaacgaggcttcctgtcaatgagaagaccaagctgactggcctggcagagatattaatagagggagcctgaaactgttccttggacatcttatgaatgtcagaaaataccttttggagggttagaagatcacgggacatggttgttcaccatttgctgccacgaacagcaccgtctagtcttcacttgggaatccagaatcacgccttgtgaagagatcatccctaaagcaggtagagaagctacttaagagggattgtgtcctcctccagcttccctgtgctcggctctccacctgtactcccattctgatgcatgatggttcaaactggaacagactctgccagctgcacttacttgagggcctctaggactgctatatgcatgctggccactgtggtctctggaaactaccttacaggttgacagtgtgactctgaccacttgggtctggagtccaggaatctcaaagccagtactgtcaggacactatctctgtattaaattctccttaaacttcccatgcaaaagagcgttctatccactgttcaggggtccccccgaggggaccaagaggcaggtgcttcaggctattctgaataaactggaggtccgaaggaagcgagaacccttaacagacacccactacctctcactaaacg

SEQ ID NO: 654764 - DNA, 222 bp, Homo sapiens
agcctggcccttcttttcttagcacatcgacgaattctcagcacaagatgaagagtagactcctttgatatatgtagtcagacagagtacgtgcatctgttgagtgagacccatgggcgtcagaataacagggatagagaaaaatctaccaagtcagtgaaaatcagaaaaaatcagaggttgttatcctaatttctgacaaaacagactttccgtatggat

SEQ ID NO: 654765 - DNA, 1043 bp, Homo sapiens
ggtgtaatacacgggcattcccccctcgcgggtctttgggttcctgctgtgttgatgacgcgggggatgtcccacgccgtgtgtgttcctcctatcgcccgggtgcccccactgggggccacattgcggcgccctcgttgtagattgcctggtgacactgctgtgtgttcacaagctggggccccttgtgcgacgttgcgtaccaccttttggtgaggagggggtgcccccccgggttatgacccccaggggggacccccctttgtgtgtcagaggcacacaagattcgatcaagcggtgtgacgtcgcctcttcgtgtgggctccttcgccttgaggcttccacgagacgtgtgtctcaccgtttgcttgcccgcgctccaaaccgcgggtttctagacgttatagagatgcggggacgggtttatattataaccgcccctcccgtttgtggacttccttcatagcctccggcagcctcattttgtaggggctatataggcgggcatagtaggagaccagccctctcttgtggaggccaccctgttgacctgccagcttatgtatgccccttctcccagtgttccacctgtcctcgacacatatgccgttatcccccatttttgaatccccctgcgtatggcaagtgcccccggggcgtttgtcgcccaacacgccctcatgccgacaaaagctcttatctggggagacgagagttatttggagaatgcgttgaaatcagcgttttccacttccacgaagagagcccccctttttcactttgggggtatataatgtggaagactggtttcagcccacggagccccccactgaggagaggattctacacaacaggggggcctaactttcccaaggggcccttcctggcctggagtgaaggccttttacaacacaccaccacacaatacacacactaccacaccacacacacatattcccggtttccacacagacccctgctgcatttttgtggccatttggtctgtttcttattaataaaggaatttgggtggtcgtggttta

SEQ ID NO: 654766 - DNA, 258 bp, Homo sapiens
gtcagacgctgaactatgtgcatgtgcctggcggcttcagaaaagcggctccacgccctcagccaggcccctgatgctggggggtctttcctgctgctggccgtgaccctcccctccatcgcctgcatcctgatctgctactggtcccgtgaccggtgggcctgccacccactggcgcgcaccctggccctctacgccctcccacagtctggctggcaggctgttgcctcctctgtcaacacatagttcagcgtctga

SEQ ID NO: 654767 - DNA, 334 bp, Homo sapiens
agggatccaagttgtaattgacagtagctagaaccaccattttaaactttaagcaatgtcataaaagaagtgtgtaaacaagcaacagacagatctaaaaagttccaagtgtggatttcacattagatcttataaattaaaaaaatcctcaatataatcgtttgttcactatcttctttcaataagcacatggacagggaaagataatcacaccttaatattcacaactgctatttgtgttctttacaaaaattgtatctctgcaatgcagggaggcaggcaatcccttgttcaagtcatttctgttttccctaagttatcaaaaagtacaact

SEQ ID NO: 654768 - DNA, 289 bp, Homo sapiens
attcatagtgagcaccatcctggagagatttggggaaacgaggatctcctccagcccctcaattagggtaattgcacctcgtagagttatatctttcctctgtttaaaaggaggtaggcaagttggagagactccttgttagaatgaggagcattggcaaagcgttgtcttatcataagtgctctgctaagtgctctgcgtggcttaaggactcatagagctggaagaggagaaataccaaatggattaactttgcaattacatgtggatggcttgagcagttaagtaa

SEQ ID NO: 654769 - DNA, 856 bp, Homo sapiens
gacttttttttttttggaaacagggtctggctctgtcacctaggctggagtgtagtgtggcgatctgttggttcgctgcaacctctgtctcccgggttcgggtgattctgtgtgcctcagtctcccgggtagccgggattataggtacccgccaccacgccgggctaattctggtattttgggtagagatggggtgtttcaccatgttgggccgggctggtgttgaactcctgacctcaggtgatccgcccacctcagcctcccgaagtgctggggattggcaggcgtgggccactgtgcccagccacatgtgaccatttaattaattctagccatttgggcaactctttgggtaacggtctcatgtgcatatgtaacagatttctctgaatccaaatagtcatcttaaatggacaatttatagtgctgctgcttggtgctacaaaacacgtgacattattatatttttcttctagaaacattattccatcattggtgtcgagggatatccaggcttctacaggggtcaccctatgtgtatcagctactggacatgatgtgaacgtagaaccgactccgaattacaagaaaacctttaagccaggcctgtctgaagaataggtaatccataggcctggtggaactcaacgtcattcacaccttttagagcgcccaaaatgggtctccttcttaataatacttcggcggcagcacttttaccaccttctcgtggaagcataacgcgccagcctcgtaacctagaaatatctgcgcccaccagctgatgcttttaacagcttgccccgcaatggtgctcgttgccaatctcgcggatcttcagagatctgcgcgatcc

SEQ ID NO: 654770 - DNA, 421 bp, Homo sapiens
  misc_feature (1)..(1): n is a, c, g, or t
  misc_feature (85)..(85): n is a, c, g, or t
nttccggccgcagagctccaccgctgaggccgacgaggccgagggggttattgacgggggaagaaaaattcttcctttcaggtgnagaaggggtttgcttaatttaactcagtatttttttccattctttgggtgagtggactgggttttccaccctaaaatctgtgttttctttcttcaaataataatatccaccacagctacttattctgaaaagaaagtggaaggggggggaacaggggtccaccaggggggttcagtcactgggtcgtttcttcacaaagagtctacttttcctattagttccgagcccggggggggtgggaaaactggtgggggtgggcgagtggatcgtcttggctgggcatcacctcccctacggaactccagaggttgagcggaggggccttcttcctcccgg

SEQ ID NO: 654771 - DNA, 592 bp, Homo sapiens
gctgagaatgtcggtatccgacagaatagataggcagaaaggctcatagagaaaaatgaagtattacataataaaaagttataaatccaaaaagaggtgtgtgtgtgtgcctgtgtgtacaaacacagcctcaaaaaaaggaaaacacaaaaattaaaaaaaaaagggggggacagaattctaaggagaaatggatgaagccaccaccagagctctcacaaatccagtttaagcaggcagttcaataactatgtgcagattgaacatgatgagacagcatttcctaactataaaatccaaccactcatggggccatgttggtctcagaaaatgcttgaccacagagcaatgcagttggcaaaacaatgaccaaaaagataaaccagaaaaaaagtcacagaaatgacaattaaaagaaaaaaattctaaatctgcatgccaaagcagccatgatatttgatatttataattaaaatacaataaagtatgatactgcaattcttggggatgtgacaggcattcaacataagaaactggaaagaaacatcccaaaaaggaagaaaatgataacaatcagaaagtttcaaataga

SEQ ID NO: 654772 - DNA, 991 bp, Homo sapiens
  misc_feature (325)..(325): n is a, c, g, or t
  misc_feature (574)..(574): n is a, c, g, or t
  misc_feature (644)..(644): n is a, c, g, or t
agcgggggagcgccgagtggttagcgtcggtggctttgggcatggcgactttttctaggcccggctgggtccatatcctgctcgtccttcatagtcccgcgagggaatgcatagtcagcaggtttgcaaacacgtgacggtaggggcgcaggattacgcaaagacgccatacacgcacaagcgaacacaagaggataccaagagacaaacattacgtccatgggaagtacgctcctatgctgacggccgacctagcctaatcctcacattcgactgaacactcgcgagcagtacttatctgcaattaatttattcgtcgccaagntgttatggtcgagcatggtaggacttagcgagttgcacgggcggtgtgccacgaatggtaaataggggacatggagaatgagcaaaacggctgagtgcgatttgctgcgaagttgggaggtctgacggaatgtttggccagaaagatagattggcgtgataacgagatggaagctaagcgtacgctgattatgggctgcacaacgactgcttagagcagcttgtgcagtgtttatgggccgagccctgnaaataccagtcaccatgacaccgtagactccgtttgacagcactgggcacattatgtccaggtttcaagncgagccaattcatttgatcgcgatcaggttggaagatcgggtactagatcgcgaaagtcggacatctaaagtagcatagacagtgtctacggatgggcacggaagcgcaatttaatacaagggaacagagaacatgaattagctccaggaaggaaagttacggtataagaaagaggcaattgacgtatgaatattgcccttcatatgtgagttgtgacacgaacacagggcacacagtactttcatgaaagctaatcgtcagtacgtcgtacatagaaaggccaggatttaacggtaagaacgacagaaaaaagtttcaagggtactcttggaccactcctgaagaa

SEQ ID NO: 654773 - DNA, 181 bp, Homo sapiens
gctgggggcatcccttgaaccccagaagcagaacaaacgagtggcccctatcttgcttaagtctaagaaatccaagattttgtttaaaaaaaaaatcagggctcagtggctcacacctgtaatcccagcattttgggaggccgaggtgggaggatcacttgaggccagcctggacaacata

SEQ ID NO: 654774 - DNA, 173 bp, Homo sapiens
gggtgtaccgtaaagcagtagtttcaacatttgagagtatcgattcctaatgaaaacactgcatatagaattgtagcattactcaccgcactatgatgatatgtgttttcttgtggaacgacacaagcaatacttaacaatcaaactcgttgtactacgtctcctgtggactc

SEQ ID NO: 654775 - DNA, 938 bp, Homo sapiens
cgtggtggtgggcgcctgtagtcccagctacttgggaggctgaggcaggagaatggtgtgaacctgggaggcggagcttgcagtgagccaagatcgccaccactgcactccagcctgggcgacagagcgagactccatctcaaaaaaaaaaagatgggggaacatggcagcacctttaaaacagcaacacgggccaggcgtggtagctcatgcctgtaatctcagcacttgggaagctgaggcaggcggatcacctgaggtcaggagttcaagaccagcctggccaacatggaaaaaccccctctctattaaaaaagacaaaaattagctgggtgtggtgatgggtgcctgtaatcccagctactgtggaaagctgaggcaggagaattacttgaacccaggaggcggaggttgcagtgagccaagatcgtaccactgcactccagcctgggcgacagaagtaagactccatctcaaaaaaaaaaaaccaccaaaacaaacacttgttggcggggcgcttgggctccgaaaaagtttttgaacccatcggttgggcagcgggaccccacgagtgaagagtgaacagtgcgccatacatggtcccagagagaaacccgcgcagaactgaggcgtgtgtatcctcaccaaaaaaaaaaacgcgggggaatcacgagctgttttggacacaatgcacagggggggtcgtgatgaccagtcgggcctacacagagaggccaggggactgaaataatgccgacgggcgaggaagcccacactcctccagcaaccgccagaacagcacagcgcgcgcagacgcactctccatcgcccccgcgcgcacaacacgaacacaacagcaccaccaacaccagcaacacacacaacacacccagctacacgagcagacatcctagccgaaacacagcgacagcagccag

SEQ ID NO: 654776 - DNA, 118 bp, Homo sapiens
  misc_feature (18)..(18): n is a, c, g, or t
  misc_feature (79)..(80): n is a, c, g, or t
  misc_feature (105)..(105): n is a, c, g, or t
  misc_feature (115)..(115): n is a, c, g, or t
gatcaccatgaacaaagntatatttcctatttatttattatatgtgcacttcaagaagtcactgtcagagaaataaagnnttgtctaaatgtcatgttggagatncctttgcatnctt

SEQ ID NO: 654777 - DNA, 219 bp, Homo sapiens
aaaaaaaaatccccctttggttttacccctaaaaaagggtttcccccattttttgggttctgacggggtttttaaaaaaaaggggggccccccccccttttcctttcgccggggggggggggtccctgggccccgttttttttttctttttttttagggcccccgggttgtttttttttttttaggggaattttgcccataaaggtttttggaccccca

SEQ ID NO: 654778 - DNA, 162 bp, Homo sapiens
cggtcctgagtttcttcacttcgccagcttgggtcgtctctcccgagcctgtctgtctagttatggctcatccagctgacgctgcatcttctcttgtcccttctgtagccgcatcttctacttctctttgctctcagcagtctgtgtcacagaggcttttgc

SEQ ID NO: 654779 - DNA, 662 bp, Homo sapiens
cgttgtgatctctgcctcaactacaaactctgtctccctatcttcatactgattctgctgcctcagacttccgcgactaacttgagattacaggcttgctccacaatgcctagctattttcgtacttatcagtaaacacggggtttctccatgttgattcacgcatgagtctcaacagtgctgactctcaggtgatccgatccgctttgtgattccctagaagtgcttggattacaggcgtgagccaccacgtcctgtttatttgtatttgttttttttttttgagacaaagtctcactctgttgcccaaaagctggagtgcagtggcgtgatcacagcttactacaacctgcacccccctggttcaagtgattctcctgcctcagcctcctgagtagctgggaatacaggcacccaccaccaaacctgggctcatttcggtattttcagtagagatggaatttcatcatgttggccaggctgatctcaaactactgacctcaggtgatctgcccacctcagcctcccaaaatgctgggaatacaggcgtgagccactgggcctggaccaattttagtttaatttcttaataaaggggctcaatatttaatcaggcaataaataattaaagggtgcccattccttagttgccacgaagcccc

SEQ ID NO: 654780 - DNA, 256 bp, Homo sapiens
gtatctaagatccgggatcggtgtgtgtatcttctcagacagaagatagtggtctgtctagatctacacagtactttgggcagtatcacatcccttgcgtatggaggtggtgagagtgttgatcaagtggtatatggagtactcgatggtaaaggacaacactatctatttagaagctaagctgtatgtgcttatccccagggagatagaggtgttaatcaccatgacagcatgagttagaggacactggcatcaa

SEQ ID NO: 654781 - DNA, 940 bp, Homo sapiens
gattgacgcaggaatactttgtggtggctgcgagcttgacatgatatcatccgccgtttcacagcctccaagtttggctccacccggtgttgcaggaactgtgtattgatgcttttcccgagatcaggtggccatccagctgaatgacactcaccctgcagtcgcgatccctgagctgaatgtagggagttttatgtgggagtattgcaaaaactgcgcgctggtctctacaggcgatgtgagagctcaccctagaagcacctttcggttcctatcgacccaactcactacagtgcttcccgtgaagcccatgggtagtcggctgtgacccgggtggacctggtgtcgaagtaagctgcatccgcgtcgacaatttggaaatcattctatgagatcaatccaggaagcatttagttaatagaatttgtggccttgtttcctaaagatgtggaccgtctgagaaggatgtctctgatagaagaggaaggaagcaaagaggatcaagcatggcccatctctgcattgtcggttcccatgctgtgaatggcgtggctaaaaatccactcagacatcgtgaagactaaagtatgcaaggacttcagtgagactagaacctgacaagtttcagaataaaaccaatgggatcactccaaggcgctggctcctactctgcaaacccaaggacttggcagagctcatagcagagacacattggcgaagactatgtgaaatgacctgagccagcttgacgaaggctcaccagcttctggggtgatgaatgtcttcctccgggaactcgccacggttgaagccaggcagaatagcttgaagtgtctcagttcctgggggacgcactcaaaagtgaagaaaaccaatcctccatgttggagtcacgggaaaggggtacctggtaaagcgcacgcttgacgttgctgggacc

SEQ ID NO: 654782 - DNA, 400 bp, Homo sapiens
gtgtgcagagggggttctcagagagaaaatgtgaaaggaagagatgaaggagagttttcttttccttttaattttggattttttttcagcagggggagggaaggtaaagtaatactatgcagggtggagtgactgagggactgggacaggaatgtgggtcactcccacagctgtgacagtgtgataatggggatacaaggtttctccctgtgtccctttggtcttcacaaaggcctgacaacacggtgatggcctcagggcgggaaaagggagtacctaggggggtcatctagtagcagctccggctcccccaaatctagcaggtcttagagggacatgaggaaatcaggcttttggactttcccctccagtgccaaaatctacagggcacgtgaaaagc

SEQ ID NO: 654783 - DNA, 378 bp, Homo sapiens
aaacgactgcggttgccccgaaggccgcgactcgtagatgacctccggtgcaagtggcgtccaacgggtgaccctgactcgtgaattatgcccttgtggctggcatccagagggtgccacggaggtcctctatttattgttttcatctatttgggtacgaagtgtgccaagtcacacgaccttttgccaagaggtttgctagacagcagaagaatatcgctctctctcatcgctcatctcacgcagaggatgccaggcagggtgaggatgggggagtagatgccgcttttgcagtggctcgcactgctgtggccactgctgaccactgaggctcccagcggagggtgttcacagccaggtcccgggccacggagctcc

SEQ ID NO: 654784 - DNA, 215 bp, Homo sapiens
cagcttctcagatgaccaagatggtcatctgagaagctgaggatggagaacccaccaagccccgctagagccacctagactggatgcagagctggtgagctccctgcaggttctctgagaaggggtggatggcagcctgctccttggcctttgtgccctccaggccccaaagtcagggaaccaaaagaaggaaagggggccgtagctaggggcag

SEQ ID NO: 654785 - DNA, 576 bp, Homo sapiens
  misc_feature (29)..(29): n is a, c, g, or t
cattctctcgtatgtcacctgccactcangtgatcacccacacccgctgtgattggaagtgcatgcatctcgcatccgctagctctcgctacgtaagcgtgcacacacttcccattcatcccagcacctgccatgcatggatcttggggcaacatgccgacccaagtgtggctgtgtggactggtgtgaatgggcagcgtgtctctctccaggaactgaatccagaaatgggaactgacaatgatagtgaaaattggaagcaagtgcatcagatggtggttcacagtgcctatgaagtcatcaagctaaaaggatataccaaccgggctattggattaagtgtgcctgatcttattgaatccatgttgaaaaatctatccaggattcatcccgtgtcaaccatggtaaagggcatgtatggcattgagaatgaagttctcctgagccttccagtaatcccaaatgcccggggattacccagcgctatcaaccagatcgttaaggatgactagggtcgctcagctcaagaaaagtgcagataccctgtgggacatccagaaggacctaaaagacctg

SEQ ID NO: 654786 - DNA, 318 bp, Homo sapiens
  misc_feature (165)..(165): n is a, c, g, or t
  misc_feature (173)..(173): n is a, c, g, or t
aattccttatatactctctaagccactggaaacttgaggcagagaagttaaaagacgcacatggatttctctgaaatatttgaacaccatcagaacatgttggttagttcaggaccataccaggctttgttgttacattgaattgtaaataacttatattcagancctggatntagaaattcttggctgagaattgacactacttctggcttccaggagccagaacccaccttcgaatgggattttgaaataagccccgttgaagagactcacagacggctgaggccgcagcacgctgtgagaccttcttcaggtcgg

SEQ ID NO: 654787 - DNA, 1118 bp, Homo sapiens
  misc_feature (79)..(79): n is a, c, g, or t
tcacaggtggatgaagatgcctctacctgttgatcagcccgagagactcggtgaacgcttggaagttgcaaacttatcngaggaagtcatgtattggcagaagacaaagctcattacacttttactgggcgttggccctgggtgtgaagggcttgtaccagtgggttgtgtgacggtggtgaccagcgtcaacgaaattctatacgatgaaggcagaccaggatcgattggcgaggatggcgtgctgttgtggttctctgcagcaaactagtgaaagggacgtcgtgagaacaggttaatgggcaggaggcgtgtactggaggatgtaagtatggctccatgcgtgtgacaacaggtgtgccaagtaggaacgaccgaggcaataggaaggcttgcttgcagatggatgtcgttatgctaataggcagcgtgaggaatgttggcgcaaccagtcgatagctggacagatgcagggctatgacgagtgcgagaccgtggtggcacagctcagggctgcgtcacagtgaaggcaataccgaatggtggattggatatgagggaaggcaccgattggagatatgggtatcctgggtataacagaaagtgttcaagtgaagcgagaggttcttctgagtgcaggtgacagcagcagagggtgattctgcgtgtggacagacatcatcaaagcggcaccaggaaacgtgtcctgatcacgacgctggtgagcattcccacggtggcgtggatctttggaccagattctagcacagttgtgtctgacaggatactctattaacgcaagactggggacccggttattcggagccattatatcctaagttggcaattagatgactttgtttgacatagttcaaatattggcggaccattttcttaagatgcagatgtacacaagtcggccgcagaccgggggtcaaacaacctgcgggccaaaaaaaagacacagcagagaacacacaaacaacgggggcgccaaataccgaggcaaacaccccacccagaagcacaccagagccacaggggccaaaacagcacagagtcaagacactgcgagacaccgcccagacaagcgcctcaggaccacaagcgacaggcaa

SEQ ID NO: 654788 - DNA, 363 bp, Homo sapiens
tttaaaagcatcggccaggtgtggtggctcatgcctgtaataccagcattttgagaggccaaggtgggtggatcacttgaggtcaggagtttgagaccagcctggccaacatggtggaaccccgtctctactaaaaatacaaagattagccaggtgtggtggtgggtgcctgtaatcccagctactcgggaggctgaggcaggagcattgcttgaacctggggaggcggaggttgcagtgagccaagactgtgccactgtactccagcctggggtgacagagcgagacgctgtctcaaaaaataaatgaaacaaacttaacattcatactttttatgtcaataagagttgaagttgcctttaa

SEQ ID NO: 654789 - DNA, 152 bp, Homo sapiens
gggggggggggggggggcccctttttttcccccggggggtatttttttaaacccctttcccccggggggggggccccccccccccaggggggggtttttcccccccccgggggttttttttttttttttttaaaccccgggggcttttttga

SEQ ID NO: 654790 - DNA, 442 bp, Homo sapiens
  misc_feature (264)..(264): n is a, c, g, or t
  misc_feature (284)..(284): n is a, c, g, or t
  misc_feature (322)..(322): n is a, c, g, or t
  misc_feature (382)..(382): n is a, c, g, or t
  misc_feature (424)..(424): n is a, c, g, or t
  misc_feature (436)..(436): n is a, c, g, or t
taatggagtttcgcccttgttccaaggctggagagcaatggtgtgatctcggctcactgcaacctccatctcccaggttctcgtgattctcctgtttcagccttccaagtagctgggattacagccatgcaccatcacgcttgactaattttgtacccttagtagtgacagggtttcaccatattggtcaggctgatctcaaactcctgacctcgggtgttccgcccgcctcagcctcccaaagtgctgggattacaggcgtcnaccatgcccagtctgggatnctgtttaaggtaatgtgaaactatggacaaaccagggnattgccagccaatgatacaagtgggtgaacactttaacaggaaaagcagcgacaaatggnttttctaccgggggattattcagttttactacccttcatctncacttacattantttttt

SEQ ID NO: 654791 - DNA, 1181 bp, Homo sapiens
aggaatacatgcacctggccctgctactgcttcgctagcagccagctgtccaccgccctgagcctgctgtacctgcgccctgctacctcatgctgcctggtgttctggggaagaccaccccgcagcatgcgcgcctgctgctgccaacaaccccggtgctgcgtgctgcaccgcgcgtgcactggacctccgacctgctccctgccccttccctgcacgacctgctgctgtgccgtcacccccccacctgtaccaccgcgcgcccaccgcgcccctcctcgcgctggcccctcccgcccacccacctccgctcgcccccgacgctcctccccaccatccccacccgccctcgacgttccccgcgctcgtgccccctgccctcccccgcacgcccccgacggcccttaccccccactcctccccacccacccccctcccttgctgccacccgccccacctcaccaagacccccccgcccccccctcccccctcctcccctcccccctcccctccccccaccccccctccccctcccccccttccccccccccccccccctccccccccaccactcctaccccccccacccccgcctccccgccgcccccccccctcccccgccccccctcctccgctctcaccccgcccccccccacccccttgctccccctccccgtccctcgcccctcccgcctcgcccccctcccctctaccccccccctcttccccccctccccctcccccccttcctccccccccccccccccaccacccctcgctccccacccccctcccacccccccccccccccccgcccccccccccccctccccccccccccttcccccccgccccccccccccccccccccccccccctcccctctcccccccccccccccccccccccccctcctccctccccttccctcccccccccccccccccccctctccccccccccctcctaccccccacacccccaccctcccctctcccccaccccccccccctccctccctcttcccccctcctcccccccccctctcccctccctcccccccccctgcccccccgcaccttcccccccccccgtcccctcctcccacccccgcccctcccgccctctctcccctcctcccccgcccccccctcctcctccctctcgcccctctcctctcc

SEQ ID NO: 654792 - DNA, 479 bp, Homo sapiens
  misc_feature (3)..(3): n is a, c, g, or t
ccnctcacgttacctcaaggcacacctacaccccttatccccatactagttattatcgaaaccaccagcctgggcaacagagcaagattcagtcaaaaaaaaagaaaaaaaaaaaaaaggggattcggtcttttacaacaacttaaagggaactgaggttattatgcaaagtgaaataacccaggcacattggaacagcgggtctcacatgaaaattggtgacagtgaaccaaggccctcgtttgtagcattgacactggccacttcctccacggtgcacaggcttggggaaggtggggacttcccaagcaaaagaacaaaatatgctttgcgataaaagttgggggttgggtttggcttgtacaggattgttggaaattggacctagaatccaaaactcactacagaatatttgcagtcttgcttacaagtctacgtttaatgatgggccatattgtagaggtaacccgtgggggggg

SEQ ID NO: 654793 - DNA, 267 bp, Homo sapiens
  misc_feature (152)..(152): n is a, c, g, or t
  misc_feature (216)..(216): n is a, c, g, or t
  misc_feature (222)..(222): n is a, c, g, or t
  misc_feature (237)..(237): n is a, c, g, or t
tgaaaacaacatttccatgagttgaaaatgggcagggtactgtcctctaaatgctcccattctgtagctgtgtttacagctgccactagcacatgatttatagaagaggcatatcagctggacccaaggagatgtactcatggacttaagangattagattataaatgccatcccacacaatctttaataaacaaaacccaggtgagctatatcantctttngctgcatcaaaagangggaaaccaaacagttgtcctcttgtggtt

SEQ ID NO: 654794 - DNA, 121 bp, Homo sapiens
aaggtacttcatttcgagattgagtttcttgaggatcagccacttcccacgtggagatgggcgtcaactactgctaccctaatttaacccttcgctgtggacactaagacactccgccggt

SEQ ID NO: 654795 - DNA, 80 bp, Homo sapiens
tgagtttgaagttgcagtgaactataatcatgccactgtgctttagcctggacgacaaagggagactctgtctcttttag

SEQ ID NO: 654796 - DNA, 177 bp, Homo sapiens
tatcgtgtcacacagtgatccgggagcacagcactttacagccatgataactgcaatccgactctcccagaccaagagacggccaaacagagccaggctccaacttggcagtgttcacagagcaccataaccggttgaaatgccacaacctagaaggcagactttatccaaaaggtg

SEQ ID NO: 654797 - DNA, 304 bp, Homo sapiens
  misc_feature (287)..(287): n is a, c, g, or t
tgttgatggagtctggggaattgcctcatttatttcaatcaatgtcgatggtcatccggttgtccttcaagaatctcctggcgacgttctgttttcaccaacatattcccgatgaggagcgagtggtaatcctgcgcctccatgtacagacgtctctatccagggtcaccatgtctgaactcctggtgaaaacgggcgagtacctctgtctcagaccgacgggaagtgtagtgactccacgctactgagaaaactcgcttagaagagattaaggcgacgctggtcangtgcttgagcagatgtc

SEQ ID NO: 654798 - DNA, 401 bp, Homo sapiens
aaaccggggcaaatcggcagaggcttacctgaatctgcgaccagctcttaacagcagcaacttgcgtcatctcagaaacagcacagcttcacctcaagtaacaaaactatcaaatccttcttaccacactcaggaaaagactggtctatagtgtgatcctgaaaccttgcctgagagcctctttattttctgtggaagccgaatagcagtaacagccagaaaactgagaaagctctgatcaatatccaaaactgtatggcagaaaagagagaaaacagagttgatagagactcagctgaaagcatgtgcctcttttatacgaaccagggctttgcttcactttacccaacctcagcaaacattcgatgctttggagaggaacttagggactcaccaggaaa

SEQ ID NO: 654799 - DNA, 1801 bp, Homo sapiens
ggctttctggcagctgcctgggttatggacagaccctgcctcccctcccgcacggacaaccacctagatcccctatcctgctctccactatgcattcagggcgtggctgctgtatctgagaacattagcaactgggaagagagatggagctcacatggacttacccggtggcgcattactatctgcacaccctatcgctatccaacgatcagatcccctcatatagttccacctgctgcgacatagcacagattcataagacagatataccctgactgcccatgcatgccatgaagcagactagcatcacagcgagcgcggcaaggcggcacccatgaggcactgacaccattgagcactttaacggatccttgctgactcatgcactggatgataacatatgctgcacacctattaccctatccgctccacgatcaccacaacactacatctaaacgacgcataaggcgcatatcaacggcaaactacacttataaacgacatcccacccaactcatgcgcttgactgcaaaacagccaagaagacaaaaaccacatcacacggagaacgacgacatcagacgtcgaaatacaaacacccacacagcagctcagcgcacggataccacactacagctcgaaccccacaaacgcagcgcaatacgaggacacaccaccaacaaacgacggacgacaccacacacctatggcgaaagaacccccacaaacgccacacgaaatcatccaccacacagcacaagccacggcgatgaacacagaaacttgacggaacacaagaaccaaatccacacagcggcacaccaccttgccgcaagacggcccctggggaaacacaccaacaccaccacagtatagagacaccctagcccacaaaccaggcatcagacaccaaaccacaatgcagcaccacactcagaccaccacatccactactcgaacgcaacatgacacccacggcacacacgaggagaaacgcctaggcacccaacgacaacggaggaccacgcgagaatagctacatgcaataagaactcatgcacgagaaaacaaacaaccacagaggagaacagggacacacaccaccgccacaaagacgaccagacaccagagaacaacagcacaagacacagacagcaccaccacccataggcgacataaacccaggaccgacagtacgaacccacaagacgacacaaacagacgcgaacagcaacgacaaacctgagccaccacgacaacatacacacatatcagagacacgtaagccaacaaccaacaacagcaacacgaagtaactcatcacacttactccaatccaaatactctactcaaccactacaccctcgaccacactatcagctaaattatacagaactcattcacctactctcatatttcgataactaccactctacatctcgtatacacctccgaacaatcctcactatctatcgagcacacaatttcacaccaccataaatcacttcgagcgattcttgcaacaccacatcacacatcgcttctttctatacaacacacttctatctatactagtgatctatctaaactatgatacaatcctaatatcctcacaccaacctctgcatctactctactagtctacatcacctactcccacatagcacaatataatgcgttctcatcaaccaccacgctctctaacctacattcccaatcacctacaaatatcacttacaccaccatcaactatagaccattcaccacatctgctgtccagtatattaacaacaacacaata

SEQ ID NO: 654800 - DNA, 843 bp, Homo sapiens
  misc_feature (456)..(456): n is a, c, g, or t
cttgcccccgaactgaacagggagatgcacttgggggtggccattaattccattcactatctgggataatatttccctccccagtaatctagttacttacaaatatgctggttacaaatgcgccagactccctggtggtggtaccatatcactgctggtacaatcctgcttcaacaacaaattaaaatactaagcttgcatgtagaaaaagctcttaatgctagtagcactggacttacgttgttatcagatgaatttgctcaggggcgtactgttgtgttgcaaaatcaaatggcattacacatccttacagcagcccaaggaagggtttgcgccttactgcatgctgaatgttgtgtgtatatccctgacaattctcacaatattactctccttgcccaagacatgcaaaaacaaagcagttagaatataaccatgggcaccccatcgtgaatnggctgtccgactgggcattggcgttggccgtggtgggtgtggtttttattaattgtgcttttaattctcctgtgttttaccctgtatctgtaatctatatcaactatgccttccccatgtatctttacacgttttatccacaactgagtatcaaattgaggccgaatgtgggaggaacaagttaacatattttaacttgtgaacctcaattgaacatggacataaacgatgggtcaccaaactcccggaacagggttgcatgagccccttggagggcatttcatccagcaaaagctttttcagagacaatcctgtcctgtaccgtcaagttacctggagaaaccaacagacaatcacaaaaacaagtagacctttttgtgtcctgag

SEQ ID NO: 654801 - DNA, 545 bp, Homo sapiens
tgactgtatcatgcctagctgtatcctgagtaacatagtaatccgctatcgaggacgacgtagtataacgactgactagagaatgtcgtaatcataggtcatggttgagtgccagagtgaaatcgaatatagtcagcccaatcacaatggtgaagatggtacgtgtagagggaaggtacatgattgatattgctagggtgtcgcatccaattaggtgcatgagtagttagactgcagtaatgtagcggttacgcgtacggacagggatatgggttgaaagagtaggctgatggtttcgataataactagtatggggataaggggttaggtgtgcctgtggaagaaggggctaggattaaaatcttagagcgaagcctataatcactgcgcccgcacataaggggatggccatggctaggttaatagatagttgggtggttggtgtcaatgaatgaggcaggagtccgagaaggttagtagtggcaataaaatgattaaggatactagtataagagatcaggttcgtccttaagtgttgtgtatgg

SEQ ID NO: 654802 - DNA, 951 bp, Homo sapiens
aatattaataggtcaacactctcctagcctttactactaataataattacattttggactagcagaacacaatggttacgtaccaaaaatccacccgttacgagttgcggtgtcgaccctatatccccacgtgcgcgtaccttttgtccatacaatgcttcgttatgtagcttattacctttcttatcatctgatctagaacatcgacctccttttacccctaacgcatgagctcgggtaccaacagcaaactaatccgtggccactaaatagttagtgtcatccctctattattaaatccagtcacttccctaggcacctagaagtctcgggcctatgtagctgacataccgagaaagagtattagtactgagaccgaataacccctgaacgtgactctctcctgacatagagatgatcaaatgaaccccaaaataaaactagcgggggggggggtccctggatctgggctcttcgccgagtgacttgaccagcatgtgtctccccacggaggtcctttggtcctcccgtgggctgccgcttcatcgcgaggagtgacccattctggagccagggggggcgaggcacccggtattctaaccctgaagggaagttccggagaactaccccgaccccgtgggccaattgtcgccaattcaatccccttttcgtgcttcgtgggggcggcgtcaccccctgggtgagagctcacgcaccacccatcaaattccagagggcatcgtagggaggactagacgtggtgcccagggtgcttcatcgcggggaaaccccggaaataaaagtcatctgcctgccccagtcaggaaattgcacacaaaaccaggaaaaaaggcggcggccgattttaaatcacccagcgggggagacacacaaacacgagggggcctcccggtatctaggacaaaggggggccctaaagagacgggcaaa

SEQ ID NO: 654803 - DNA, 756 bp, Homo sapiens
gggacaaggccaacaagctatgtgtcatgaagcttgtcacgagtatctgggtaccaggttagagctcgagagatggctgctgtacacgtttattgcaactggttttgatgtctacgaatttcagctccaatcttcgcatcctgaggaacacttaaacgtttctgcaggtcccattgtgtatacagacgttgagaaggaccggtacataagcttgtctgggttgccacgaagcatatctttcttattctgctccatcccaagtaaacaggctggtgccctcactgtgatagattgttccgaaacaacataatcaccgtggagtgcagccagttctacgcagaaatatgcctgtcagctgggcgattcaacaaagtggagtttccccaagcacagcttcttgtgaagaagtgcgtgtgagaggtgtgtgtatatgtgtgtgtgtgtatttgaagtttattatttgtattgtgcaaaaattttgtgtttgatcttggggattctggctgtgaagtttggtcgcacgacgaattatggtgaatgagaacatttgcttggtctagagaagatcattagatgtgttgtgaccatacaagttgtagacagctggatcgtctgatgtagtaggtatagttaagatagccgggactgtttcccgggcacagaatagtgatcgtaagttaggatggacgttggatgtgattatggatgaataagggaaggtcgggggcctattttcaggccggggtggaaatccac

SEQ ID NO: 654804 - DNA, 493 bp, Homo sapiens
gcaacgagctgactgtggaagtgagttgtatcggggttgatgtaaataactgacagcaccttatcctgagtgatgttacagctgcagacccatggtaagccagccgacaagtatcatatgccatatattaactagaataggttccagcttactggtttttcctttcggagtaggtgttagtagtaggagatggcacagtggtgatagtatggtagggtgccactgtaagaagttatagtcttataatcacacagagaactcatttagtgctcactagtgccatatatggacaaaagcttgtacaacgaacaacccagtagtgtaaggacaacatacattacttttccaaacgttgatcaactacttgcatctaaccaaggtcattacaatggaattcttgataggcccaaaagttcatcacacagtacacaattccttctatctatcagcatcaggaaatgttgtgtaaatcaccagtgtatgtaggaaaatg

SEQ ID NO: 654805 - DNA, 547 bp, Homo sapiens
  misc_feature (315)..(315): n is a, c, g, or t
  misc_feature (486)..(487): n is a, c, g, or t
  misc_feature (489)..(489): n is a, c, g, or t
catgctgctgccaccccagacactggctttgcctgcaacctctgtgggcagagcttccgaggctgggtggccctggttctgcatctgcgggccaattcagctgcaaagcggcccatcgcttgtcccaaatgcgagagacgcttctgcgacgaaagcagcttcgagctcatcatgcgcgtgccaccctcccgccccggagcccggcccttcatatgcggcaactgtggccggagctttgccagtgggaccagctagttgccacaagcgggtgcacgtagccgaggccctggaggaggccgcagccaaggctcttgnggacaccccaggggcgcccccggtgaccgccccccggcccggtggagatgccgtcgaccgccccttccagtgtgcctgttgtggcaagcgcttccgcacaagcccaacttgatcgtcaccgccgcgtgcacacggcgagcggccccaccagtgcccgagtgcgggaagcgnntnaccaataagccctatctgacttagcaccggcgcatccacaccggcgagaagccctacc

SEQ ID NO: 654806 - DNA, 367 bp, Homo sapiens
tggggactactgggtttggctgttctaaaaaatcataaagaagggaattcatagtggggaagtttcggaaaacgtgaaaaagattcagtgtgtgtaaagctttttttggctgtgtaagttatggcttttcaaaagaccccccctttttttacagaggacttttttggcgcaacgtggtggacacttttcaagtggtgccttgaaattcttattgaccctcaactttttcaaaagcactttttccaagtgttatttatagccagtgttaaataagtgtgtagaatagaggaattaaccgtgttattatctgtgggataaatataaaatatttatttcggcacctagtgaaaaaaaaataaaaagaggg

SEQ ID NO: 654807 - DNA, 349 bp, Homo sapiens
cggaagatggacctctagtatccagattatagtttctaatagcattgcctacaccccactcccaaaagacgtcagggatctctggaggaatgcctgattccagttttgaggcaagaaatgtatagaatatgccaggctcatcttctcacgccagtttataccagctacagtcatacttagctttatcttgctctgcgctattgtgcttcattttattgcactttgcagttactgcattttttacaaattgaaggtctgcagcaatgctgtgttgagcaaatctattggcgctatttttccaaaagcatgtgctcatttcatgtctctgtgtcacatcttggtaattctc

SEQ ID NO: 654808 - DNA, 252 bp, Homo sapiens
gcggacgatgccttcggacaccatgaattttgatgttataaagggcaagccagtacgcatcaatgtggtctcagcctcatccatcacttcgcaaaagtagagtaggcaacatattcaataaaaatctggacaaatccattgataataaagcactgtatgatacaattctgcttttgggtcacataccctcatgtaaaggtcgtttgtgatagaaaaaaggttcccagggctatagggtatagtacacactga

SEQ ID NO: 654809 - DNA, 228 bp, Homo sapiens
tcgacgcatatcacacagtcagtggagtggtgcagtcttggctcattacaacctctgcttccctcggtgcacgcaattctctgcctcagccacatcgagtagctggcattacaggtgtgcatcactatcctggctcactatgtattaccagtagacacagggttccgccatgttggccaggctggtctcgaactcctgacctcacgtggtccacccacctcgggctcc

SEQ ID NO: 654810 - DNA, 927 bp, Homo sapiens
catataatatagtaaaaaccagacctatgagccctaataagcggctccactctaatccctcctaatgaactgcggccttactcatgtgataaaattatcaactcaataacgctcctcatactaggcctacctaatccatgtatcactaaccatataccaaaatgatgcgctgcgaatgtcactcaagacgcagagcatcattacacacagggtcaacccactacttcaactgtccaaaaaggccttcgataccgggataatcctatttatggacctcagaagtcgggacttcgcaggatattctgaggcggggacgagtccaggctgagcccctacccgccgaattaggaggggcacttgggccccagaggaataaacaccggtaagagtcccctagaagataaccaattcctacagaggagcgagtccgtaatactcgcgatcaaggagtatccaagtgcggccctgagctgcgaccatagtcggacatagaaaacaagcgaacccaaataattcaatgccaccaagtttatcccccctcgaggggggtctctgatttaccctcctacaagcctcaagagtacttcgaagtctccttcacattttcgacgggaatctacggtcaacatttttgaagcacaggctccacggactcacgtcataatggtcaattcctcaatatctggttcatcgcaactagtattcacttacatccaacatcacgggatcgaaacgcgcgatactggcttgtaatgggcgctatcggagccacacgtgagccaaacaaaaaaacaaaaaagaggggcgccgcagacatcaacgctgccgggccacgaagagaaggcaagaacgagggggcacaaacgcgcaggcacctcggcagccacagcccccgggaagaggcgggtgaaccatagacacacgcaa

SEQ ID NO: 654811 - DNA, 216 bp, Homo sapiens
tactgagtattgatagttgggtggttggtgtaaatcagtgaggcaggcagtccgagggggttagtagtggcagtaaaaatccttgaggatactagtataagagatcaggttcgtccttcagcgtcgtgtatggctatcatctgttgtgaggttactttgattagtcatagttgggtggtgattggacgagcgttgatgagatatttggaggtgggg

SEQ ID NO: 654812 - DNA, 794 bp, Homo sapiens
gggtggaggaagcccctgtgaaaaaagcgaagcgatcatcctgaccactgctgccctagtgcttatggaggaacacttggtgatagcaggaaagagaccatgccttgtgtggccatcagtgcttctctttaacgcatggcaaaaagatatgcatgtgctgtaagtccctatgtgcaagcttattggctctgtatcatgttttatacacgcgtttaataaactattgttcatagaatgatattatgtacgagtttatttcagataaatggacaaataagtttactttgtatctgaactcaaaacaaagtagttgtatatcttaactattcaaaattgggatttcccaatgtgacactatcattgaatgcaaacccctccagcccatcatacgcctaggctgcctacctggtaaatctgtgtatagtatataaacatgtaaaacataggttgtattttactctatgtatgatgcgtaagtcaactgaacagtttatttattttacagagaaaacttatcctgtgaactttactatatctctgtgaatgttacttaatttggcttgaaaattagcaggggtttaaatgctatgcagtcccttgagtagagaaagttttgagggactctgcctggtctgataacgtatcttaatatgatctggcagaaactcgcgtgttccaggtaatggtactttagctagagaacggttcttcactggcttgccgtcgcacgtcgtggctctgtgtttagggaaatgtccttgtcagatttactgcctcgtggaactgtctaccag

SEQ ID NO: 654813 - DNA, 416 bp, Homo sapiens
  misc_feature (11)..(11): n is a, c, g, or t
agaggattccngaaagaggtggtgtctcccacatatttgtggttatctacctttggtctttgatgatggtgacgtacagacggggttttggtgtggatgtcctttctgtttgttagttttccttctaacagtcaggaccttcagctgcaggtctgctggagtttgctggaggtccactccagaccctgtttgcctgggtatcaccagcagaggctgcagaacagtgaatactgcagaacagcaaacgtagctgcctgatcgttcctctggaagcttcgtctcagaggggcacccggctgtgtgaggtgtcagtcggcccctactgggaggtgcctcccagttaggtaggctactcgggggtcagggacccacttgtgcaagcagtctgtccattctcagatctcaaactctgtact

SEQ ID NO: 654814 - DNA, 165 bp, Homo sapiens
cggactcacaagacggttcacactcagcgtcctccgagggctaatacacatccttctccccacactctgttggtcagaagtcactgcttgggcccatgtacctttccttctcctccaccacgaggaggaggaggcacagtagtcccaaaatgacagttttgagca

SEQ ID NO: 654815 - DNA, 637 bp, Homo sapiens
  misc_feature (637)..(637): n is a, c, g, or t
cctacgtggttgagaaggcaactcagtacgtagctcatgcggatttgctatagctgatcatagtcatctgattacgcttgctgtagttcgcacactaggtggattaaggagcctatcatctgatgcgtgaccatgaaggcatagcagtcaacgattcccatggatgatcgcaagatcagagctccttcgagtattgtcgatccctctgcgtctccagctcatctggtatgctacagactgcatgccacactcaaagctatgtcccgtcagccgccagagctgagccactctaatgctagctttacacacttctgatcagcacagtgtcgtagttttagcgcagctcctgagtcgaatgattcatgtgatagatatccccgagactggtcctattgcctcgaaagcgaagagtggtacctgcgctgggcctgtagatgggctgttcgaatctttcagatatgctggggatacccccatgtacttgctagattaatggctctgtccttgaatgcctagcttttatgcattgaggcgcaggactgccattgttgataagctctcaggcctccaatctctcagagtgctcgggtaccttccctcaactaagttctttaatatcccgtttttctctagcttn

SEQ ID NO: 654816 - DNA, 308 bp, Homo sapiens
gatagtgagtgcgcatgacaatccttggatctcccttcgtggacaggacaccggggtctcctgcccacccaggaaggcgcgaggatgctgatttgaagcgatgtaaatagtgattccagacaccgcctgaccatccgctattccagacttgctaaaagcgaatgtaatctggcccctttcatgctgtgatacctcctggtacacactggcatctctgatcctcttagaatgggttctggtcctagttgtcctccctctggagcctcgtcctgtggtccgcctcttccttgcctcggcgcccccggccg

SEQ ID NO: 654817 - DNA, 1487 bp, Homo sapiens
agcgggggcgccactgcgcacacgtgaccgaaccgcgccactgctcatcggccgaggcgactgcggcccgtcgttatccttccctgcccggcccttgacgtcgggacttatcgcgtgctcacgaggcgcctggccgacgcgcaggtgcccaagggctccgggctcgtgggttcggcagccacgacggcgtgctcacgaggtgtgctgttggtcgtgtggcagacgtgagtgcgccgattgtgctggtgtgctccgtgatagggtcgggcccacactaggagccttgccttgcccgcttccgtcgaccagatcccgctcgcaagctcactgactagtggacctcagcaccacagtacccttccttattgcattcttgcgaaccctggggagatgtccactcgccgcgagtaagctacctttatgtgacgaacggctatactagaaaggctttgacgtgcggccctacgacttgccaaggtgcgccgatctatgcgatccttcggctgggtatactccttctcgtacgttaccctctgcgggcactaccgatgccattccaacctaccctggtggcggtctgtccaacctgactgtgtctgccggggttcccgcccattttgcttggttcgtcgttggccctccctggccgtgcattccttgacgtcggttctgattgcacttttagccgcctttggcaaggtcctagtgcctagcgcaatgggtgcctttgcagccctgcgcggcgtatcacttccggttcccccagggcccttgcggtcggtctatcccaccagctcttgctttcaccaaggggcctgccccgaatatgcctattcggttcggtcctgagtcgggggtccataaccaccgctacccgccgggcaggccttgccaccatggcttttcttgggaaggcttgggttgccgggggattgccaggaagtgatacccaactggctagccttggtccgtccttgaacccctcgctgcggttgttacgagagcgttcaggcccccctgccagctttgagcctgaggagcagaattgcggcgacctgttggcggccaggctcgttgtggtaccattgggcacgcggaaagataccggggcgggtttgtgtgtgaaccccctgggtgggaggagttaggaaagtgtccagcaccgaaaggagagctaacaaaagctccacatcgccagacagcaccgtttccttcccccagggtgcatggggcccatttgcctgtgttgcccccgcgtcaaaccaggggagccccactggaattttgggggggtcctgcaaggttacgcctgcttgtgagaacacggggctcgcgggtgagtgcgcttgtggggggaaaccgtacgcaagttaccttgtgcaggaaatccccttgttggtgagaaacgaaggatgtgttgactgaggagtcgggttagcacacgcgggaagataaagtgtgtcgcgtcattttagccgtcttcccgc

SEQ ID NO: 654818 - DNA, 183 bp, Homo sapiens
tataaacccggaaaataggctattatgaacatcggtcttggagaagtattctccacagcaaacaaacctacggaagcagaaatctaacttgggaagtgtcatccatatttaagtaaatatgctaacatacggaaatagaaatctataataaataatggccagtaaaaccacctctacacataa

SEQ ID NO: 654819 - DNA, 242 bp, Homo sapiens
agaaaaaaattttaaggtaaggttaatggaattaatgagatgaaaagatagtaaagcccggttggctacttacatgaaagaagactttaaaaaataatcacggcacaaaaggtaaaggggggggttatgctgtgatattaattttcctcaataaggtttttctggacggttcaagaacaaattaaagtttccacggcaaattggttttcaaaaggccgaatggcgaaacaatggcgggcttc

SEQ ID NO: 654820 - DNA, 1043 bp, Homo sapiens
  misc_feature (9)..(9): n is a, c, g, or t
  misc_feature (43)..(43): n is a, c, g, or t
  misc_feature (53)..(53): n is a, c, g, or t
  misc_feature (123)..(123): n is a, c, g, or t
  misc_feature (133)..(133): n is a, c, g, or t
  misc_feature (145)..(146): n is a, c, g, or t
  misc_feature (152)..(152): n is a, c, g, or t
  misc_feature (271)..(271): n is a, c, g, or t
  misc_feature (321)..(322): n is a, c, g, or t
  misc_feature (329)..(329): n is a, c, g, or t
  misc_feature (331)..(331): n is a, c, g, or t
  misc_feature (530)..(530): n is a, c, g, or t
  misc_feature (580)..(580): n is a, c, g, or t
  misc_feature (747)..(747): n is a, c, g, or t
  misc_feature (813)..(813): n is a, c, g, or t
  misc_feature (821)..(821): n is a, c, g, or t
  misc_feature (857)..(857): n is a, c, g, or t
  misc_feature (901)..(901): n is a, c, g, or t
  misc_feature (955)..(956): n is a, c, g, or t
  misc_feature (981)..(981): n is a, c, g, or t
  misc_feature (985)..(985): n is a, c, g, or t
gtttcatgnggcgaactaaccctgcggacagggttggttgtgngatggagctnagcatgctacaagcgaatgacagcatccatcacataactcttcttttcttggctgtctcacaccaccacncgcattgatnctcattgtagtnngtagtnttactagaacaagctcatgccgatgtgccagtgaattataatattaggtaatatgtgaacaattttttcagtacttcctaaccataccttttgactacattcccaccatcgtcgatatntatttaatgtatatagctgtgccttaaatctcccgtttcctcctcgttcnngtttgcngnttggatggccttgatgaatcacacatatattaagtcctttcatccactcgattgttacctcttgggttgcttttctccttataatgttccgagtttattcttcgtgcttgcctgaatattgcatctctctcacctcgtctatcttcccatcgcgcacaatgcgcactctaactagtctacttcatccccatctcggtgnttccagtgtctatacttctcatgagacatcgctgtttgtgacattttgcntgctaggaacaatattactataccagtattggcgtcttcggagccccttttaaactattattccgcgattctatattgacataaatgtaaacgactacatagaggcgctgcccggtagtgccactgctaacaccgtcggcacgtgctacttccgccccgcgtcgccntccacctcatcacaactctggacggcgatacccacactctccacacgatgctctctctacatcttnatcgtaantgttcaccacacgtcatctctcgccacctctcgcgntcgccgctctcgtactcagtcacctccgctcgccagtcatcttncgtctacagaggtctgtacgctgcacgctatacgattcgtatcgcaccgcatcnntccctgttatcgctctcaccacacncaantagctatacgaatactcaacacgtcacgcacacagcacgccgaccctagtcattcatt

SEQ ID NO: 654821 - DNA, 852 bp, Homo sapiens
gggcctgcaagggggcatcccccacgcccacccaggacagtgtccccccgaggactccgcagcttctgacacaactccctgggggctacggtaggcgggcctagcccggcctccacggccccaacggaggcgccctcggaggttgggatcttgagccgcacagctgagccgcctcgtgacccactgctggactgggcctgaccttcccgagccagtaggggtagagggaggccagccacctcgcttcctctgggaactgcaccagccagtgatcgggggctcttcacgggtttcgtgggttttgcccggaaggcggctgttcctccacctgctagcgaggtcgcgacacgaggcattgtacccgctagtgagatggttagagatcggtcagcaaggagaggaggtggtggaggttaccgcggaaggttcatgagagagggtcttggaataggtctgcacgtgaaccagtcctgatggatggagtaggggtcccagtggtgaagcgtctctgagcaaggtagtgaggtgtggtaggatgaggccgtgcttgggcgatggggcactcgcgcccgtagtagccggccgaccgtcagccacggctcatgcactggtgctccctgcacgtgccgtctccatggcccctgccctccctgcgtgtgctgccaggcttggggtccccgggagaacagagcttgcgcctagggaatagggacgctggggtgcaggcgccaacatcagtggcagcagccagggccgtggtccagtcccattcggggatggactgggccggcggccgaaccagtcacttcggggaggatgcggaggagcagataatccagtctattaattgca

SEQ ID NO: 654822 - DNA, 333 bp, Homo sapiens
gggcccgtcgtggctgcaacccacggtggtatgttagtgtttccaggcacttgacagcagctgccgggtagtgtgtgtgtgcgacaacctgagagttcctggaggaaagggactggggacactttctaagaggttctcctgcctggaatcaagtgatgcgtgtccacaaggcaagagagggcggctccacctggtttaattttgggaacgggacggagccatctcctccttgcagaactgtgggccccactctttggtgctaacacttcccctacctcggttcactgtacaaagagctggtctgccccctgcattaccctgaaggtccctggc

SEQ ID NO: 654823 - DNA, 130 bp, Homo sapiens
gcctgatggtctgactctacgagtgatccccttgcatatggcaaggccaagcgtaggggcacaccaccacactgatatcctgtaccatgtcctgtgccttacacaagctccttggccttgccatatgcaa

SEQ ID NO: 654824 - DNA, 271 bp, Homo sapiens
accaaagggggggaaattgggttccgggaaattttaattttcccccctttggggccccctaatgggaacggccggtttgcccggggggggaaagggaaacccctggcttccccccgccccttgggggtttttaaagggaatttcccggggggggaaatttgggaaaaaaaaatgggtttttttttggggtttcaaaggggggcccatgaaaaactgtttgggtaaacccggggggggggcccaaaaaaaagccccgaaggcccttttggta

SEQ ID NO: 654825 - DNA, 751 bp, Homo sapiens
agcgggctgtagtggcttcgctcttcggtttgttctctgtccttcgctaacgcctcccggctctcgtcagcctcccgccggctgtctccttaacaccgaacaccatgccttcaattaaggttgcagagttctgatggagagactatttgaagttgatgtggaaaattgccaaacaatctgtgatctacttaagaccactgtgggaagatttgggacctggatgatgaaggagatgatgacccagtttcctctaccaaatgtgaatgcggcactatttacacaaggtcattcagtggtgcacccatcagaaggatgaccctcctcctcctgagagatgatgagaacatgagaaaagcgaacagatgatatccctgtttgggaccaagaattcctgaaagttgaccaaggaacactgttcgaactcattctggctgcaaactacttagacatcaaaggttggcttgatgttacatgccagactgttgccaaatatgactcaaggggcaaaactcctgaggagattgcgcaagaccttcaactatcaataaatgactttactgaatgaggaggaacgcccaggtacgcaaagagaaccagtggtgtgaagcacacagtgaaactgttgtgcctgactactgtaacacttgtaaggattgttccagatactgagttgcactgctctgtttataactgttcatattagacaaacagtaggacaaatgcatcatccaggtcaatgtattagcggact

SEQ ID NO: 654826 - DNA, 291 bp, Homo sapiens
ctggctcagtcctgcctctgcttcgcatctctctccggctcctccactgctcccgtgtctcttttcagaagcttaatatgcgatcagaacttccatggctagaaggccgttgacctctcgagtctgcacagcaggcttctagtggctgacggtggtgctcagagccacctgccctcgggcaccttgtgttctgggctgtgaaatgctcaaggacagggactgggtcagtcaccaactacctgggagtgtactgggtactgctgggtatagggctgcaaagaaaacagcaca

SEQ ID NO: 654827 - DNA, 446 bp, Homo sapiens
  misc_feature (29)..(29): n is a, c, g, or t
  misc_feature (135)..(135): n is a, c, g, or t
  misc_feature (218)..(218): n is a, c, g, or t
agtttttctggagcaaacaatggaatgtngcaatgtttatctctgtcagcaacattctggaggtgaagagccccaaacccatttctagtaattagcgagggtaatgacttcttagtgacccagggacgtaggctnaggtagggaaagccttacgggaggattcatttggcgttgtgtgactaccccaaaggtctgagccaaaggtcctgtgccttagnagtgggaggggtttgtgtatgtttcctgtaagttctgttcataaatgctgaaattcttctgttgacaggatagtaatgaacccaattggttagaaggttgaagtaatggaaaaacctgtttcaataccataagttgtgattgttgtacttttcagattgcagttcttctaaatggcttatagaagtttccaactctgctttgccctgacacataagctctttagggta

SEQ ID NO: 654828 - DNA, 492 bp, Homo sapiens
gcagagaagtttcatcaagccagaaaaggtgttggaactcgccataaggcattgatcaggattatggtttcccgttctgaaattgacatgaatgatatcaaagcattttatcagaagatgtagggtatctccctttgccaagccatcttggatgaaaccaaaggagattatgagaaaatcctggtggctttttgtggaggaaactaaacattcccttgagggtttcaagctatgatcagaagactttaattaaatattttcatcctataagcttaaataggaaagttttttcaacaggattccagggtagctccctacatgttgaaaaaaatagcctttaaatcatttttaaattaaaactttgtataatagagataagtccattttttaaaaatgttttccccaacccataaacccctaaacaagttgttttagtaccaaaacatgagaaaaatgtttatgtagttgaaaataaaatgaggtcccaagcca

SEQ ID NO: 654829 - DNA, 1050 bp, Homo sapiens
ggcttgcccggtcggtcgctagctcgctcgttgtgtcgctgtctgtctccgctccatggctggctcttcggtgcggctgctggctctcgtccctggtctctggaccctgtgtgccccgccgcgaaccctggcggggtcccgcgcaagtcagccctacctatgctggtgctgcagctacagtgaggctccggggcctgtcgaggccagcggtcccaagcgtgtgtgctgaatgccagaaggttattgcgcgctaatacgcgaagtactttcaccaaagcatgcgacgcagtggtacgcaaaggagaaactgtggctgatcaaacgagctcatcagctacgagtgcgtgtcgctggatatgaaacaggtcccgtggtggagaagggctgtccgagcgaggccttatcactctcataaaactttactgataagcctggggagtctgttggattcaaccgagcgatcagtctgtacgacgggaggccgcacgggagaagctgaggcctgagatggaggggcccggcaagcaattcaccagtcttcgcacccttagcagaaggaggcctgggcctccttgtccagcatgaagtgcgtgggacatcccgtggtcagaaagtgtcaacattgagctgctcaatgcctccgactacgcatatggtgggcaggcgagatcctgactgatgagctgagaacgggtatgacctcagctctatgtaacagaattccaacatccagatccaacacatatccttaatgggatttgtagactgttgaagtgtggcccgggtgtgaaagcagacaccatgcaacaagggggtggtgactcatcgataagtcattccacatcacaaagaattcagggaattattggaaacgaggacacttgagaccttcgggtgttggtaggatgcgtcaccagagcttgaagggacgcaaacgctatggccaacaagggttagaaaaccggattgacgttcggaacaaacgaaacgtaacacctggagtgttaccggggttgacacggacggggggggaaaagaggacaaccggat

SEQ ID NO: 654830 - DNA, 436 bp, Homo sapiens
attcactggtcctaagagtcaccatgcgcaagattgcccagctattatagggggctgggagacacctgggatgtgcataacatcgtatggccttgatgtgctcatggcgactgctgatgggctgagacagcgctctgggggcttggaacgccccgtttgtcctggtcaggtgtcttgttcgttggatcccagcggtttggagccgtgtggacaggggacaactactgtcgagctgagagcaatgtcgaaaatcatctattcggtatgtgtcgtctagcttggagcttggtgggacttgtctttctgtggggcggatgtcgggtggcttctacaaaaacccagagccagagctgcttgtgcgctggtaccagatgggtgcttaccagccattcttccgggcacatgcccacttggacactgggcgacgagagtcata

SEQ ID NO: 654831 - DNA, 170 bp, Homo sapiens
ttttgcggggggggcccccttttttggggccctttttcccccccccccccttttttggtttgggggggggtttggtttggggggaacctggggggggtggctttttttaatgggttttgaatggggggggggggtttttaaatttgggggtttaacctttttaattttga

SEQ ID NO: 654832 - DNA, 326 bp, Homo sapiens
aaatccatctggaatcagaaaacggtgggttttggcaaatggtccttgtgccctcccccctcatccctgggttggtcccctggtgcctatagcccttttccctgagcaccccccccacagaatgggggccagcccccttgcctgcctgtgtttctccccaaacccctttaaatggggagggaaaaggaggagaggggagggggcctgccccctcctcaggcatttgggagggccccgcccccctgggctttacccttccctgcgggctctctccccggcccctttgtttaaatccaacctgaataaaactcccagttttatatgga

SEQ ID NO: 654833 - DNA, 1211 bp, Homo sapiens
  misc_feature (142)..(142): n is a, c, g, or t
gatcaatcctccatagtagtggtggtggcagtggtggctggttatggcaatcaagaccagagtggtggaggtggcagcggtggctatggacagcaggaccgtggaggccgcggcaggggtggcagtggtggctggcggcggnggcggcggtggtggttacaaccgcagcagtggtggctatgaacccagaggtcgtggaggtggccgtggaggcagaggtggcatgggcggaagtgaccgtggtggcttcaataaatttggtggccctcgggaccaaggatcacgtcatgactccgaacaggataattcagacaacaacaccatctttgtgcaaggcctgggtgagaatgttacaattgagtctgtggctgattacttcaagcagattggtattattaagacaaacaagaaaacgggacagcccatgattaatttgtacacagacagggaaactggcaagctgaagggagaggcaacggtctcttttgatgacccaccttcagcttaaagcagctattgactggtttgatggtaaagaattctccggaaatcctatcaaggtctcatttgctactcgccgggcagactttaatcggggtggtggcaatggtcgtggaggccgagggcgaggaggacccatgggccgtggaggctatggaggtggtggcagtggtggtggtggccgaggaggatttcccagtggaggtggtggcggtggaggacagcagcgagctggtgactggaagtgtcctaatcccacctgtgagaatatgaacttctcttggaggaatgaatgcaaccagtgtaaggcccctaaaccagatggcccaggagggggaccaggtggctctcacatggggggtaactacggggatgatcgtcgtggtggcagaggaggctatgatcgaggcggctaccggggccgcggcggggaccgtggaggcttccgagggggccggggtggtggggacagaggtggctttggccctggcaagatggattccaggggtgagcacagacaggatcgcagggagaggccgtattaattagcctggctccccaggttctggaacagctttttgtcctgtacccagtgttaccctcgttattttgtaaccttccaattcctgatcacccaagggtttttttgtgtcggactatgtaattgtaactatacctctggttcccattaaaagtgaccattttagtta

SEQ ID NO: 654834 - DNA, 820 bp, Homo sapiens
aaaacacgcaccaaccaccttgacggtcacgtcgcgtagctcgcctggtttatacggcacgcgggcaagctgaagggagaggcaacggtctcttttgatgacccaccttcagcttaaagcagctattgactggtttgatggtaaagaattctccggaaatcctatcaaggtctcatttgctactcgccgggcagactttaatcggggtggtggcaatggtcgtggaggccgagggcgaggaggacccatgggccgtggaggctatggaggtggtggcagtggtggtggtggccgaggaggatttcccagtggaggtggtggcggtggaggacagcagcgagctggtgactggaagtgtcctaatcccacctgtgagaatatgaacttctcttggaggaatgaatgcaaccagtgtaaggcccctaaaccagatggcccaggagggggaccaggtggctctcacatggggggtaactacggggatgatcgtcgtggtggcagaggaggctatgatcgaggcggctaccggggccgcggcggggaccgtggaggcttccgagggggccggggtggtggggacagaggtggctttggccctggcaagatggattccaggggtgagcacagacaggatcgcagggagaggccgtattaattagcctggctccccaggttctggaacagctttttgtcctgtacccagtgttaccctcgttattttgtaaccttccaattcctgatcacccaagggtttttttgtgtcggactatgtaattgtaactatacctctggttcccattaaaagtgaccattttagtta

SEQ ID NO: 654835 - DNA, 1761 bp, Homo sapiens
  misc_feature (692)..(692): n is a, c, g, or t
atggcctcaaacgattatacccaacaagcaacccaaagctatggggcctaccccacccagcccgggcagggctattcccagcagagcagtcagccctacggacagcagagttatagtggttacagccagtccacggacacaggctatggccagagcagctattcttcttacggccagagccagaacacaggctatggaactcagtcagctccccagggatatggctcgactggcggctatggcagtagccagagctcccaatcttcttatgggcagcagtcctcctaccctggctatgggccacagccaactcccagcagcacctcgggaagttacggtagcagttctcagaccagcagctatgggcagcccccgagttacggccagcagcctagctatggtggacagcagcaaagctatggacagcagcaaagctataacccctcaggctatggacagcagaaccagtacaacagcagcagcagtggtagtggaggtggaggtagctatggccaagatcaatcctccatgagtggtagtggtggtggcggcggaggtggcggcggcggcggcagtggtggtggtggctggttatggcaatcaagaccagagtggtggaggtggcagcggtggctatggacagcaggaccgtggaggccgcggcaggggtggcagtggtggctggcggcggnggcggcggtggtggttacaaccgcagcagtggtggctatgaacccagaggtcgtggaggtggccgtggaggcagaggtggcatgggcggaagtgaccgtggtggcttcaataaatttggtggccctcgggaccaaggatcacgtcatgactccgaacaggataattcagacaacaacaccatctttgtgcaaggcctgggtgagaatgttacaattgagtctgtggctgattacttcaagcagattggtattattaagacaaacaagaaaacgggacagcccatgattaatttgtacacagacagggaaactggcaagctgaagggagaggcaacggtctcttttgatgacccaccttcagcttaaagcagctattgactggtttgatggtaaagaattctccggaaatcctatcaaggtctcatttgctactcgccgggcagactttaatcggggtggtggcaatggtcgtggaggccgagggcgaggaggacccatgggccgtggaggctatggaggtggtggcagtggtggtggtggccgaggaggatttcccagtggaggtggtggcggtggaggacagcagcgagctggtgactggaagtgtcctaatcccacctgtgagaatatgaacttctcttggaggaatgaatgcaaccagtgtaaggcccctaaaccagatggcccaggagggggaccaggtggctctcacatggggggtaactacggggatgatcgtcgtggtggcagaggaggctatgatcgaggcggctaccggggccgcggcggggaccgtggaggcttccgagggggccggggtggtggggacagaggtggctttggccctggcaagatggattccaggggtgagcacagacaggatcgcagggagaggccgtattaattagcctggctccccaggttctggaacagctttttgtcctgtacccagtgttaccctcgttattttgtaaccttccaattcctgatcacccaagggtttttttgtgtcggactatgtaattgtaactatacctctggttcccattaaaagtgaccattttagtta

SEQ ID NO: 654836 - DNA, 1903 bp, Homo sapiens
  misc_feature (692)..(692): n is a, c, g, or t
  misc_feature (1774)..(1774): n is a, c, g, or t
  misc_feature (1780)..(1782): n is a, c, g, or t
  misc_feature (1786)..(1786): n is a, c, g, or t
  misc_feature (1795)..(1795): n is a, c, g, or t
  misc_feature (1887)..(1887): n is a, c, g, or t
atggcctcaaacgattatacccaacaagcaacccaaagctatggggcctaccccacccagcccgggcagggctattcccagcagagcagtcagccctacggacagcagagttatagtggttacagccagtccacggacacaggctatggccagagcagctattcttcttacggccagagccagaacacaggctatggaactcagtcagctccccagggatatggctcgactggcggctatggcagtagccagagctcccaatcttcttatgggcagcagtcctcctaccctggctatgggccacagccaactcccagcagcacctcgggaagttacggtagcagttctcagaccagcagctatgggcagcccccgagttacggccagcagcctagctatggtggacagcagcaaagctatggacagcagcaaagctataacccctcaggctatggacagcagaaccagtacaacagcagcagcagtggtagtggaggtggaggtagctatggccaagatcaatcctccatgagtggtagtggtggtggcggcggaggtggcggcggcggcggcagtggtggtggtggctggttatggcaatcaagaccagagtggtggaggtggcagcggtggctatggacagcaggaccgtggaggccgcggcaggggtggcagtggtggctggcggcggnggcggcggtggtggttacaaccgcagcagtggtggctatgaacccagaggtcgtggaggtggccgtggaggcagaggtggcatgggcggaagtgaccgtggtggcttcaataaatttggtggccctcgggaccaaggatcacgtcatgactccgaacaggataattcagacaacaacaccatctttgtgcaaggcctgggtgagaatgttacaattgagtctgtggctgattacttcaagcagattggtattattaagacaaacaagaaaacgggacagcccatgattaatttgtacacagacagggaaactggcaagctgaagggagaggcaacggtctcttttgatgacccaccttcagcttaaagcagctattgactggtttgatggtaaagaattctccggaaatcctatcaaggtctcatttgctactcgccgggcagactttaatcggggtggtggcaatggtcgtggaggccgagggcgaggaggacccatgggccgtggaggctatggaggtggtggcagtggtggtggtggccgaggaggatttcccagtggaggtggtggcggtggaggacagcagcgagctggtgactggaagtgtcctaatcccacctgtgagaatatgaacttctcttggaggaatgaatgcaaccagtgtaaggcccctaaaccagatggcccaggagggggaccaggtggctctcacatggggggtaactacggggatgatcgtcgtggtggcagaggaggctatgatcgaggcggctaccggggccgcggcggggaccgtggaggcttccgagggggccggggtggtggggacagaggtggctttggccctggcaagatggattccaggggtgagcacagacaggatcgcagggagaggccgtattaattagcctggctccccaggttctggaacagctttttgtcctgtacccagtgttaccctcgttattttgtaaccttccaattcctgatcacccaagggtttttttgtgtcggactatgtaattgtaactatacctctggttcccattaaaagtgaccattttagttaaatttttttcctnttcccnnntttnactttcctngaagatcgatttcccgatcaggaaggtagagagttttcctgttcagattaccctgcccagcaggaactggaatacagttttcggggagaagnccaaatgatatccttg

SEQ ID NO: 654837 - DNA, 278 bp, Homo sapiens
gacggaagagtatggtgatgccagcagctgtgaagggagtagaggtaggcagccttccatggttgtgaacacgtcaagacagcaaccagccccaaacagtgaggacgaaggccatcaggtgcagcgctgcatggaggagtttccaggtcagtttgggccccacccatgattggggcaggcggtacaccagtgacgcacttccatagaataccaccatgccagcaaccataagcactgggtgccagttgcacatgtagatgctgccagctatgctcaga

SEQ ID NO: 654838 - DNA, 216 bp, Homo sapiens
ttacaatctggccctgaaaacatccgaggcccttcagtaagtgggatcttttttaaagatcctgggtgactttgggggcccagggtgaccgagcatttctgcccctgtgaatgtggccctaaccctgtgccctgtttcccccaaacaaggtttcccctgagtttcttttcatgttactgggtttgtaaatgaataaacccattttaactactctta

SEQ ID NO: 654839 - DNA, 345 bp, Homo sapiens
  misc_feature (156)..(156): n is a, c, g, or t
ctttttgggaaagggaaaacccccggggggttttttttcccggggccaagggaccctgtccaaaaattcaagggggtgccaccccataatcctttgggaactgggtttttttctggggggtaaaaaaaaaaaggggggtttttttttcccaagaanaagttccttgtttttttccaaaatggggttgaaaaaccccccgcccaaggggttcccttttgtggaaggttaatttaattgggccaaaaaggccaatagtttgttttttttgaaaccccttttttttttttcccataaaaaatttgggggccaattaaaatatttaaacccattccttttttccgccca

SEQ ID NO: 654840 - DNA, 1132 bp, Homo sapiens
  misc_feature (142)..(142): n is a, c, g, or t
gatcaatcctccatagtagtggtggtggcagtggtggctggttatggcaatcaagaccagagtggtggaggtggcagcggtggctatggacagcaggaccgtggaggccgcggcaggggtggcagtggtggctggcggcggnggcggcggtggtggttacaaccgcagcagtggtggctatgaacccagaggtcgtggaggtggccgtggaggcagaggtggcatgggcggaagtgaccgtggtggcttcaataaatttggtggccctcgggaccaaggatcacgtcatgactccgaacaggataattcagacaacaacaccatctttgtgcaaggcctgggtgagaatgttacaattgagtctgtggctgattacttcaagcagattggtattattaagacaaacaagaaaacgggacagcccatgattaatttgtacacagacagggaaactggcaagctgaagggagaggcaacggtctcttttgatgacccaccttcagcttaaagcagctattgactggtttgatggtaaagaattctccggaaatcctatcaaggtctcatttgctactcgccgggcagactttaatcggggtggtggcaatggtcgtggaggccgagggcgaggaggacccatgggccgtggaggctatggaggtggtggcagtggtggtggtggccgaggaggatttcccagtggaggtggtggcggtggaggacagcagcgagctggtgactggaagtgtcctaatcccacctgtgagaatatgaacttctcttggaggaatgaatgcaaccagtgtaaggcccctaaaccattcctcttttgtagagaaacacgtactctcttggaggcttctctccctctcttgttgctgcctggcacgtgctcaccctttcctgccctctgcctcacttaatctggctacctcactctctagtctcagctcatgcatgatctttaggaaagccatccctgacagcttttatgttccttcctaatacccagtgcctaaaactggcaggactcaataactaatattagcaaataagctgttatcaaggtgatcaagatgtctctcagctacagcagggtcacatgtaaggcatgatgtcagtcagtggtagg

SEQ ID NO: 654841 - DNA, 879 bp, Homo sapiens
ctcagcctccaaagtagctaggactacaggctatgccatcggcatgcccaggttcttcgttttggtataagtttgattatttgtagattcacagagttctgtactctgttgcccaggtggcaatgcctttatgatcataatgactcttcactccaggtttccctttagtagtggtatgttgtgataatctttggctttgatgtgtgaattgctatgattaatctagcagctgtttgtttgctaatgtcgacacgctgcagtgcacctgagtctgtgtggcatggagttgggcatgagtagtgtgttgtgtgaaggaggtcaaacgttatctgaggtgggtggcttaaggtagtatataccaagttatgttgcctgaatttgaagatatgtcatgcaggaaaatttatgtatagggaagaggatgatatggtgggtgaacaaatggggagtgaggaatcaaaaggtttgagttctcattgtgctgttgacttgttttctgatcctaacaagttctagattctgcaagcgtccattcatcagatgatatacagaaagcgctctgtcagggggttgcaaggatctaattagagggtattggcgaattgttggacctggaatggtatcagattgttagtgatgtaagaaaacaggatggctagtcagggtgctcaagggaagtcttcaatccagactctataacctggaagaggatatattggcttagtcataagggctggtacggagaagtaggattgggccacaatttagtgtgtgccactagacacggttgcgggggggggagaagacaggggggtcacggtgcaaagaggggacaaggggagggaattctgggcaaagagggtgggggtcaagggaggg

SEQ ID NO: 654842 - DNA, 819 bp, Homo sapiens
  misc_feature (443)..(443): n is a, c, g, or t
gctataattccagctactccagatgttgaggcaggagagttgcttggacccgggaggtggagggtgcagtgagccgagatcgcgctactgtactccagcctgggcaacagagtgagactccgtctccaaaaaaaaaaaaagggtgtcttaaaccttcttggagaagtggtagccgtggcttcttaagcttctcatattggagtattcctaagaaggtggcgtccagagtttccaagagtaaattttccaagaccaaaccaagcgtcagtggggaaatctggcacctctttggggaaacactggccgatcatattcaacttttcctggagtccccttgggtggcgggtggcggggagaatctctgggcctcagaggaacccttgagagggggctcttgtggcgcggcaaaagattgggcctttgtggtaattgcgcagcgccancttaagagacaccaggggaccttctcattctcaaaacggcgcattacattggaagtgtaacccagggggttggacccatctcaacgtaaacattctaaaacgccaccaaaggattcatttggtaggagaggggcttcctttgtgtcaaaagacgtgtgaccgtgggggatttcccaacggcacacacgggtggttgtccacttcattcacctggcattgttagcggacactggcgtggtctcttggtgggaccacggagtttaaaagaacccacacttaatttttcgtgtacagggtggcctgaaagtttcagcggacctccatttgtgtaccctaacgtaatttcctgaaagaaccacgcaaaaaacttccaagg

SEQ ID NO: 654843 - DNA, 151 bp, Homo sapiens
gtgatctagaggacccacactgggtcgagttctagtcaggatctaaataaggatcacatattacaattattgacaaatcttttgtcttgtaataatttaatatattctattttttttttttaaagatggagtccaactctgtcgcccagga

SEQ ID NO: 654844 - DNA, 401 bp, Homo sapiens
acgaaatgcctttggtgagatcgacgtgctcccagcgtgcgttgagcagttcaccaatgcgacagcaggtggagagggcaatccaaattgcagcttcggtggacggaagtaggccggcttcaggagtgagctgggccagggcgcggatctcatcatcgctcagcacgcggtcgcgttcgacatccttgccaccaatcttggcctggcggatgctgggcagtcggatcgtgctcaatcagatctcgatccaactgcgaaccggaacatttgtcgcatcaggctaaagatcagtttggccatacggttgacgccacgagcgaggaagggcatcggtcacttcggtgacgtgccctttttttacgtcagccacggctattttgcctaacaatggcaaaacgtcc

SEQ ID NO: 654845 - DNA, 150 bp, Homo sapiens
gtcgactctagaaggtatccccgcaacacacaatgcagtctgcaaacacactatgcagctgcaaacacacagtgcagtctgcaaacacactattgcagctttcaaacacacagtgcagctgcaaacacacaatgcagcttcaaacacaca

SEQ ID NO: 654846 - DNA, 187 bp, Homo sapiens
tctttcacttagaaggatctttattatttattacattgaactcatccagataatctaggataattttcttatctcaaaatcttaaccttaatcacatctgcaaaggtcccttttgccatgtatggtaacatatgcacatattgcagggataaggacatgggcatatttgggggactagttttctgcc

SEQ ID NO: 654847 - DNA, 253 bp, Homo sapiens
ggacgctggtttccgttcgggcggggaaagatcataggcttatgggagcacctcacactttcctcaggagaagacacacaaccatgaccctcagcctggtggaccgccaactccaggtcctccagccccaagactgcctaggcagtcctgaaaaatgcaagtcttgtacggagtttgacagctaggaacccacgggaactgactgtggtccaggtagagaagctggagggttctggaccacaggaagcggtgg

SEQ ID NO: 654848 - DNA, 1329 bp, Homo sapiens
gtggtggacccaaagggaaggcgaggagtggtgggcatttgcgttggggagcgaaaaggaaaaaagcatgcctcctgccctaggtgcactctgtggacaatgcgtaggatggatgcttggaacgcctgagctggtggtggtgacggatgtgtgcagtgcttgcgggctgaggcacgcgctgctgccatcctgctctgcctctcgcagctgctggtgctttggcaggactgagtcgcctgggtgagctggcaggtctactgctggtggccaccgaatctgcttgtggtgcatcctaatacaactggtttgcccatacgccagcagtatatggacagtcaatcagatgcagatgtaggttgccccatgactgcacgggtgctgagtgatataggacggaaaacaccctgtgtcatgcgagagcgggcatcgtagaccatgtagaggcatgcgacgatcgcaggggcacatgacgtactcaagcactcggaccagcatgcatggactgcctgaccgcacagctcctagacgacctgactgaggccctgtcgcgtccagcacgccaccaaccacaccttccgggaccgacagaaacattccgagatcataggaatacacaacatgcacgctggattcagcacaggccacaacgtggacctgaagcaggactagagacgaatactgattgacattggccaggcctgcaattgaagctctgctaacttgaagacaaggaagctgcaattcatccaaatgagggacgaggaatcttcctcatcagtagcattattacacaatggtcgtaccgagcccgaacggtccatcttggcacagggtcgcatctcacgctcttgcaccaaaaggaccgcaaagagtgcatgaagaccaacgacacggagagaggaatccagacttcccgacgacgcaacactggccaccgagcctcgagagacatctagcagtaatgctcaggaccatctcgcaaccggtcctcacccccccaatgccctacacagatccacaacgcaaaggcatctatacaccacacactaaaccgcgcatacatacagtaacattcatgacagtatcactctctaaagtcccaaaccgaaatgccaccacacaaaccaaccaccacacatctctacctacccacgcggcatcaccacaacatcacccgctattcacctaaacttagccataacaccacccccaaacccccatgcaaataatagaactcagccacccaacaaacctaccgaacatccacataccccaccgacgaaccccctcaccccccccatttttcctcccatcccacaacgtagatca

SEQ ID NO: 654849 - DNA, 993 bp, Homo sapiens
  misc_feature (154)..(154): n is a, c, g, or t
gctcatcttcatgacctacaacgggtacctctgcattgcagtagcagcaggggccggtacaggatacttcctcttcagctggaagaaggcagtggtagtggatatcacagacgcatgccattgacatcaaactctatggcgtggccttatcgantgcagtgggaagttgttgaagacttgaagacgtgattcctgctccaatcatcccttcttgctcctctttgtgcacgtacacacacacacacacacacacacagcacacacccgctgtctcaagcagaggtatgagtatcagcatgctgctgctgaatctagatggtagtaaccctcccaaagttgttttctctaataaggctgagattcccatttctcttagggagaagaccacccgtgagtatgtcttttccttctccatcatcttgagagccagagttatagtgttgcgtgtctaactccagtggtacgcttgtgggcttcaagtggactggtgactcagtcgtggcttcccttttgaggaagtttattaaccgaggatgagtagatgtacatagttggggggggttattcttccctcgttggtgatcgagcgagtgggaagagggggttaacttatcaagccagggagtttgagtggcgagcgtgaggggaaaacttctgtgcccaatattaaaccacaagaacttcaaacttacacattgagaaaacatcaagggtcccaagggcgcgggaacacgaggtgggcccagtggccgtgttaacttccccagcatcttgtggggggggggccaaggggcgagggcttgggacttcactcgtggagaggcacaaggggatgctgcggaagaaaccaaggttcggggcccaaacgagtgggggaaaacacccgccggatatcttacataaaagtattaccacaaatattgtagagccggggacaatgaggatgggatgggacggccgtggaaaatcccccagtattacctcagaaaggag

SEQ ID NO: 654850 - DNA, 965 bp, Homo sapiens
acagagtcttgctctgtcccccaggctggagtgcagtggcttgatcttggctcactgcaacctctgcctcccaggctcaagcaattctcctgcctcagcctaccgagtagctgggattacagacatgcgccactacaccttgctaatttttgtatttttagtagagacgggattttgccttgttggccaggctggtctcgaactcctgacctcaagtgatcctcccaccttggtctccaaagtgctaggattacaggcatgagcccagccttgtttttacttcctattttattgaaaaaaaaaaaaaaaaaaaaaaagcaaaaaaaagggaatttcccaaaatttggccttggcacggctcccggttgattttgtgccagggaccttgggtttttcccccggtaaaggaggaggggtttcggggccctttaaaagggcaatccttttggcgtgactagacatacattggtgcagcacattaccccctttacttgagggatgggccccttgtggataggctgaataacgactggccctgaagggtgtccagaccctggggatttgtgacctacacgttgtggacacaggacttcgcccatggtatacagttcacggctgtgcacgaaccctctacggggatcaatctggggtgggcccagtttaatcccacgtggtccttgtaagaggaagggccggggtaaagggcacgccaatggcgatggcggcacccaggagttgaatgagggggcccaggtaccaggcagtgagcgcctaagtggcaaggggggacaaaccccttaaggcgaaaggaggtacccacgggcgcaggaccataacgggggtagcggttgggtggcaggcccggaccagggtgggcggctcacacaccgggagagtagcaacagaacgcagcgaatagagagaggggcacaagaacgcaaggagcatgagaagcgggcgcagca

SEQ ID NO: 654851 - DNA, 713 bp, Homo sapiens
  misc_feature (39)..(39): n is a, c, g, or t
  misc_feature (104)..(104): n is a, c, g, or t
agaactcccaaatatggagaacaaggtcatatggctttnttgggacatagtctgggagcttatatttcaactctggacaaagagaagctgagaaaacttacaantaggatactttcagataccaccttatggctatgcagaatttatcagatcatgaaaatgggtgtgcttattatccacgaagaggaaagagaaggacttgccaaagatatgtaggcttgccattcattctcgatatgaagcacttcgtagtggatggcttcaatgtgttatataacaagaagcctgtcatatatcttagatgctgctgctagacactggcctgggccaataccttatgtaatcagcatcggcttgcccttcccctgcttgtgccgtgtacccatgtaacacagtgataggatcccagcatcagatggatgttgccttcctggatgaaactgattaaagatgatcattagagcgaggaagactgcccctgttgcttgtcgcacatgcaggcaacgtggacaccacgtagggacaacacagacacagattgttgagatcgacaagaactctgtgaagcggaatggcatatcggcttcatgttgcagcggtgtgaattctggccaccattgggctccggggatatatgtctcctcaataagatgctaggctgaagacaaaatggatagcaagaagaataatcctggacgtggcagagtagcaga

SEQ ID NO: 654852 - DNA, 158 bp, Homo sapiens
  misc_feature (139)..(139): n is a, c, g, or t
gtctcagagtccatgagactcacaggcaaatttatctaaattaaatcgatttttcacattacaggcccaaagtttacgcgaggtcacagtgcttttaaaattaatgaggccgggagcagcgtgtcacgcctgtaatccncatgcacttttggaggcca

SEQ ID NO: 654853 - DNA, 227 bp, Homo sapiens
  misc_feature (98)..(98): n is a, c, g, or t
aaaaaaaccccccccccggtttttggggcccccctttttgtttccccctaagggggggggcccgaggggggaaaccaatttttttattgtgggggggnggggggggggggggttttttccccccccccccccccccccccccccggggggttctgggggcctgggggggggtccccccgttttttttttttttttaaccaaaagggagggccggggggtttttttta

SEQ ID NO: 654854 - DNA, 112 bp, Homo sapiens
ttagagcgccagactggcgtgtgtctgtatgctgtgtgtgtgtgcctgtgtgttgggtgtgtgtctgtatgtatctatgtgtgtgtctgctaggtgtgtgtgtgtgtgtgcc

SEQ ID NO: 654855 - DNA, 235 bp, Homo sapiens
cgcgcgtgaccacagaagcgatctcccacctcaggtttccgagtacgggaccacaggagcatatcaccacacccagttaatttatgtatttttagaagagatagggtttcgccaggttgcccaggctggtctcagactcctaggctcaagtgatctgcccacctcggacttccaaagtactgggattacaggcatgagccactgtgcccgggctagtcctgattatgttgactgc

SEQ ID NO: 654856 - DNA, 233 bp, Homo sapiens
ctctactcttgagatccccctctggccacctggtctcggtgggaactttgcgctcagtatgacggaaaaggagttggacttgtgccctggaccaacgggcttaataggacctagaggcccacctggtgcagctggagccccaggccctcaatgtttccaaggacctgctggtgagcctggtgaacctggtcaagctggtcctgcaggtgctcgtagtccaaaggcaggacaag

SEQ ID NO: 654857 - DNA, 259 bp, Homo sapiens
tgtgcggggtatcaaggatcctttgggtgctttcaagggatgcgatgggaacaagagtctgaatgagtctgtagtgtctgagggttgtgatatgcagtggcgaatgtggttaggtgaagcattataaggatcgggaaggttatgctcctgacacagaattccaccggtgcaaggagatgtctgaatactgaagcactctgtgccgccacctctaactgttcccagtgaaacctcccagatgatgtcacctccccataat

SEQ ID NO: 654858 - DNA, 190 bp, Homo sapiens
ccgagctgtatgactggacaggctatgagtgctttgcgtggaatgacactgagtgaccttagacaagtgcttcccctgtccaaattcctttccccatgtgtatcggtaaagtgaatgacacctcgtctcccaatgggtagacggcaggggaccctccaacatggaggtctccatgaaatgagcttgcttt

SEQ ID NO: 654859 - DNA, 359 bp, Homo sapiens
ggaagatcactaagaggtgatacacctccaactccttgctgccactctaggagtgagaggctggccaagtggagcattttggacattcagaggaggtggctgattctaccagcccaggatcaaggccagaaagcttgctcctgggattggagcaaggtcagtcaggaaatgagtgtcaggggatggggtgggagatgaatcaaagggaacactcagaggcagacatttcacagacgtttgagtgggtgtttatgtcaccacttggcaaatctcacggcagagtcaagacccagagattctgaggtggcaatctgtctcaactggaataagcaagaggactgcctttcatgagaaacaag

SEQ ID NO: 654860 - DNA, 616 bp, Homo sapiens
tttctctctttcctctcttctaactctctataatttttctaaacagagggtcaactgcaacacacgcgttcagggggaggggaaaaaaaatctcgccactcaaccaagtttttttaacactgcaaaggatattttagctcccccgttggcgagccactttcctttaaagggtgcctaaaggtccccatggcttcggcgagggtcttactcctttgaaaggaaagaagggccttcccaccctctgggtggggagcttccggggccaattttgaaactggaagggccctgctccaattcccaaacaaccgaatggtggtacggacgcccacacaagagtccctgcctccaaagttaaaactaaggggggaccttaaggggaaattatttttcttcaaaaaagcccagaactgcgttccccggggggccacagccccctggaggggacggggttaggaaccctcatttttaggggcccaggaccgctaataaacagcccccctaaatgcggccttgttatcgccgcccctggaaggtttaaaatcaacacctgcggccagcctctggaaattcttacagaaaccaccgtgggggttatggaacaccctgttctttttct

SEQ ID NO: 654861 - DNA, 125 bp, Homo sapiens
gcttaagccgcgacgccgaagacagggccttaagagcctcctagagccaaccctcacctgagacaggaagccgggcaccctgaatagccctttacccagagccctgagcccaaaagcctgtttta

SEQ ID NO: 654862 - DNA, 341 bp, Homo sapiens
ctggggtgggggtgggagcccagcccggtggtgagccagttgagaaaatttgaatgtggattagattttgaatgaaattggacaattattggtaattttatgagctgtgagaagggggctgcagttcataaaagcctgtcttaatttgcacacttaagcacttaggaatcaaagggttaaagggtcttaaaatgtttcaaatggtttacccaaatgtatgtgaggcgtatgtggcaaaatgttacagaacctaactggtggacatggctgttcattgtactgtttttttccatcttctaaatgtttaaaagtatataataaaaaaatttaattttttttta

SEQ ID NO: 654863 - DNA, 1401 bp, Homo sapiens
ggcgggatccctcggtccagtccagcacttgctcccagtttcagcgagcgtgctcctgctgcccgtgtgcccacaatgcgcacaaatccatgactcagctcgctgatcgagtctagtgggacgactttgtatccagagatcttgatcgacggaaatcatagcgtttctctagctcgagggagcaccgaagcgccatggcacgaagtgcctggtgggtcccacgtttcctagtacgctcggaggcagccgcgctctatgtatcacctccaagtgggttggatcctatttcgtggtggggagacgagtcgggcgtccccacgttacaagtgcatcgtgcgcctccaacagatggggagaccgggaacgggaagcggcaccacggaccaacgttccacattccagggtcgttgggactccttccgtttgattctcctcgtgagaggacgatttcgacaccctcattcgtgtcaccggtcagtcgcggtcccgtctagtgtgctccccttcgagcacctccttgtggggtatcgagacacaaatcgcgcgagctgagaccaggattgtctttggcggcggccaccgaatcagaacactctttttgcggctaaccccaagcgttgattcccaagctaggcctgtcgtgttgttgttggcacctcttcggcggcgggaatcttttgccaagagagcgggttcacattgtgagcggagtaggccccctaaggggaataaggacaaacgtcccagggaagggaaagggcaacgaacgggcgaccaaacattagtgacccaattcccgcccaacaggagagaggtaaggtgttcgccccccatattgcgtttagcccatccgccacaagctatcactttggaagttgcggcaccttctacttagtggaacccgctctgctattgtaagcggtaaccggtcaggcaggaacaaccgttcccgtttggaacagcaaaacaagtttttcccctttcttggcgccaaaactacccggtggcaataagcgttgagaatatggcggccctttgcagattattctttactaacgagagggacccacctggcaagttaggtcgggtctgccactgactcccgccatgtattcagttgtgctccaatgaagacgagcccagcttccaaacatgtccggaaaacgggcgggatttccctcagacacccgggatttacttttttgggccgctatatgagcgttccctaagaaggcgttccggaacacattttctgtcgcggaagacgggaaattctttcctataaaggaggggccaaaccgcccccaaacgttttttttccgggccgcccctataatttctgcgaggcgcgtgcccttctcccatattttcgggccaccaacacgggggaggatatttagg

SEQ ID NO: 654864 - DNA, 360 bp, Homo sapiens
cacgacacgggcgactccctggcccctcccctcttcacggggtctacatgccatcgtgttaggaggggagattcagtgttggtgggggactgagtgtggctggcactcccctatgcagtgagggtctctctcttcctcttgtgctcttgcctgtggctgctggtccatgggtcttactccttggcaggcccctgtgggccctgaggtccaccaccctgttgctgtatcctagttcgttgttcgtaccactgcaaatgagcttgcacaactgtggtcttcgagggcaatgccagcctctgcgtcccttgtggaggagtgggactcgcccttttcgtctggtaccgagctctccttcgtagt

SEQ ID NO: 654865 - DNA, 1311 bp, Homo sapiens
gagctcgagttcactgaaccaggatatgctggatcgagacagaatctaaaacacggtctcccgacatcttgagtgaaacctatcgtactactggcaatgacactgctatgagtatcttcctacatgaccgtctcaccctatattcagtgtaaacattcctgccatccaatgtcaatactggtatttgcactttgtctcaatgcaagagcatcatatttacaaaaactaggcatatcatacacactacccatacccgcagaagctctcacgagctctatggtcggtacaaccctggtaccaatcgtcgttatggcctaaaggcatgcattgtatgcctttaaaacacagagatgaggtctcacgtagcactatctttcttcactttcttataagcactgatggatggtggttatgcacgtcacatggtatccatccttggcattgtcgatctcaattagaaacgacaagtggttgacacatggtggtgcaaattctccgggcgatccataactcccaggacattataatgaaagggcaaggcattaactttgatgcagatcccgcaatagtgcgtctttacaacgtatcttccacgccaaggcgcccaggcattggcatttgccagtggcctctattgccacaggatatcgcgtgtgttccaggaattatggcagcataaccatgtaagggttctaggtcgtacagccacacccctattgtagactgaacaacaacaacatgtacatggaccccacagtatagacgagtggtatacacctatacaatctaccctatgcaatagttattatccaacacggaacctgggccccagttggacttccgtactattacatccttacctcatcagcggctaatatttcctatcagataactagctgcgatagttgctcggaacatgtatctcaagaacaggcacgacgcgcattactatatgacatcagcctcgtgtctttggacgcagacgttctgacatacgtctatccttcatcggcgtgaaggtacgcatcctgcataacaggtcccgtggtaccctgattgcgtgctatatgcgcaatccctttcggccacaccgtgtatgtcttccagcaacaatttctcccacattcagaggcgccactccaatacactactgtgacaaccacagcactcacgtctgaacactacagaccgccactcactcgatgcacccactactacatgcttactaccttccgtacccaattaccatcagagtgtctcgcatatccataatatgtcataatccttctttccaatcaatccattactgat

SEQ ID NO: 654866 - DNA, 417 bp, Homo sapiens
tttaaatttgggatttggggggagtattatgtttaactgggggtgtcaagtatgagtcccccaggaaaaaaaaaaaattctgttttaaaaagccatctgatttttagctcttgaaactattgctacttaaatttcccataattaaaaatttaaaatttttaaattagaattgcccaaacttctccctttgagaaggggttttttagaaaaacctttagtaaagtccccccagcccttagtcttccctttaaacttttttctttaaaacaggggtttggggggtaacttttacccagttttggggactgttaaaatttggaaaggatcttgagaaatcaggggaaagctaaccagtttaaattaacatgaaatacttccttttgattgagaaaataaaatcagattttttcaaagtca

SEQ ID NO: 654867 - DNA, 731 bp, Homo sapiens
  misc_feature (19)..(19): n is a, c, g, or t
  misc_feature (85)..(85): n is a, c, g, or t
  misc_feature (191)..(191): n is a, c, g, or t
  misc_feature (278)..(278): n is a, c, g, or t
  misc_feature (423)..(423): n is a, c, g, or t
  misc_feature (444)..(444): n is a, c, g, or t
  misc_feature (455)..(455): n is a, c, g, or t
  misc_feature (475)..(475): n is a, c, g, or t
  misc_feature (486)..(486): n is a, c, g, or t
  misc_feature (525)..(530): n is a, c, g, or t
  misc_feature (537)..(538): n is a, c, g, or t
  misc_feature (548)..(548): n is a, c, g, or t
  misc_feature (572)..(572): n is a, c, g, or t
  misc_feature (621)..(621): n is a, c, g, or t
  misc_feature (623)..(623): n is a, c, g, or t
  misc_feature (636)..(636): n is a, c, g, or t
  misc_feature (661)..(661): n is a, c, g, or t
  misc_feature (723)..(723): n is a, c, g, or t
tcctgcccgcccgccggtngcggctctcttgggccgcttccctccccttcctcttcctcctctccctcctctctgcctgcccggncgcccaccgttgttggtcggccacatgccatccccaaccatgaacaactctcaagccaaaacggtttggtccaaaagatctcaacatattttatccaatgactgtnaagagcttcactgagttggattttgatattgccgatgttgtgtttccccagggtggctcttccgtgcaccagcggggcctgcttgtnggagatgaggcctgagcgcctgcgggggacctctttggcctgcttgctagtcttggggtttaagtctctcagccgggccacccgttcccactcagtgcctggggacgactcgtccatgtcatttacaaagagcttcttctgctgncctgttgtttgcttttgtttnctgtagctgcncgtcctgtcttgcataccantcttctagctnctttattgccttttctttccactctgcttcttgcttccnnnnnntggcatnnagggcttccnagcgttccatttgttcttctctcnatttacggatactttcaggctctgactgcaatcgatccacttgtgaaananctgcataactgtntgttggaccattactttcctggtantattcaccattcattactccatcaacagcatccggaccccccggcggctcgcgtgcggctgnagaacggg

SEQ ID NO: 654868 - DNA, 331 bp, Homo sapiens
ttttgagatggagtttcactgttgttgcccatgctggagtgcagtggcgcaatctcggctcacagcaacctctgccttatgcgttcaagcgattctcctgcctcagtctcccaagtagctgggattacaggcatgcacccccactcccagctaattttatatttttagtagagacggggtttttctatgttcatcaggctggtcttgaactcccaacctcaggtgatccgcctccctcggcctcccaaaatgctgggattacaggcgtgcgactgtgcccagccaactttccttttctttgaacatcactcgtaattatcacaggtcgacg

SEQ ID NO: 654869 - DNA, 715 bp, Homo sapiens
  misc_feature (173)..(173): n is a, c, g, or t
  misc_feature (248)..(248): n is a, c, g, or t
  misc_feature (319)..(319): n is a, c, g, or t
  misc_feature (337)..(337): n is a, c, g, or t
  misc_feature (343)..(343): n is a, c, g, or t
  misc_feature (392)..(392): n is a, c, g, or t
gggtagactttccttcggtggcttcggtctaagaatgatgtcctttcccgctctaatgtctgcatcaatgggaaccatgtttacctggagcagccagaagccaagggtgagatcaaggatagcagcccgtcctcctccccatcccccaagggcttcagaaagaagcatttgtnctcttctacagagaacctggcggctgggtcttggaaggagcctgctgaaggaggtgggctgtcttctgacaggcngctctccgaatcttccaccaaggactccttgaagtctatgaccctgccgtcctaccgacctgccccactgntcagtggggacctcaggnaaaacntggtccccgcaaactcagaggccacaaaagaagctaaggagagcaagangccagagagcaggaggtcctctttgctgtctctgatgacggggaagaaggatgtggctcagggcagtgaaggtgaaaaccctctcacggtcccaggaagggagaaggaaggcatgctgatgggggttacgccgggggaggacgcatcggggcctgctgaagaccttgtgagacgatctgagaaagatactgcagcttttgtctccagacaggcaggtccttgaactctttgaagatgtgcgatacgaaccagaactggaccgatccagtctgaacgagactcaattcctctccgaggctccccaaacaaattgtagcccgatt

SEQ ID NO: 654870 - DNA, 486 bp, Homo sapiens
  misc_feature (99)..(100): n is a, c, g, or t
  misc_feature (103)..(103): n is a, c, g, or t
  misc_feature (106)..(107): n is a, c, g, or t
  misc_feature (461)..(461): n is a, c, g, or t
gccccagacactacagctggatttcttgataaaatcttgccaaattaccaccacctaaaaagactataaaggagctcactcagtaaagactaaaaggannaanaanncccacgggttttggggttttaataacccatgaagataacattttgtctttgaccactgtcttttgaatgggcccacagtgtttatgtactcttaacaactcacagaataatacatgttcactttattttgtaaaattgggttgagaggaaactaatggagtttcattgtaactgtcctttgtaatttatataaatgtattattttcctatatccttggttcttttctgataatttacagatttagcttttcttttgttatataaactgctagccacaaattttagttatgtaaaaggctacccttgacaagaaaagacatactgtcatgtatttatattctagcatagactaanctgaataaaaatactgataacagga

SEQ ID NO: 654871 - DNA, 184 bp, Homo sapiens
gaaaagtctgtaatatataaaacctttgaatcagtcgttcttaaaattatttaatcccacaacttcccctgcaataaaaacacacaggcttacactttttttttctcagtttctacttagtaacaacacttgggaatatggtttcctgaaatatagtattaaaatacaattgtattttatgtcc

SEQ ID NO: 654872 - DNA, 163 bp, Homo sapiens
gatctgagcaagcgatgaggctgaggttgttccccgagcacagttccctttgcagaatgcagctcctggaagcacgttttgtgccttttcggagctaggccctaggtgctccctcccgagctggctataggtggttagtagggccatggcccgcttttgtgtt

SEQ ID NO: 654873 - DNA, 353 bp, Homo sapiens
tccattgatatagcaggaccactgagcgtcctgctgcggcttctccatctcgatgattgccttccagacgcttggcatagtacactactcgagaggagccaggtctgtgcaaatctgggtggctgctctcgttccttgtgaaattgctggttttacatcacctcgtcttttggaagcctctcgtgatcatctaactggtccatgggctccacagtcacaggacgaggaaatgtggttagcaggaaggagccttcactgcatctgtccagagctttccgagcagctggcttccctgagaactcaacaatgccttttcctgagggccttcctcgatcatccacaatgactacagc

SEQ ID NO: 654874 - DNA, 439 bp, Homo sapiens
  misc_feature (16)..(16): n is a, c, g, or t
  misc_feature (437)..(437): n is a, c, g, or t
  misc_feature (439)..(439): n is a, c, g, or t
cacttgaactcggggntttttggggttgcagtgaactgtggatcacatcactgcactcccaccccgggcaacagaagtgtgattcccatcctcaaaaaaaacaaaaatgcctcagtatcgattttatattacaaattattaaaattttggcccaagtgcagtggcacatgtgaggcctgtaattccagcactttgggaggccaaggcaggaggagtgctggaggccagaatttcaaggccagcctgggcaacatagggagaccccttctgtatgaaaaatttaaagattagccaggtataatggtgtacacctatagtcctagctactcaggaggctgaggtgagaggattgctcacttcaggagttggaggctgcagtgagccatgattgcaccactgcactccatcctctgggtgacagagcaagatctgtatcnan

SEQ ID NO: 654875 - DNA, 262 bp, Homo sapiens
ttacagctcgggaatctctgaccacaccccaaccacatggctcttcacccagccatgacagcctgaactcggttgatgccaccatagatggggcaccatggccagcataccagcatgaggtttcagatcttcttcatcctcttcatcttcctcctcttcttcttcatcactgccctctgagggtgtgggcttagtcccatgcagatggtgcatccaaagcatcatcagtctgttgctctgggcgctctcagagggcagtgat

SEQ ID NO: 654876 - DNA, 829 bp, Homo sapiens
gatcgttgttcccgactgagtaccagctccccactgccctgagggcgtggcctggcctgcggcggagtggaaaactggaagaggagaagtgaaattgtcccgaatccctgcagtgaggtccaatgcctcatccctgtggtggccatgtcttatctatgtaggttgcgagcacaacagccatgagcaaatagaagaggaatgtgaactttaatcactaattctggtgagaggtctgatattagagtgagtctgcatgtagcacgggtgtgcatcctgcgtatgaaacgctgaaggagagtgacaagtttaccattccgaatcacgcatatgaagactattggaaaaagactttgctatgagagacggatagtgcacaaaccacctacagtgtgtaaaacgaaacggacatgcgagtggcgatatcataagcatttgttcattatgaagtgatgggtcaaaaacaacgcgccagggaaattaccatcggcgtatacatttaggctagtggcccatatatgactgtggtatgggcgttagcacacagaaactagaactacgacctctcatatacccacaatcaatggggccataatggaaagctacatcctgaaagtttcacactcaaaataaatggtacaccgtatacgcgcattctcacccagcaaagtgcgcacgatgatagggatgtgaaccttaaacgttcagtaaaatatatcaaccgtaatggagatctacgccgacgttgcgctatactattggatccgacgaagggcaccagaacgattatggacaattgtgggagtattaaacaaggaccccaaatgtggag

SEQ ID NO: 654877 - DNA, 160 bp, Homo sapiens
tgaaacctggggaagtgactgcagaggtagatttgaggaagagaacgagaaagggagaaggaagggagaggcaggagaaagcattgtgggcactaaccaagcggaaagtgggcccacgagaggtgtgctgaggaggggccagagtgtgcaaccaagtctt

SEQ ID NO: 654878 - DNA, 431 bp, Homo sapiens
tctaagggtgctgcatcaacaattttggccagttaaccatttgcacagaagtatggcctgcaatccaagcgtgtggaaattttggcacatgaaatgatgactgatttgccaagctcgtttgaagaaaaaaccattttttggttggctttcatatgactaaacaacctgcaacccaccattgcttttctaccaaccaactccttacttatgaaccactgccactttgtccagaaggacaaggtgcaaccctggttgctacaggacataatccatctcgaggaaacgtggccataaatcctcgtggtggactgattctaaacggacacccactaggcgctacaggttttgctcaatgtgcacaactctgttgccatctgaaaggggaaccctccaggcaagttcctggtgccaaggtggcttcgcagcttttc

SEQ ID NO: 654879 - DNA, 355 bp, Homo sapiens
tcaggtgattggtcctcctctgatagcatcattagttctgtggttagcaagagtcaggctcccctttcaccctccccaatcttctctgcagtggtgagcccatctcattcattcattcattcattcatttcctaacttgcaatgaggctgcacgcgaggcccacaagacacaagtgcagtccagtgccctgcagcatcaggagcggacatgtggacgacacgagcagagctacactgctaagggcttgatcaggcatcaaccagccaattcaccgtgaagtgtttcacgcggtacccgaagtcgaaatttcgtaaatccatgggtcataagctggtttccctgttgtgaaaatcg

SEQ ID NO: 654880 - DNA, 470 bp, Homo sapiens
gagtcgagggtgaaaaccgcctccaggtggaggctgtaaaatgtgacatggcgagtcagtgtaccgttagcctaacaaggatttgctttcctatttctgactggtgcctttcccctttttaggagcaacgaaagctactctcttagttatgttctggtgatgtgacaaaatgtcaagaagataggagaagagaatattttatttcgtggatgctttagttcccaagtgtgaccctaaacttaagctctgtaggagtggacattctttcatgtcccttccctttactcatgccgaaactatcaactgggacattttgtgctttcggtttaaaagttaattgatattatacttgggttttatctaaaaagtaaatgtatttgcctttgacaaaagactggcacaagagcaaataagctttaaaatcgggttttaagtctaaggcagtctggagagtctgaaggcagtctgga

SEQ ID NO: 654881 - DNA, 571 bp, Homo sapiens
acggctatatctgtaagcactgaagtactaaaagcactgatgattcgtattataatttttcagatattagaacctacacagatgacatagatcattcctttgataaaataatcaaaagtaatttgcttatctggcaaaaaaaaattcttgaaacagagccctttccaggtatcttcaatctcggtaaaagcccaaaccccaaacagagtagatgatgaaatatggatttctcagttgcccaagactgtctgaaatttaaggttgagacatggactggccttttcatgtaacctgtgaattcagagcttacaggtggcatcagaactcaaatctctgggatggctttacatggctttcactttgattagtttcattttcatttgcttcttttccaacttctttggctcacgcctcaatgcagcctcctccagccgtgcgctgtaactcaggatcttcctcattcatgattcgctccttctctgctcttaatttctcctcccgacgagactgtgctgattcctgtctaagcacatgtgtcaagtacaagaagttctcttctactcgggcacgg

SEQ ID NO: 654882 - DNA, 1079 bp, Homo sapiens
  misc_feature (258)..(258): n is a, c, g, or t
cgcaggagacaccaatgggagatctacacgacgacttcacgtgcgccgagccgacatcgaagaacgtgcagttcgtgtttgacgccgtcaccgactgtcatcatcaagaacagacctgtaaggacttgcgggtcctcttctgagtgggcatggcgtgaggacctgagcgggtatagtggtcgcaaccgttcgagcatatttgtatcactccgccaacactccttgatgggaacgatgggcgagcaagaacgatcacgnctcacctcggctggttccgcccgtccgtcttcttctccttctgtcctctctttgttctctagctcccccgtgtcccctcagctccagaacgtaaggggaaggggttgacacgaggcctcacctgtttgaaggcctgcccttgtcatgagatgctggtaattgtgccatgtgtactcccccttctgggcatctgtatctggtttttaacccaattgtcttgttctgtgatgacggggaggggggcacatgctgagtctcaccaaggatgcggtctggagggggcccctgcttctccagcctggaccccagcttatgcccaaaaccagacccatgacccagaccaaagtccacatgttacacggacgcctcctgcccaagtcccccaaccccatacggcatcggaggaacccgaagggaaccaacagcaccaagaagcgtgagacgccacctgccctggaacacccaaagacaaactgggtccatcccggtaattttacaacaaatgaaggtcaacggaggacaacaatggattctacacgttccagagcaccctctacgggcaaccgacacacgccccagacaaaagaacggcgcccacgggcggaagcaaggcacaagaaattgacagtagacgactacctccgaaatgcgaagcgagcggccgacccggaacataaacacacaggaccagacgatcgattagctcacacagcgcgcaaaaaacagagagacaaagaacaaccagtcacacgagctgagatcgcccgagaatagcagcaaggaagaaagcgaagaaccacagcgcagaaaacaaaaacaaa

SEQ ID NO: 654883 - DNA, 192 bp, Homo sapiens
taggcggacctactctcaggccggacttgggcctggcgatggcgcaggacaggccgagccagaagatgacgctgagactataggttggaaggcgggttgcatgccgggtgccagaagatgatgtggtgactccaggaaccagcgaagacagctataagtctggcttgacaactctggtggcaacaagtgtca

SEQ ID NO: 654884 - DNA, 1123 bp, Homo sapiens
  misc_feature (61)..(61): n is a, c, g, or t
  misc_feature (64)..(64): n is a, c, g, or t
  misc_feature (69)..(69): n is a, c, g, or t
  misc_feature (79)..(79): n is a, c, g, or t
  misc_feature (82)..(82): n is a, c, g, or t
  misc_feature (86)..(88): n is a, c, g, or t
  misc_feature (91)..(91): n is a, c, g, or t
  misc_feature (95)..(96): n is a, c, g, or t
  misc_feature (114)..(114): n is a, c, g, or t
  misc_feature (120)..(120): n is a, c, g, or t
  misc_feature (125)..(125): n is a, c, g, or t
  misc_feature (146)..(146): n is a, c, g, or t
  misc_feature (149)..(149): n is a, c, g, or t
  misc_feature (182)..(182): n is a, c, g, or t
cttttataataaaaaaaagaagctgagtaaaaaaaaaaaacacacaaaccggttagtttcnaanatganatgctggctnaanggtnnngangtannggctggtaagtttctctnagtttngattngaggcatcccgtaaagttgtngtngcagaatcccaaactaggctacatttcaaaatncagggctgtttaagatttaaaatcacaaacattaacgggcagtaggcaccaccatggtaaaagtgagctcagacgtctctaaaaaatgtttcctttataaaagcacatggcggttgaatcttaaggttaaattttaatatgaaagatcctcatgaattaaatagttgatgcaatttttaacggttaatggatataaaaaaaaaaaacaacaaaattaggctggtaaaattgactttttcattaacgggggtttggaaatctagccccagaaaatacggggtggagcagatacttagaagggagggagtaggtttggaagaggttgatggtaggtggggagggaaggcctcctgaatggagttggatgcagagcttttaagccatgaagaatcttccagtcatagtactaatacttacactttccagatttaaaaaggacaacagtattctggccattggaagaattcgtgcacttccatgaaaagttccacttggggacgctgggggccaaaaagcgggttgattttcctaaaagcttgacggtggtcacatatttttcgaacggggtcccaaattaggtccaagaatgtttcaaccttacatgataataaaagggggcactggcgcgttgaattcgaaacagaggggtcaaaaacacacactgggcgacataacgacaggaccaaaacagagaaataggcccggcgcccccccatagtgtccgcgcaaaaaaacgcgaaagtggtaaatcgccgacaaagaaggcaaacaatcatcataaaactggtcccgcaggaagaacagagacagccactaatgtaaacgaaaaaagacaacaaaaaaaagggggggcaaaacacaggcggagaacacaccaacagaactgaaccagcatagaagaccgcacgcccgaccaagcatagcaacacactacgacgaga

SEQ ID NO: 654885 - DNA, 139 bp, Homo sapiens
tttaatattttatgtttagcaaattatagctaggtctgtgtataaccagaagagcggtatctggggggtcaggatatctaaattctagacttacagccgtggcctgaatctaactatcaatgttgcctttcggagaaga

SEQ ID NO: 654886 - DNA, 826 bp, Homo sapiens
agcggacggtgtgtacgtctacatggttgtgtacaggtaatgtcctaggccttcagattcattcaccgctcattcacccatagtcgagtgttccacggcttgcaagttctattcattggtccgacaataggaactcatgttgtgaacagacgttgattcagtggaatcagtacttccttatgaatacacagcgtctgatttatgcgcggcatcggaaggaaagcgcccatctgagaatcttggtccggtactattcggggaaacgaattgaaccgttcatccactataacgtcttacggtataagtaagaacggaagaccctgtaagcttggatacgtacaagatatcagtaccagtacagacgaaacgctgaggacaaccgatatgtgagactgcttgataaccaagcatgttcattcgaattatcaagcattcagctggaattgtaggagtaactatgcctgtagatcgtggtcgttactgattgtcgaacgatggtcacgaaggttcgtagtaatcctggactttcgctattggctggttacattgacatgataactcggccatggcaacaacgatgcctgtgtgtattagtgtcagatttgccatgaaagagatacatttttacgatcttgcaatcatgatgaagatcaaaatatacataatcatgtcgtagaaactggggtccactgggagcaaagattagatggtgtggttaaatttgcaacggaaatagcttcaaagatagcccaatattaggataaagcagaggtgctcagaggccccatgtaggataaggtaagcaaggttctggggaggattgaaa

SEQ ID NO: 654887 - DNA, 1197 bp, Homo sapiens
  misc_feature (239)..(239): n is a, c, g, or t
  misc_feature (254)..(254): n is a, c, g, or t
  misc_feature (1197)..(1197): n is a, c, g, or t
gctttttgcgcaagtgggctctgtggtgtttggccagtcatgcagcagttcgtcacattggcccgcactagttgcagtgcagggggcagccagggtgcatcccaacggcttgcgctgcctttgctgcagccagcctggcagggctggccaactgatcgctgtgccttgtgcattggcggtcaggcagcaggtgctggtaccccaagattgcaagtattggggattgcacactaacctgntatagcaactacttntgcgcagatatatacatcgagtagttacttattggcatttggcacacattgcaccctcagacttcgatggacacggtgggcaacctcggcatagactggaccccacaagcccctgctgactcaaaacaactgagttgtaagacgttcatctgccgtgttatccttgagtaaagaagcgggcttttgccatgtttgtccaggctggtctctactcctgggctcaagcagtcctcctgcctcagtctcccaaagtgctggaattacagggaatgaactctggaagcccagccagggacaatgcaccttcaccagagattctgcactaatctgagtgcaggtctaaggtatggaatctccccctcatgggagagaagctaagaatggatgtcatgcttagacagtgattcctgcaaattgacctttcaggctgggacgactgttggacgaagcattgcctggttcttcctatccatggtattgggaatctgctgacacaaatatctttcggcctgggtgctgggcatattcctaaagaacttcaccatttccctgatttatccatgtgtgcagcagatgtcaccttatgggggcaaaaatgcctgcacaactacgaggggacactccaagaagcataggccaaagtgcccactaagggcgaagtacaaagcgaattgggggcaacacagaaaagagcacaaaagacggttagccaaaaccagcgacaaagaaacaaaactgatgtgagcgcgcggcccaaaaaggacagaaacaacaagggtggggcgcagcagaagagacagcaacaaaaccaaggcacgccgcgatggtgtgtgcacacacagcgggcgaggggagaccaccagtgcgaaggtacgcgcgacaagactcgggagccgaaacaagagcagcaaccgcagagacagaggagcaccccaacccgcan

SEQ ID NO: 654888 - DNA, 221 bp, Homo sapiens
  misc_feature (2)..(2): n is a, c, g, or t
antcaagtgtcattatgcacctccgtgagttatcatcagcacctgctgcctgccagctactgtgacctgctgcacaatggcctgccgcccatctgggctgttggcagaatgtgtgacccagctgctgtgctccaacgtgctgcagcacccactggaatctcctcatggccaggatcacctcggaagcacatctgagctcttggtgtccattgatcaaggct

SEQ ID NO: 654889 - DNA, 156 bp, Homo sapiens
gtgatctagaggaccccagcgaaatttgcaaatcgccctggaggcaaaatcaccctggccaagaaccaccgtttaggtcactttgtattctgttttagttaaaggacttaggaaattaaaaaagatggacattagtgtattctggtattggatagt

SEQ ID NO: 654890 - DNA, 223 bp, Homo sapiens
gaggggagcatgtacgcccctccagaccttcgagtcgttcttgctcttcgatgggcgagaagaagatcaccattaacaaggacagcaaggtacccaatgcctgtgtatgcaccatcatcaaagaagatcacacatgtgggaatagatcattaaatcacaactcctaaaggacccgcaagtgctatttgctggctacaaagtcccccaccccgtcgggtggagg

SEQ ID NO: 654891 - DNA, 127 bp, Homo sapiens
ttactggtgcgtgggcgacggttctgcgccagattcctccggacagatggtgaaacctctgattgttgccacatgaatgcagcgtaaaacgtgctggtgtggcatgatgaaaccaacattatgtgcc

SEQ ID NO: 654892 - DNA, 1095 bp, Homo sapiens
  misc_feature (890)..(890): n is a, c, g, or t
tattgtgcgttcataaggaccctttgtgtatagacgcccctctgtcctatggggggatatattgactcccgatgtgtgccgcccctctctgtatggcgccttttttcgcgcctttcgggggaaccgccgcgcttttgtcccgtgcccaccccctttttaatttttccccccacatccccaagggctcattcttcaaagggttagcaatgacccatgtacccgaatagggggcccaattacgtggaccgcctgccctttagaccgcttgtccctcctaggaaaaaatgggttttggcaccagttgtacccctgcatttccctcacccccctcggcaagccaccaatgccttggtctcgcgttttttaaatcgtccccaagcctgtttgtcgctcagagacagagaatgactaagtaccggggaccagactcccgttgggcagactcctgtccccttggtttccgtgtttgtctctctgccatcttaggttgccactgagccactggtgtcaaaaatgcttagccccctctgtaactgcctcccctcttagttcacatggacacgacctcccccaggcccaaaactacccttctgaacttgggttgaggctgggttcccctgctaattgttcccctcatcacataaagaggctatggccacaagcctaatgggagccctgagagtcacatgcacaggaatgggaatctgtggtcacaaaggaccacaggcgaaggagagctgtgggcccacagggcctgccgccaccgtgccatacactcttctctcttccccactcttgcacttggaggttcccacgaaaaccacattagctttctggccaaagggggtaacccaccttctttgccctcgttgagactttgcctgtttccncacggctcctcttttgtggtttttataagctgtcacccacgttagccacctgtttaaattgtaaatattgtttctgagggcgcctggcctgtcccttcacgtgaggccacatgcccaccccttgtgttgtaagtgaaaaagctgttgtcacgactaaccttctgtctctgaaattgtttgtttcaaataaagagttaaaattgta

SEQ ID NO: 654893 - DNA, 367 bp, Homo sapiens
aaaaaaaaaaaaacccccgggggcccccccgaacccggtaaatttttcccacccgggaatttggttggggggggggtgaaaccccaccccaaaggggttgggccccctttgggcaggggggccaaaattgaaaatggggaaaaaggcttttcaaaccgcccttttataagaaaaccaccaaaaccccgtggggtttcccctttttctgggttttccgggcccccccttttttaaaaaacctgggagggatttaaggggttttcccttttttttaaaaaggcggccaaagtttaattttggaacacaccccccccccccccctttttttccattggtttttttttctttaaacccccccgggggttga

SEQ ID NO: 654894 - DNA, 797 bp, Homo sapiens
agctcccaggaggtctaccccagaaggacccacgttccttagcagtactcccgtttctgctgtcacggtggggacgtgcatcgagccgatagctggaatgccattagtgaactacagttcgtgtgttgaccactagtatgatagccacgtcgccctgaggtcttgagagagtaccctctggagatcagagagccaagctaaggtggtagtgaaaatcgaggaagcgcctctcagtcccctcagagaatgatcagacctgaagtatcattgtgctctagtgagaggaagaacctgtcagagagatgacctcgttccggagctggagtatcatcagagatcgagcttggcatccagccactgactcaaaagaccaatcgttcgcttgcctatctgagattgctctacgaggtgagctgtggattacgggggttctccctttccccattcagtgacatgtcctcttcttgcattggtgtaagaccagttgcttgggaggacacatttagcccgaatgaacgtccatttccccagactgattagtgtcgtagaggaatgatcgcggatacctgttgcccttgtccccttgactattagcactgtcgggaggatacgcagagaaggcctgtctgtactgctgttcaaaaatagtcaaatagaggagtgtaccagtcctagaggaatgcctctatatgtgcagatctcatagatgaccccgggtatagtcgtcgagatccaagaagtccaagctattgagaacatatacctggacgtaaggaaaattactttaattggggaaa

SEQ ID NO: 654895 - DNA, 728 bp, Homo sapiens
cgaactaccgctttccccgtaaccagggagactgcagtttgcagtgatgtggctaagatacccttgtgctattaaaggcacatttacgtatctttcaacgcagtttgtacctttgtttagggttctattgaactttctctgtgctctttagaaaaccgtcgaataaaggtaaccatctttttgggtgcctgggcatggtcattgtcccagagttttaacataagtctctactaaagtatcctgatttgcaagggaggtcatggaccaagtacaaagcggcaaaaggatggaattaaggtacctgacattgttgaacccatgcctgatgccacattagctcaggactacctacatggacatggatatttccagtgaaagaaagaagaaagcatgcttttctcttgactgtgcagaaaaaaaaactatgtttctttgattctccattttactagatgccatacctttgcaattacttcatgtggagtcttgaccaagattcaggaaatactagaactttcagtcccagaaggttactctgggcattactagtccccatcattatgagttgagttttactagttaatttcagacgaaaaatatttgtttttccccaaattctggggttacgtacttttactacctatgaactgacaactgtatcttcagtaattacaatttccaacaaattgttataggaataaagaaaagatgttagttcattaaaaaaa

SEQ ID NO: 654896 - DNA, 508 bp, Homo sapiens
tctggaattggttgcatatgaaagaggaagaatatgaaggatcacggagggagtttttacgtgccagacctagatataatgtgtatcattcctacctgcatttcatcacctggaaaccaatttcatggcagcatgcaattggatatttccagtgaaagaaagaagaaagcatgcttttctcttgactgtgcagaaaaaaaaactatgtttctttgattctccattttactagatgccatacctttgcaattacttcatgtggagtcttgaccaagattcaggaaatactagaactttcagtcccagaaggttactctgggcattactagtccccatcattatgagttgagttttactagttaatttcagacgaaaaatatttgtttttccccaaattctggggttacgtacttttactacctatgaactgacaactgtatcttcagtaattacaatttccaacaaattgttataggaataaagaaaagatgttagttcattaaaaaaa

SEQ ID NO: 654897 - DNA, 118 bp, Homo sapiens
tagtaaataggcaggtaccccaccgccccgttgaacaggtaggaatgtccagaccatgcatgggaactctcatcagtcctgcccccagcccccataaaaattccaatccataaaaaat

SEQ ID NO: 654898 - DNA, 671 bp, Homo sapiens
cgaactaccgctttccccgtaaccagggagactgcagtttgcagtgatgtggctaagatacccttgtgctattaaaggcacatttacgtatctttcaacgcagtttgtacctttgtttagggttctattgaactttctctgtgctctttagaaaaccgtcgaataaagaactcaaatgatgctgtttttggacagggaggtcatggaccaagtacaaagcggcaaaaggatggaattaaggtacctgacattgttgaacccatgcctgatgccacattagctcaggactacctacatggacatggatatttccagtgaaagaaagaagaaagcatgcttttctcttgactgtgcagaaaaaaaaactatgtttctttgattctccattttactagatgccatacctttgcaattacttcatgtggagtcttgaccaagattcaggaaatactagaactttcagtcccagaaggttactctgggcattactagtccccatcattatgagttgagttttactagttaatttcagacgaaaaatatttgtttttccccaaattctggggttacgtacttttactacctatgaactgacaactgtatcttcagtaattacaatttccaacaaattgttataggaataaagaaaagatgttagttcattaaaaaaa

SEQ ID NO: 654899 - DNA, 218 bp, Homo sapiens
ctacacagacagcaaacggcagagctgactctcgaattcagactctgggacgctgagttcagtgctgatcctgagtggccctgcgttgctctcagagagaggtaggacgacctcagagatcattttctccaacccacacattctactgattataaaatacagggccgcattatctgattggcccaagctaaatggctagatgactctcctgttcagga

SEQ ID NO: 654900 - DNA, 344 bp, Homo sapiens
  misc_feature (332)..(332): n is a, c, g, or t
gctgaggaccagccatgtctctgctgccccttcagtgatgccaccttgtgagagccctcatcctgacctgcatctggcctggggtggcaggagcctccagccaccagccccagaccaagccaagccctggccctactgggacagagccccagggaagtggaacaggagctgaactagaactatgaggggtggggggaggcttggattatggctattttactggggcaagggagggagatgacagcctgggcacagtgcctgtttcaaatagccctctgctcccaagatcccagccaggaagctgggccctactgtttgcccctctggctggngtggggggaggg

SEQ ID NO: 654901 - DNA, 183 bp, Homo sapiens
  misc_feature (72)..(72): n is a, c, g, or t
  misc_feature (89)..(89): n is a, c, g, or t
ggagcctggaccacaagagcgcccacgaggcacctataaggtagatctcgacgaggagcctaaagcctcctnaggaggctcagaggaanaacgaggacatttcaatcatcccgcctctggttacaggcagcggggccatcgggcacttggaacgggcctgggtgccactgaggggctgctgcg

SEQ ID NO: 654902 - DNA, 184 bp, Homo sapiens
  misc_feature (165)..(165): n is a, c, g, or t
ccatgagtgaggcaggatcaaccacatcctcatgatatagtcagatcttttgtggcacacatgaatccaatagtagacactctgatggtgtgaagtgatactcattgtggttttgatttgatatctctcatgattagtggtatgagcttccttttttatgcttgngtacttagggtttcgggta

SEQ ID NO: 654903 - DNA, 1187 bp, Homo sapiens
tcacaggtttccacccgttttttggggaggtttggtttccgggaaaaaccccaaaagggggggaaggggagccctctttccctcttggaaaatagggtgttcccccccactcaaaagtgagaaaggcgttggggccgggcgcccctgcggggtgtggggtgcccggtttcccccctctctctctttctggcgtgggtccccttttctctttttctcctcacagcagaagttccccaacaagacaccaacaaagaacacaaaacaaacaaacaagagcaaatatcaaccgctcccacaaggggggcccctggcccacaagctcctatccccacattccccccagaggctggggcacagagggctcgcggaagagggggcgggggggggccactctccactccgcaaaaagcctcctcacagaggccccacgcgggggaagaggtccggacaaggcccacaaaaaaggggggggcggtgcccaacaattttccatataaaaattcacacatacaacaatacgagggcggggggggagagaaaacgggccacactccgggcgagcgagacaagaggcgccccctttctcttctcacaaaacagacgaggaaaaaaatggagggcgagggggagaaagtgtgggggggcgcaaattcccccaaagaggcgcccaccacaacgcgaggggcggagtaaaacaaaccgcggcgggagagcgaccaaaaaacaccccccactctcagcccccacgaggtctatcatgccccaaaccagaggatgacaacacaacatccggcgcggtatggggagccacacaaagtcccccccacagaggagagaaagaaaacccccttctaaacccacggcaaacacagcgacggcccccaagacacggacggcgagtcaatcaaccccccccaccttcccacaaaagcactgccagccaggggaccaaagagaaatagggaccagacggaacacccaaacgaggggagaacacagcacacacgtgtgcggcaaaccccagataatctctgtgccccccccagcgaaaactaacgacggcagggcgaacaacacacgataacaacttcgcacctggcacacaccgttcccagagccccctcctggtacaagcgagaaaaaccaccgcacccaataagcggcaaaattgaaagccgacgtactac

SEQ ID NO: 654904 - DNA, 462 bp, Homo sapiens
tgtgtcgcttactcctgtaatcccagcactttgggaggccagtgaggtgggagaattgcttgaacccaggaggcagaggttgcagtgagctgagattgcaccactgcactccagcctgggtaacagagtgagactcttgtcctcaaaaaaaaaaaaaaaaaaattctaaaataaaggttgggtcaacagtgcttaataataaataaaaaccctctgtgccatctaattttccctgctgcaccccattcccccacacacccctcacgaacattggatataagcagtattaacacagttataaagaatgtccacctgtgcatgtgtcattccaggcacatggattcaggagaagcacagtgtgagtggaaaaaatgttagacttgtgaggcttgcccaaggccttgtgtacacgcaaaaagtgggtgacccaggggtctcctcccgacagcgcctcccccccgg

SEQ ID NO: 654905 - DNA, 129 bp, Homo sapiens
gagtggaatgcttgacagcctggcggctggcacttgctggccgcgatctactccaccttcatgatctgaatggagtgggctcgggcgcggtgccgggcacacctgtctcggtagcacatgggtaacagc

SEQ ID NO: 654906 - DNA, 343 bp, Homo sapiens
acacacgagttgtctcattcctagtaaacagaaagtagaatagtagttgctacagactaggggaaaggggaaatatggcattgttgtgtgatagtacacgatatcagttttgtccccagaaaaagagttctgtggatcgacagtggtgatggttacacaacaatgtgaatgtacttaatgcccctgaatcatgcacttgaaaaatggctaagacagtaaattttatattctgtatatttgaacaccataagaaaaataaaaaagaaagtagatcaattatattctgggctttattattattattattattattattattttgagacagggtctcacattgtta

SEQ ID NO: 654907 - DNA, 1129 bp, Homo sapiens
  misc_feature (124)..(124): n is a, c, g, or t
  misc_feature (127)..(128): n is a, c, g, or t
  misc_feature (149)..(149): n is a, c, g, or t
  misc_feature (244)..(245): n is a, c, g, or t
  misc_feature (322)..(322): n is a, c, g, or t
  misc_feature (337)..(337): n is a, c, g, or t
  misc_feature (374)..(374): n is a, c, g, or t
  misc_feature (418)..(418): n is a, c, g, or t
  misc_feature (423)..(424): n is a, c, g, or t
  misc_feature (431)..(431): n is a, c, g, or t
  misc_feature (440)..(440): n is a, c, g, or t
  misc_feature (446)..(447): n is a, c, g, or t
  misc_feature (451)..(452): n is a, c, g, or t
  misc_feature (456)..(457): n is a, c, g, or t
  misc_feature (459)..(459): n is a, c, g, or t
  misc_feature (464)..(465): n is a, c, g, or t
  misc_feature (473)..(473): n is a, c, g, or t
  misc_feature (478)..(478): n is a, c, g, or t
  misc_feature (480)..(481): n is a, c, g, or t
  misc_feature (629)..(629): n is a, c, g, or t
  misc_feature (646)..(646): n is a, c, g, or t
tcgtcgtactgaccggagcggggaggctgtcttgaggcggcaccgctcaccgacaccgaggcggactggcagccctgagcgtcgcagtcatgccggccggacccgtgcaggcggtgcccccgcngcnnccgtgcccacggagcccaaanagcccacagaagaagaagcatcttcaaaggaggattctgcaccttctaagccagttgtggggattatttaccctcctccagaggtcagaaatatnngttgacaagactgccagcatttgtggccagaaacgggcctgaatttgaagctaggatccgacagaacgagatcaacnaaccccaagttcaanctttctgaaccccaatgacccttaccatgcctactancgccacaaggtcagctgagttcaaggaagggaaggctcaggagnccgtnncggcgcncatccccanaggtcnntgcnngcanncnagcanncagaccanccagnanncagctgccccagaaggtccaagcccaagtaatccaagagaccatcgtgcccaaagagcctcctcctgagtttgagttcattgctgatcctccctctatctcagccttcgcacttggatgtggtgaagctgacggctcaggtttgtggncaggaactgggcgccangtttctgacccagctgatgcagaaagagcacgcgcacatctaccagctttgactttctccgcccacagctacagcctcttcatcctacttcacgaagtctagtggaagcagtacaccaagcatcttgagttccacccaaaggttttacttttcaacacgctcataggtaaagaggctgataaatcccccggagcaagtttgggatcaggtgtgttgaccgagtggaactgggccacagttccaggaacgtgacaggaagaaggaaagaagaggagaacggatgaaggatgcgggtggcctagtgctcagactcgacgtggcactgattctatgtgagctggtaggaaacagtggacttccaacccaatgagcaagggaacttccctccccccaacacgccagagctgctgggggcccgaatcctcattcaggagcgctatgaaaacgttggggagagtgaggaccgttgagatggaggtcgag

SEQ ID NO: 654908 - DNA, 537 bp, Homo sapiens
agcccctgatgctatcgcccaacactgggaattctagttctatatgagatttgggttataactaagatacaaattatatcattctcccgtggcccctcccaaatctcatgtatttcttacatttcaaaataaagctatgccttttcaacagtcacccaaagtcttaactctttccaacattaacttaaaagtccaaactccagtctaatgagagacaagcctagtctttcttgtcaattaacctgtaaaataaaaaacaagatagttactcccacgatacaatgggagtacaggcattgggtaaatgcttccattccaaaatggagaaatcagccaaaacaaagtttggtgaatgagtacaggcctcatgcaagtccaaaatccagcagggcaattattaaaccttaaatctccaaaataatctcctttaactccatgtctcacattgagggcaaactggtgttggggattgttatcgcccaacacaacatcatgtagcacttataggaataaaaggacttatggtattagaattac

SEQ ID NO: 654909 - DNA, 112 bp, Homo sapiens
cttagctggttttctctacacaataagagtgaacagaaaggtggcacttaactagtggacttggatacaatatttctttatccccagacagagtcttgctctgttgcccagg

SEQ ID NO: 654910 - DNA, 680 bp, Homo sapiens
  misc_feature (34)..(34): n is a, c, g, or t
  misc_feature (159)..(159): n is a, c, g, or t
  misc_feature (680)..(680): n is a, c, g, or t
taactatgtccaacgggtaaagccgcaccatggntcctctttgacacttggtctaacagcgccttctctgcactcccacctcgcacatcaggcgctaattcaaggaatttcttaacttcttgcttctttctacaagtccaccagcctccccactcccgngccttaggctcttacttttttttaactaacatgtccttcctactttctctaacttgcatggcactctgctgcgtcaccactttatgcctttactccctaacagatctctgccagaatagttttggtcttccccccctttccccccacccctccctccctcttctccccacttttattctatttttttatattctccattcctcccccttccatactcgcccgcctctcacgccaccgccccacttccgctcatctcaccgtcctctgccccttctctcctctccttcctacccgctgttctttctcagtttttcctgtccgcctcctcttttttccctttttttactcctgcttctcttctctcctttctcgcctcccctccacacgactacgcccgtctctccccacccttctctcctcacttttccaactaatatcattctcctctccgtaccactctcctcccctcgcatcttctcttcctcttcctttccttattcactccactcacctttttactn

SEQ ID NO: 654911 - DNA, 203 bp, Homo sapiens
  misc_feature (8)..(8): n is a, c, g, or t
  misc_feature (18)..(19): n is a, c, g, or t
  misc_feature (56)..(56): n is a, c, g, or t
  misc_feature (64)..(64): n is a, c, g, or t
  misc_feature (83)..(83): n is a, c, g, or t
  misc_feature (88)..(88): n is a, c, g, or t
  misc_feature (92)..(92): n is a, c, g, or t
  misc_feature (96)..(96): n is a, c, g, or t
  misc_feature (100)..(100): n is a, c, g, or t
  misc_feature (102)..(102): n is a, c, g, or t
  misc_feature (104)..(106): n is a, c, g, or t
  misc_feature (115)..(115): n is a, c, g, or t
  misc_feature (117)..(118): n is a, c, g, or t
  misc_feature (121)..(121): n is a, c, g, or t
  misc_feature (123)..(124): n is a, c, g, or t
  misc_feature (126)..(126): n is a, c, g, or t
  misc_feature (130)..(130): n is a, c, g, or t
  misc_feature (138)..(138): n is a, c, g, or t
  misc_feature (140)..(140): n is a, c, g, or t
  misc_feature (148)..(148): n is a, c, g, or t
  misc_feature (153)..(153): n is a, c, g, or t
  misc_feature (155)..(155): n is a, c, g, or t
  misc_feature (159)..(160): n is a, c, g, or t
  misc_feature (169)..(172): n is a, c, g, or t
  misc_feature (176)..(176): n is a, c, g, or t
  misc_feature (180)..(182): n is a, c, g, or t
  misc_feature (190)..(190): n is a, c, g, or t
  misc_feature (192)..(193): n is a, c, g, or t
  misc_feature (195)..(195): n is a, c, g, or t
  misc_feature (198)..(198): n is a, c, g, or t
cttggagntgccacaaanntaaaaccatgaaacatctattattgctacgagttgtntgtttttntgagtgtgaagtcccaagntgtcnactnagcnattntnannntttcttcantnnccntnntnatcnaccccttnanaagaaganagaanangctnncagcctgannnnttgnccannncccatcantnnangtntcgat

SEQ ID NO: 654912 - DNA, 380 bp, Homo sapiens
gggggggggcccccccaaaaaaaaaagtggttttctccccttttgggtggggggaaaaaaatttaaaacccccccccccggggcccttgagcgtcccaaaaaagtggggctcccccattgttctcaagtaaacaggttttaaaaaacccgggttggaaataacaagtcccccgggccaatcccctgtgagggggacgttagcaattaccccccccccttaatttagttgcctaagcattgccgggccttcctgtttagtttttcctgtaagccaaaaaaatgaacattccaaggagttggaagtgaagtttataatgtgaaacactttgcctcctggggactgtgtcataaacaaatgaataaactgaatttgtacttta

SEQ ID NO: 654913 - DNA, 902 bp, Homo sapiens
cgtcgcgtgtgtgtgcggtttttccgcggagcctctggtgggtttcgttgtacaagggggtgtgcgttggcgtaggggttgtgcgaggtgtgggcgccccaggtggttggtggggtggtgctagcggtgtggtgggtggattggcgcccggcgtcgaggtgtggccccactctggggttgcatgccgggggcactggtttcgacgagggcccttccttgagtgcgccacgttgtttactaggcccgcgttttgagtagtaggagcgctggggtttgtcgccctcgagttgagtgtgtgcgtggagagaaggcgcgctggtgccccgcgtattactaccggcgggtgggggtggtcacaagaagtgagatgggttcatccacctgcctggggtggttctcacgagaaacaagttcgtgtaacgggtgcactattggggtggttgtgttgcgcgccggaattgtggttattgtgtgtgccgggaggagtgttggctagcctgtcttaggtatacggcggcgtcatttattgcgtgtcagaggggtttttaaataattcactttgtgagcctcggtgagcaaggatggcgcaccactgtctgttgttgtgaaacagcacactgggcctgtatgcagctccccccactatcttgttgccagttgtgtggaggaggctggttagaacgtccctcggagtagtgggggttgtttggtggggtgtcaacaccacagatgtggtggaggagttgtgtaagtgtttgtgcccccctcgattgtataatgctgattccaggaagtttagttgctacatggggttggttcagtcgcacggtcactgtgatgtgccccggatgtgagtaaagtgtgttctcccagaccgcgggtgaaaaccaaaaaccaaaaca

SEQ ID NO: 654914 - DNA, 304 bp, Homo sapiens
cttagaggatccctgttatcgccaacacatgaatgacactacacaaacctctaccacagctgatcacgaaaccttccatcatggataagagtgcaggattttattggagaaagccaagaaaaggtggacccggaaaaatatcaaagaatacaaagactgattcattttggagacatacaggctatgtgatggcacaaatagatggcctctatgtaggagcaaagaagagggctatattagaagggaccaagccaatgacccctgttccagattcagttcctgaatagtgttggggataacatac

SEQ ID NO: 654915 - DNA, 930 bp, Homo sapiens
gccgccgaggattcagcagcctcccccttgagccccctcgcttccctgacgttcctgttcccccctgcccgccttctcccgccaccgccgccgccgcacttccgcaggccgtttccaccgaggaaaaggaatcgtatcgtatgtccgctatccagaacctccactcctttcgacgctccttttgcctgagttgctacaggtaaacgtgggtgagtgaccctgcgtttccctgcatggcgacgtgaagcgattatagtccagtatagaggaagttcaagcagaacgaaatcggcagggaaatgacccgttacctaacttggtcccaaacggggaaatcggctgactgagtttaacggaataagaaacatgaaaacgtagctgaaagtgccggttttaaatgcaaacaataccgtttgtgtgccccgtggccgaaagttgaggttaacctttgttcagaattcttgaagggcaatttccgtgcaaaccttatcgtggaccgcaaagtttaaattttgccatggcttaacatcgcggtttgaccccacatctggccccccattaaagaacattaattagctccaagtgttttccctttcgttaaagacgtacttttgtgaacctttgggcacattagagagccgaatctcggaagttcccaagcattcgaaacaagcggaggtattccaacatatggggccggctatttaataacaaagacgggtttggcgaattattgggcttacgaggccattcccaccttgttgaaaagctgcctttgacagccgttagaacaggtgaatttgctccccttttttaggctagacctgcgaattgtaaggaaagtatctccccattttcttacattcgccactttggttccaccaactgggtttcttaaaagaaacccttcaaccaagctgttgtattaag

SEQ ID NO: 654916 - DNA, 671 bp, Homo sapiens
gaatggccataactggtgttgataacctattattgtcacagcaattaggtgggtagccccacaggccgatggcttgccaaacctctgtccaatcaactaattgcaaacgcgttcccaaacactcactctccaaatcttacacgcgtctagcatattatatacaagcattcacgttcatatcaaatatgtagcatttcaacttgcacagtaaaccaggggccacatgtgatcatagtgcagtcaatatcacatttagcagcattagcagtgctagcatagcatcctccacccagtcagtcataggcagcatagtcatagccaaaggaaaaacaggggcaacgacctccttcacaggcatatatatagtctcaacacacatcacattcacacatgcaacgcatagtgactaagtgttccaccaatcaactttcttccttaacgttaaataacaccaatccaaaagctaaagcagcactgtagacaatcaccacgctacttttgacctcacctgtcaagatgatggctatcagggacagacaactggatccttgggacatccaggagaggtgatgataagaggatgactaattagggcacgccactgactcctcggggcctcccaacagggcgatacaggctgatgcataggctccacaaataacttgcgtgag

SEQ ID NO: 654917 - DNA, 209 bp, Homo sapiens
cgctagaggcctgaagaagagcctgcaggatgtggcagtggagcagactgtgcagagcttaatgagctcgctgaaaaaacaatgccactatagggtgcagaaggtgccctctggggaggtcctgtgtgacaagacgccgactgtgggatccagtcagcacaggcgccaggcacagggccttgactgaattgagatgcatcacactgtct

SEQ ID NO: 654918 - DNA, 420 bp, Homo sapiens
tcgctgttcttgaggaccccagcactgtgagactccatgtgagaatcattagatgtatttgactcaggcacagtggctaacgcctgtaatcccagcactttgggaggcgaaggaggcagatcacttgaggtcaggagttcaagaccagcctgaccaacatggtgaaaccctgtctctgctaaaaatgcaaaaattagccgggtgtggtggcacatgcctgtagtcccagctactcaggaggctgaggcaggagaatcgcttggacccaggaggcggaggttgcagtgagccgagatcccacccattgtactccagcctgtgtaacagagtgagacttcatttaaaaaaaaaaattccaacctggacttggaaggaagtacgggcggtgagtggcctcagtctgggccaaaaagaggctta

SEQ ID NO: 654919 - DNA, 441 bp, Homo sapiens
caaggacctgcagagggttagttaatgtcttggagagctgttctttcacttgactggcagagagacagtgtccagaggtgcagacatatgtagctaccacccccacccctgtgtcctcgcagtcacaatttgtgactgagttctcataacatcctatgtggtaatattagtgtctcattgaggatgtagtggaggctgagggaccaggcaatctgcttaagaacatccagcttgtatgtggcaaagtagtgatcaaccacatcttctggtcggcaagctgttcacactccagccagccctgtgtccatgagtgtctaaccaaaggagtatttgtcctagtttatttagggtgcatttcaatcaggattaccatttgggagggaagcacatgccagcatgagttgctcagcctagcattcaagaggactgagtcttccttca

SEQ ID NO: 654920 - DNA, 275 bp, Homo sapiens
gaactggtcgggcagactcatatatcgtgcgatgctctagatacgaaaacaatctcaataagcacctaatatcaaaacagtcttaaacttattgcccaatgatcttactccttatctgtttctcagtcagctcatttcagtcataacaatccatttttctagtgctggacagaagcctggagatgtcttaattctctccctgctttcacatcctgtctttgcactgaaacttagagaatatatcaggaatctcaaccatttctcaccacgacaca

SEQ ID NO: 654921 - DNA, 195 bp, Homo sapiens
cagctacaaactgggcaaattatggcagtggtcagaattatttatggttattataaagatatctagatatatgtgcaagaataaaaaccttatgttttgttcttaaaaataaaaattaatggtcaggtgcaatggctcacacctgtaatcccagcactttgggagggatgaggcaggcagactgctgctgagctc

SEQ ID NO: 654922 - DNA, 221 bp, Homo sapiens
caggtagacctaaccccatcacactcaggaggctgaggcaggagaattgcttgaacccaggaggcggaggttgcagtgagccaggattgtgccattgcactccagcctgggcaacaagaacaaaactccatctcaaaaaataaaaatcccaatcccaagtcgaaatcacttcttgttttaaacaagaatgaatcattactgtgtatgttaggtctacctgg

SEQ ID NO: 654923 - DNA, 218 bp, Homo sapiens
aggacatctaggtgctgggtcctgcggatgccaccatatcagtcccgtatatcacagttgatagggtcctgtctcaattctcgtgacactgggtagacatgaggctcctgttttcaatgggtcgctttaccctgggactgaccgggaggctctgacccattaagccaccaaatagtaggtagtaagttctcactcttaggttcaacaggtgaagttaa

SEQ ID NO: 654924 - DNA, 389 bp, Homo sapiens
atcatggtccgcgcagtggtaagcttggcactttttcacttctgccatgtacttggcccacgcgtcaccttaactgtgttaatccctcatcctcgtgtcttctgcttcttggaacatattccgtgtcttaagggtatagtttgttcccgcttgtgcgtttgcccacgaagttaagtgtgaagcccgaacggcctttcctcttggaatccccgggccaagcggcggcgccggtctgtgtcgggtctctgcgaacccgggggcgcgctcttctgtgccgctgcctgtgctcttcttctatcttcgcgcttacacagctacagaacgctgctgtcgttggagcacgagttcaccgcgccacacagcgcgctcgaacgcgcgccacacacctc

SEQ ID NO: 654925 - DNA, 936 bp, Homo sapiens
cgagagaaggagagatcgaagaggggataaagtaattcgtgaaacggcaatcatgtgctggcgcccgcgagtgtgaagccccagtctggtgtttctagagaggcggtatgttgcgaacaactttgtgccgtgaattcagtgttcggggccgctgggtttgtgtgatgccctggggcgcgagaattccgaggggggccaaaaacagagtggtgccaccgaagggtctgatccggtttttcggggcccacaatatgggtgttacagggccaataatatctggcaaaggcaagcacttccccctggtgaatgttgtgaggaggatcccggaaccaagtgggcggggaccaataacgaacagggggcgaaaaaccagtgtccccgaacgtcgtccgtgaaacgttgggtgcccccccgggaaagtcccgcaaaaggtcgaaaaactgggccagaaagagaccgtgagacgaaaccccttctcccagagcttgtgtccaagcgttgccccccttttcacggtggcagtatctatcccccggcttccgtggtaaaattctttcgcgtgggaaaagtactctgtgaagacaagtagagcgagggcagaacaagttcagtgtagaaaactggttaaacaccggaggcagggaggggggagaagatcgggcgctcgggggcaatcggggccccctctcggcccccaggaggggtctcaacccccccccgggggccatcctccctccgtgggaccccgagttttcccggccccaggtggtcaacccgcaggggtggatgacccttgcactgtccccctgggcagaggctgcatatccacaatcacgttggccgacgacggcgtctcgcagagcttctttgtgtctgttgtctgtcgcacgtttttcattttccccgcaaaaaaaaattctcccaaaccccataaca

SEQ ID NO: 654926 - DNA, 1147 bp, Homo sapiens
tcaggtatataacctatttattaacaaaaaaaggcctacagatcttatttctttttggacccccccacggtgcggccccgggggccagtagtctgggtggtgctggcctcggacacagaaggccccagaatgtgacgcagccctctatgggcccagaatcttcttacagtcagctccaggtcttcagggagcttgtgagtccagaccatggtgtataggaccctggctgtattatttcacatccttatacaatcctttctggtcctggttcaagaaaacccagttctgggagacatctgagtactgggcagtaggattctggcatacatgggtagatcaccagctgttcacacctagatacctacaggagagtttctccccagccactactatggagtagaggtcaatgtgtcgtgacttatcctatcaacaaaccccactgtgagacaatatcttagcggccacaacacaccttataagtggacagttaagtgtgcacacaggcataaatttacgcgcgcgacccaatcagaatgatgggatgttagagataccatcgaaaaaagtaatgcccagggcaacactttctccaagaggacaatacaacgatagaacgacaagtggcgccgtgacacgaaacaaaaacgacagggatgggcacgactgtaaaaacagaagtcaccccccgggacccacaacagaagaggagagggtgtggcaacgaagacaaccccagagaagaagaccacgtgagggcaacgagccaaaacattaccgggtggaccagcaaaatctccacggtacactaccaagtggtttatgcggggacaagcctctgagcaataattgtgggaacaccaccagttgtagcacgttgccccaagttgaggcgtattatacgacacaacaccaagcaggtgtgccagcgtagcacaaaaaaccgactgggcacacgacaggcacctcccacaaaggaccacgaaaggaaaaaagacgagacaacaactaacccacaggaagagactagcaacaagcgccccacgtgggaacccacagaaggcagagggcacaaccaagcaaatgagcgagactccgagacaaaaaccatcacgcgggggaacacaacaaacacaaggaggagtgatca

SEQ ID NO: 654927 - DNA, 648 bp, Homo sapiens
  misc_feature (440)..(440): n is a, c, g, or t
  misc_feature (485)..(485): n is a, c, g, or t
acccactctaccttactaccatacaaccttaaccaaaccatttacccatataaagtataggcaatagaaattgaaacctgacacaatacatataataccgcaagggaaagatgaaaaattataaccaaacataatataccaaggactaacccctataccttctgcataatgaattaactacaaataactttgcaaggagagccaaagctaatacccccaaaaccagactagctacctaataacagctaaaagagcacacccatctatgtaacaaaatagtgggaagatttataggtagaggcgacaaacctaccgagcctggtgatagctaatgtccaaaataaaatcttacttcaactttaaatttacccacacaaccctctaaatccccttgtaaatttaactgttagtccaaagaggaacagctctttggacactangaaaaaaccttgtatagagagttaaaaatttaacacccatcatangcctaaaagctatcaccaattaataaagcattcaaacttaacacccactacctaaaaaatcccaaacatataacttaaactctcacacccaattggaccaatctatcaccctatataagaactaatgttactataagtcattcattctcctccacatcctgct

SEQ ID NO: 654928 - DNA, 395 bp, Homo sapiens
tttgcatggcaaggaattcagtttgtgtttacagctgaagctctcttgaaataatgtctcagtcacagcttatacattcgggggacccctgccagtcagacacggagtattgcggaactgtgatctggcgtcttttcaccattgacaatacattcagaacttatttctgataaaactgggcagtttctaaggatactgtacttatgatttaaagtcataactccatgatgcaaaagagaacaagaaatatgtttcaatgactgccttttaaattagcggtactccagcacttagggaggccgaggtgacaggatcgtttgaggccgggagttcaagacagcctgggcatcatagccagaccttgtatctactaaaaataaacaatacacaaattt

SEQ ID NO: 654929 - DNA, 857 bp, Homo sapiens
caaaatagatacatatgatgaatggagcataaatagtaactcctatcctttgtaggggtagtgtagtgtagtagtgtgtagtagtgtagtgtgcagcagcagcagcagcagcagcagcagtagtaatcatagcaccatcattgtgtcatatcagaatcatagaaacaactctctagcaagttgagcagcagcagagcatccaaatagtgtactataaaccggggggagcgtcataacaacaaacagcaagaagagcacaacaacaacttacgaaggagcataacgcagcggcgacataagaagtagcacccacaaacatcaaactcaattaatataataaacgaacaacaggcaacaaagatagcaacaagacaaataaacacgcccaaaggtagacaaacacgaccaagaagtagctaaacaccgcacagcgacagaagcgggataacacacataagaagggagaggagacaacacaagtcagacgaacaccacagaaagagatgacaacaaggaaaaacacaacacagtaaggaagctaggaacacgacaccaaggaacatcagatcggtaagatacagaaacgaaggagagaaacacgacaaaagaaaccaaaagacgaagtggtaaagtacagaagaacaccaaaccgcgacatggatagaaaagctaaggggcaagaaagcacacccgcaaagagagacaggacaccacaattaagacctaatacgcatagactggaaccaacagcaaccttagacacaaaaaaacaggacttacacagcagacaaatacagagggaccagaccagctaagacgggagacgcaagaaaaaaaaaaaccgaagaaaacatgcg

SEQ ID NO: 654930 - DNA, 351 bp, Homo sapiens
ctacaggatctttactagttctcgtgaggtgctccacgctatcgcagcaagaacagaagcagctattagagagaggtcagccattgcctacggggactctaaccagtgtagcccaatccaaggtgctgcgacttgatgggtaagcccagctaccctaacttgagtccggaacacaggatcatcccattttagctcaaagcacgtaaaaagcaaaataggatgagacattgtcttggttcttgaacagttagctatgttcaactaagctggtgagcaatagaaatagatatattttggtcgcatactcacaacatacaagagaagccaggtagtcgtgtaccgcgctcgcat

SEQ ID NO: 654931 - DNA, 926 bp, Homo sapiens
tggagagcatcacagtgtgtgaggtgtcagtgattgtagaccctccccagcccctcctgcttctttaagtgatctgtgtgcgtgcgcttcctctcgatcgtctattgctcgctcattctcttatattctgctgaactccgatgatataaggaagataccttacgtgcatggatgaagtttatctacatagatgtaagtcttattcagtttatagcagtgtgccaggcataagactttaattaggaatcatttgtctggtaatatgtcatgccgggaatgcctattgtagtaagatgtcacggtattttgtgaaatataacctttgaaaatgtgtaaccatttgagcgacttgttgtggtctagcattgtgtacgacagttctaagttgtgttgtgggttctctttatgtaactatgtatatatattgtgaagaagttgactgtgtaggcaagtaagttaagttccatagattatcactttctagccattagtggggatatgagtacccgtaaatacttgaccgaaattcttattcaccgtctggagacttctggggtaagggctagtttctatggtatcgttttctatccacccttgtccggttgcactgtactttgtttctagacgaataataccctgtatgatacttatctagcgcagaaatcagtctcatgagagctattgctgagtatagtcggtgtaacactacagcctgttgagttttgggtaataactttccaaggttgaatcccgtctaacaggatatattccaggtttgatttactcatggacttagactatgccttttcctgaaatattttggacccttttgttcttggcgttgaacacgttgtggcgctcggccggaacgctggggttcacacgcggcctggaaacaacaacagggtgccggggaaggccccgcg

SEQ ID NO: 654932 - DNA, 355 bp, Homo sapiens
tccgacatggactgcacattcgggaaaatcagcaaaagaactcatgtgaaatcattgggggctggtacccctgcatcatctctttcaccagttctttgcaactccactcttccctgtagcacactaagtccacctattgtctctgcttcctttactgtcccagactggctagtgggactcatcacttctgctcaccctcttaccagtgtttgatgccatcttccttgttcaccagttcaccatctctggccgtaccttgtcagtctctttatccacatccttgttctcctcaaaagttcatattcatagggccttgctctgttctagcctcttttctcattttcatacctctctc

SEQ ID NO: 654933 - DNA, 120 bp, Homo sapiens
actattcttcctaggtgtataatacttcctagtattgcatcgtctaggagatatcagagtgtgccagatatacaattagactgcataaacagattactccactaacatacatggttacag

SEQ ID NO: 654934 - DNA, 272 bp, Homo sapiens
cggagggagcccgcggcggcggcaagcaagctacagcgaaatggcggagaccgtggctgacaaccggcggctgatcaccaagccgcagaacctgaatgacggctacggaacccccagcaactttctcgagatcgatgtgagctacccgcaaacggttggggtcggccgcgggcgctttcaacacattacggaatcagggtcaagacaaatctttctattttcaagctgtgagagtctactcttatgaggaggatactacagactctgagatg

SEQ ID NO: 654935 - DNA, 822 bp, Homo sapiens
gcgccggacgcaaaggcggccgcggttctagtgaacttgactgtgatggggcttcctgaggagcgggtcctggagcggcagcgtggagccggggccaggaggaagctggagcctggagtgcctgggcgctggcagttggtctcctgcctgcccgaggtcagccgctccgcgcacgtcccctcgctgcagctgctaccgcgagctgcacctggcgctcctgtggaggagccgcgggaattctggggacgacacttgccaaggaatcttacctggaagactccattgccctggcccattccttcggtacaaccttttgatgtgactaacgggaaacactcttcatcgacgtggatgaaaggagcaactaccaacatctgctacaatgtaactggatcgaaatgtccatgagaaaaagcttggagataagttgctaatacatgggagggcaatgagccaggggagaccactcagatcacataccatcaagcttctggtccaagtgtgtcacgtatcagcaaatgtctccgaaaacagcgcattcagaatggtgaccggagtggcatctacatgcctatgatcccagagcttgtggcggccatgctggcatgtgcccgacataggggcgctttgcccctcaatatgtgtatgcagagctactctttcggagtctctatgtgaacggaatcttcggattcccagctagcgccttctcattcactacagattgcctactaccggtcgcggaaagcttgtgaaccctgaaggagttgcctgacgagggcctgccgcaagtgtcacgaaaaaggttaccccagtacgatg

SEQ ID NO: 654936 - DNA, 880 bp, Homo sapiens
  misc_feature (126)..(126): n is a, c, g, or t
  misc_feature (146)..(146): n is a, c, g, or t
cgagccaggatgatccgttgggcccccagcgcatctcctggaagagcccattcaccctgggagcgagctcttcggtagcctcagaccgtccttgaagaggatgactgagacattatgggccacgcnctgtgtgtctgctctcgggnaactgtcatcattgacaataagcgctacctcttcatccagaaactgggtgtgagggacgacagtccatgtgtacacgagcatgcaggacgctggagaggagggccctagactgagcaagcctgacatgtcatcgccgtcttctaactcacctcgcaacagtccttcggcactcgctggactattactagtactgagtggagacaggcgttgtagcgtaaaggcatggagcgcgctgtgctgcattgcttacgcaatatcctctctaagacgatggtgtacgcctgatggcaatgaagataggatagaggcgtgacaggacgaaacggcaagcttccctgacgcgagggatccaaaatcctgttgggcatgctgcatgagggcatcttgccacggagagccttgcaggaccattcatgccaaaggggttatgccacactagagaacgttgtaagtcgcactcagatatattgtcttggcagatgaaggggcagccagattctaaatggactaggggtatccatggaatcaccgcatgtcgagtccatgtggagaggcatcgccggccagtgattctagaccactgtaggacctgggggcagttccaggcggtgtcaccaatcctccttaaaagaagcccccagaaggctcattctcttgtggcacaggtcaactgtgctcatccgattgagcggaactgatggctgggtaccataagctgcgtgctatatgccat

SEQ ID NO: 654937 - DNA, 522 bp, Homo sapiens
  misc_feature (126)..(126): n is a, c, g, or t
  misc_feature (146)..(146): n is a, c, g, or t
  misc_feature (299)..(299): n is a, c, g, or t
  misc_feature (327)..(327): n is a, c, g, or t
  misc_feature (419)..(421): n is a, c, g, or t
  misc_feature (450)..(450): n is a, c, g, or t
cgagccaggatgatccgttgggcccccagcgcatctcctggaagagcccattcaccctgggagcgagctcttcggtagcctcagaccgtccttgaagaggatgactgagacattatgggccacgcnctgtgtgtctgctctcgggnaactgtcatcattgacaataagcgctacctcttcatccagaaactgggggaggggtgagtgtttggaagtcagttaactagtcctcaagtttatgatcattgaaggacaggggtgtgcatatgcttggggcacaagggttttatccctatccntgtcctctctcacctgacagaacctagntaaacagaatcaagaaggtggattctggagccaggccgggtaaatccacctggggtgaccttgataaacgatgtttttttcataaggtcaannnagagggttaactaatataacaaatggagncgtgaggatcaaaagaacaaaagtgaataaaatgtctccccccccccggggggggcaagtaaaaaaaaaaaa

SEQ ID NO: 654938 - DNA, 143 bp, Homo sapiens
ctgtgtattattgcctctgaggttcttgggcacactctatagccatactggacaggaaccatgtgcccctgtgtaggcatctgtcggtctggttatgccgccagagatggcagcatctctgctgcatcccccagagagtacac

SEQ ID NO: 654939 - DNA, 190 bp, Homo sapiens
ctctgggggctgaaaaccactgctttaaatccctttacatttactatcacataaggttattgtaaatgagaaatattctattgatgctacaaatggaaagccaatgcctttaccataaatagaaaaacaaccctaagaaacaagcaaaacaaaaacaaaacgggctgggtgtggtggctcacgccctgcc

SEQ ID NO: 654940 - DNA, 212 bp, Homo sapiens
  misc_feature (11)..(11): n is a, c, g, or t
  misc_feature (21)..(22): n is a, c, g, or t
  misc_feature (133)..(133): n is a, c, g, or t
  misc_feature (139)..(139): n is a, c, g, or t
  misc_feature (191)..(191): n is a, c, g, or t
  misc_feature (193)..(193): n is a, c, g, or t
  misc_feature (197)..(197): n is a, c, g, or t
cccagggaagnagtggatcannccacaaaagccacatccaccgggcctattcccaaattattggcatccatccagccctcaggaggcccagaaccgaggagaaacatgctcatactttctgggtaggaacttngatctncaagaattctgcctctcgggccagcacctcctaggaagaacagggaaccagngnggcngggacacccctcgtg

SEQ ID NO: 654941 - DNA, 960 bp, Homo sapiens
ccggtgaagaggctgcagccggacttgtgggatgcgtcgctcaatattcgagagcgagagggtcaaggcggcgcgtctcgtgggtgtggagcctggaggtgaccgcgcctgctgcgagtgcccccaaccctgccgcggtctgcagtggttcatgcccgtaagaacgtttttcattcataataggactggactccgcacggtcgcgggtgagtcgagcaaccccgaacatgcggtgtcctccccgtctgagccgtctagccctcggtgcttgatttctgagaacattcgagtggtataccgcagtgcactcgaggcatccgtcgtaacggcggacgcggtaacagagacagggacccgacgctagatcctccaggatcgggcaattcggcgatgggcatgtccaagtcgagagagattccaacatggatgccaagcagttcatggaccactcgagatggtaggtccaaggagcttgccagatgtgatggatacagcccgtctatattcacttgagagagacacccgaaacaagattaccccacagggcatctgaactacccttcaggtacaggggcctccaacagacttgccaggctcaggagtacattcgtagccctgcgtgtgccgagcatcctagggtggtactatggaatgcctgtgatggagtccagagtccatgcccggagcgaaagaagggagccgccgactgagctaaaagtgcgctgaagtggaacaagctggtctgcgggtcgatttgcaaggaatccgtacggaaggtgcctgaatcgaccttcttgctaggagtggaacagttgacttgatctggactagttgagcaaagcctgggctgctgcagcgaccattttgggagcctgtatactatcaagtgatgccccagaggtggtgcttacattcccaccgacctgtttgcaaggtccctgaggatcgggagggggaccg

SEQ ID NO: 654942 - DNA, 175 bp, Homo sapiens
  misc_feature (22)..(22): n is a, c, g, or t
  misc_feature (39)..(39): n is a, c, g, or t
  misc_feature (41)..(41): n is a, c, g, or t
  misc_feature (47)..(47): n is a, c, g, or t
  misc_feature (137)..(137): n is a, c, g, or t
cgagatgagctctactttatcnatactctcttccttccntntccatntatagcaagtattattttcgaaaccatgagagaaagctgcatacatcacagtactttacttctaaaaacttcattatgtattttctaagnataaagatacttcagccgggcatgtggctcccgcctgt

SEQ ID NO: 654943 - DNA, 150 bp, Homo sapiens
  misc_feature (64)..(64): n is a, c, g, or t
  misc_feature (109)..(109): n is a, c, g, or t
atttctgatccctccattcagggcgtttgggagccaccccttcattttttaaaaaaagtatttntttgtgaccgacggccggggccttctgacggtccgaggaaatgantgggccatttacctactgtcacggtccgtggaggggggaag

SEQ ID NO: 654944 - DNA, 362 bp, Homo sapiens
tttctcgaatacgacggtttctcacaactgttaagcttgcaaatgacaatgcagactacatgaagatgaacaggacagagaagccaaaagccaccagaagtgcagcaagtcttgcgatcctggggaagactgtgcaagttgtcaggcaagatgagatagatgtggtgccagagagtccattgtcagatgttggctctgaggattgtcggtactgtgccaaaaaaatgacaacaaatttgactagacaagacagttgcctagggaaattctcctccatttgagcaaggaaacagtgaacccgagtcaccgatggatgtggataattctcgacaatagttgacaaggactcagaagcagatgag

SEQ ID NO: 654945 - DNA, 925 bp, Homo sapiens
acttccatgccgtgggccgtgcaccatatcgccgtggatctccctgtttcttgtactgttctgttgtcccatatcgtgttatcccccgcttctctccagtcatctgctgttcgctgctttgttcgttttaccatgtcttgacggctctttctcgctgacggtgtgtattggatcggtggtctatcgagtttccctccttgttgcaagttttacggtactgttgtcgacgtattttcgtgaggctcctggcgtaaataattatgctccgctactccgcatagtatgaactgtcaaatcttatctaaatccttgtgtgtgtagtatgatagtgtatgattagtagtcttctgccaattccactttgttgccagtaccttttgcatgtttcatgtcgggtcctgttatcccaccttattggttcattgggtttatgagttggggcatggctctactgctgtcctgtatttactggtatcccagcagtaagcagcatgcatgcttgaagtccaggtcactggtggtcacattgttatctatatttcacttctctaggccctctacctgactctagaagtgcccatcccacatatattcagtttctggaggggtttgatcttaaaatctggatccgaagtcgatacacgtctgagatgattgaacaacatagaaattggccgcggtcatggtggcttatcgcctgtaatcccagcatctttggtaaggccaaggacgggcagatcatgaggtcaggagatctgagaccatcctggctaacatctgtgaaaccccatctttactacctatgctccaaaaattatcggggcacggtcggtgggcatctgtagtcccagctacttcgcgagactgaggcaggagaatagcaagaacccgggagaatacgccgggagtgagctccgaggacctc

SEQ ID NO: 654946 - DNA, 100 bp, Homo sapiens
gcaaagtagcagctactgaactgaccagaaacaaacccaagacactgaattagacaaaccaacctgctgaagtataggcactttttctaagatgaaatgt

SEQ ID NO: 654947 - DNA, 85 bp, Homo sapiens
aaattttcccccccccccccccccccttttttttaacccccggggttttttcccccgggggggggaaaaagttttttttggggga

SEQ ID NO: 654948 - DNA, 856 bp, Homo sapiens
  misc_feature (3)..(3): n is a, c, g, or t
  misc_feature (63)..(63): n is a, c, g, or t
  misc_feature (86)..(86): n is a, c, g, or t
  misc_feature (102)..(102): n is a, c, g, or t
  misc_feature (110)..(110): n is a, c, g, or t
  misc_feature (112)..(113): n is a, c, g, or t
  misc_feature (119)..(119): n is a, c, g, or t
  misc_feature (131)..(131): n is a, c, g, or t
  misc_feature (133)..(133): n is a, c, g, or t
  misc_feature (141)..(141): n is a, c, g, or t
  misc_feature (153)..(154): n is a, c, g, or t
  misc_feature (158)..(158): n is a, c, g, or t
  misc_feature (161)..(161): n is a, c, g, or t
  misc_feature (177)..(178): n is a, c, g, or t
  misc_feature (181)..(182): n is a, c, g, or t
  misc_feature (187)..(187): n is a, c, g, or t
  misc_feature (191)..(192): n is a, c, g, or t
  misc_feature (194)..(194): n is a, c, g, or t
  misc_feature (196)..(196): n is a, c, g, or t
  misc_feature (198)..(199): n is a, c, g, or t
  misc_feature (202)..(202): n is a, c, g, or t
  misc_feature (205)..(205): n is a, c, g, or t
  misc_feature (211)..(211): n is a, c, g, or t
  misc_feature (215)..(215): n is a, c, g, or t
  misc_feature (218)..(218): n is a, c, g, or t
  misc_feature (221)..(221): n is a, c, g, or t
  misc_feature (226)..(226): n is a, c, g, or t
  misc_feature (230)..(230): n is a, c, g, or t
  misc_feature (235)..(235): n is a, c, g, or t
  misc_feature (239)..(239): n is a, c, g, or t
  misc_feature (241)..(241): n is a, c, g, or t
  misc_feature (243)..(243): n is a, c, g, or t
  misc_feature (246)..(246): n is a, c, g, or t
  misc_feature (249)..(249): n is a, c, g, or t
  misc_feature (255)..(255): n is a, c, g, or t
  misc_feature (258)..(260): n is a, c, g, or t
  misc_feature (264)..(264): n is a, c, g, or t
  misc_feature (276)..(276): n is a, c, g, or t
  misc_feature (285)..(286): n is a, c, g, or t
  misc_feature (308)..(308): n is a, c, g, or t
  misc_feature (313)..(313): n is a, c, g, or t
  misc_feature (323)..(323): n is a, c, g, or t
  misc_feature (329)..(329): n is a, c, g, or t
  misc_feature (331)..(331): n is a, c, g, or t
  misc_feature (346)..(346): n is a, c, g, or t
  misc_feature (361)..(361): n is a, c, g, or t
  misc_feature (414)..(414): n is a, c, g, or t
  misc_feature (424)..(424): n is a, c, g, or t
  misc_feature (450)..(450): n is a, c, g, or t
  misc_feature (470)..(470): n is a, c, g, or t
  misc_feature (497)..(497): n is a, c, g, or t
  misc_feature (839)..(839): n is a, c, g, or t
gtnatctcttaaagaatcgagaattgcgtcaaaaaaaaaattaaataaataaagaatgaatanatttacaggggtaaatggaaacngcttccaactcaaagnaagtgacngnncagggngttctgggcaangngatcgggnaggagagggggnngggnggngggggttggggtttgnngcnntgggngggnngnangnnggnggnggtggntgtngcnagngtctngggngatcncagngnantcngcnctgggnggnnngtgncctgcacagatnagggggtgnngggcacacagactcaccaagcnacagngttgtgttcnacaagngngtgcttaccttagcnacgaaggaccaagcnacaggtactaaaggttgaactcaaagatatgtgcagggtattaaacaaatacnagggggaacngttaacttcaatacaaggtcaaaatnaacaacaagttctacaatcnagtgctgatatcagatacaagcttcanggacaatttcttttcgaaggcttattccagtttcgtgaggctagcatgaggtgtgtgcatttgccaggggcaaatttctattctcaattaacccatgcagcaaatgctacgcatctgctgagtccgtttagaagcatttgcggtggacgatggaggggcccgactcgtcgtactcctgcttgctaatccacatctgctggaaggtggacagtgaggccaggatggagccacccgatccacaccgagtacttgcgctctgggggtgcgatgatcttgatcttcatggtgctgggcgcaagggcggtgatctccttctgcatcctgtcagcaatgcccggatanatgggtggtgcgcccga

SEQ ID NO: 654949 - DNA, 719 bp, Homo sapiens
  misc_feature (377)..(379): n is a, c, g, or t
  misc_feature (393)..(394): n is a, c, g, or t
  misc_feature (540)..(540): n is a, c, g, or t
gccaggatggaggagccccaggccggcgatgctgctcggttctcttgtccccccaactttaccgcgaagcccccagcctcagagtcccctcgtttctccttgagaagcgctgacgggtccagatacggagctgtggcttattcaggcccctgcagactttgccccatgaatgcttcaactgggcggcatgtgcctctctctggctcccagaatcgtcaagggcaaattggcaggcaagcggcaccgctgatcgaggtcctcagcagctgtccccaagctggtagaagcgaccctgctggccccctcaatcggaggcaggaggtggactcacctgtgcctcagccccccatgggtcaacccgtagaggcactccttgnnnaggcgtcacccganngcaatccactagtcagagtggagctcctctgtcatgctccagtcccacgcaagtcccccagccacagatccctcctggtctgaggcctcggttctgtgcctttgtggtggcaagccaccagtcactgggcctaggtcagccttggnccccaacctgctcagcctcagggaagaagaagaaaggagatgcaggtgacagaggccccagtcactcaggaggcagtgaatgggcacgggggccctgtgcaggtggacatggctttggggtcgcagaaatggatgtgcggaagaagacgaagaaacgagatcagcagtctgagagaaac

SEQ ID NO: 654950 - DNA, 273 bp, Homo sapiens
aaaaaaagtttaattttttaaacccccaaaggaggggggttcctttcaaagcaaaaacagccccctttttttttcccccctaaaaaaccctgccttgttgggggttataaaatataaaaaaaggggcccctaaggggttggtttccaaaattaaaaattttttgtattcccccctgaaaaattttttttaacggaaagttttaaaaaattggggggggaattcttaaaaccaaagttttttttaaaaaaaacccccccctgcttggcccctga

SEQ ID NO: 654951 - DNA, 265 bp, Homo sapiens
gagagctgcacagagcaggagtctgagagctgcacagagcaggagtctttatttggttcacttctggtctgcagcaaccacttgctactaaaagatggaaaagatgtacaaaaatgtcacagccctttagaaagcgacattatcagaaatgtatgaccttcagtcctccctccctctcctatgcccccaccagaccaggcggcgagaaggaacagggagtgaacatgtaacggaaaacaataaaactgaatttaactggaaaaaa

SEQ ID NO: 654952 - DNA, 190 bp, Homo sapiens
gatcccgtctgggagctgtactaagctgagactcggggcgcagtccgggcaggtgcagcgggagccggccggagatgccctgtattcaagcccaatatgggacaccatgcaccgatctcgggaccccgtgaccaccttgcaagcgatcccctgacccctgagttcatcaagcccaccatggaccttgcca

SEQ ID NO: 654953 - DNA, 254 bp, Homo sapiens
ctaccagacatcacacatctgggaggatggtggtgcccatcatcaaaaggccaatcagaaagatggataacttctctctccacaagagttagtgtccataagtagcttcacatactcttactatagtggtacctcccatactactaaagttcctctgtaaatttgtttaaggtctaattagatgcatagtgtgtaataacaaatctcttgtgcttgtatgtgacttcctcaggagctgggcatattccatcgag

SEQ ID NO: 654954 - DNA, 644 bp, Homo sapiens
gagaaggatgtgttgaaagcaggagtgaaccagtgtgctgctggtagctgggtctctcgtatagaggtcgcctgatgtcctctgtgatcgctgttccgtcgtgtcgtgcttcgtatgagactctgatggcacgaggaaagcctggaacatgtgggagtgcaatttagaccaccagcgtggtgagcatagggctggatgagaagtttcgcagcgaggatctacatggcttggccgcatggaggctgtgcgcatcgtccattgaccgagacaatcgtcgggacaggagaaatgccgttctctgggtcaaatcgtctagccccgcaccattccggctggcttctaggtaacacatggttgttatgatgcgatctgcggggagacaaggtcacaatagaaggcttttgtccgacctcgagagccacgtctggatcccattcaaagaggtggcagtgaccctcatttaccaactggccagagggccccgacagtgatctgtgcccagatattgcagggctgtgctaaaagcatggccctggagaatgctagaagagaagcagaaccagtcaggaggacccgaaggagtcccccgggaatgctccccactttcctgttgatgaacctgctgtccctggctggggatgtgg

SEQ ID NO: 654955 - DNA, 1146 bp, Homo sapiens
cgcatctgtatcgggagccgagcgcgccgggctgggccggggccggagcggagcgtgagagggagcgcgcccgtccctgccccgagttccgcgcgcttccctcccgtcgcagcgctgggcgcactggccggcgtcccagccatggagcaagacaactgcccccgatagatccagttccggtcccgctgctggagccgcaccttgacgcccgagtgcggcgtgagcagattctgagtgcgccgactcaccgcctgccagccgtcgtgcttgaccagtgaccagtcatccccagagattagatgaagaccgtgatcctcaaggccacaatctcagagtccaacttttgcgcaagtgtctaccacggccaaacggaacatgtagagaatgatcacagggatcagcactccatcatattgaaagaatactttgcagaaatggcatccgctaagaagctcacgagagacggcagtaaggaacccagcacataaagaaccgctcaacccgatataccagccacgtggattccaagggagccaactcggtctgagagaggaggaggtatcttgggatcaagactgcagtttgggaatgcatggcacaccggatttgtttcttattccttcacttttggggaaaatctcttgtacttaagcacgctgactcactttgggtgtcaggtccttggcacttttccttcttttccaagctgggagaatcctttctccctgacttcttgcccgtggcctctctggagggccccacgctcctgccagcctgcctctgcgcaccgacctgaaacagggagactaggagaagccttgcaccacgacgagcttcttgccttagccctgcatttagtagctgttggcaagagacaatacggtccaatcaactgcgcggcgatacttcaaggggtggcaagaaggcagaaaagacgcccaagagcgaacacgattatctatgaaggaaaaaactaggaagcacgctctagaggccctttcctgcagagtggaaacaccacggcctcctacgccactatcccgtcaccacgtagtgaatatacaagtggggactccttgatgtgaccaagggacagatggtggagggccttgtccgtgcaacaagattatggcgtcgacacaccac

SEQ ID NO: 654956 - DNA, 426 bp, Homo sapiens
tgctgttctcctcctcgggataaattcaacataacgtagcagataatatccaaaccacatcattccacctctggccctcccaaatcttatgtccttttcacaatgcaaaatataaccatgccttcccaacagtgccgcaaagtcttaactcattccagcattaactcagaagtccaaagtctcatctgagacaaggcaaatccctgccacctatgagcctataaaataaaaaacaaattatttacttccaacatacaatcagggttcaggggttggggaaatattcccattagggaaaaacctgccaaaaaagggggctataggccccatgcaagttcaaaacccagcatggcagtcattaaatcatgaaactccacaatgatctccttggtttccatgtggcacgctgatatgagggttgggctc

SEQ ID NO: 654957 - DNA, 856 bp, Homo sapiens
gcccggtttccgatgtgcagcctggacagtgcatgtgagctgtctggcctttagtccttgatccttggtgttacatggacaatgaccaaccagtacggtattctcttcaaacaagagcaatgcccatgatgatgccatttggtcagttgcttggtggacaaacaagaaggaaaactctgagacagtggtcacaggctcccgtagatgacctggtgaaggtctggaaactgggtgtgatgacgaggctggacctacagctgagagtctggagggtacatcaagctggtgagtggtgtctgtggacatcagtcacaccctgtccattgctgcatccagtctctcttgatgctcatattcgatcttttggagacttctgtgcataaccatggacaacagatataacgtccatagatgcaggatctgtggatgcctggacctttggaccatttgtcttcctgatttcccagtatctggccactaggtaactcatgtctgggaaagtgaacattattggtgtggaaagtgggcactcggaatattctttggacacgagaggaactttcattcttagtattggatatagtcctgatgggaactagctaccgccaagtgtgagccataatattggatatcatcaatatcttttgatagttgcagatggatacatattcgtgcatacacctggaaggccaatgccatgcccattcgctccttgagcttttccccggactcccagtcctttgtgactgcttcagatgatggtacatcaagatctatgatggtacaacatggcaatttggggtggcacggctgaacggcatgcctcctgggtgctgaacgttgattctgtcctgat

SEQ ID NO: 654958 - DNA, 127 bp, Homo sapiens
taccatggtactggcgatgacgataaagcggtgccacgaggcggtctgagccatgatcgcggcgatgtcgccccccccatacctgcagccaggcctcggcagcagcagcagagtggccgccgaagcc

SEQ ID NO: 654959 - DNA, 434 bp, Homo sapiens
  misc_feature (7)..(7): n is a, c, g, or t
aagatgnatgttaacacaaggtcctattttaataaataaggtgttgaaatacttccatgtaaattttattgaatactgtaacattaccctcaaaattgtgatggttttgccatcatccgtaaagttgaaaaattggggcccaggtgtggtggctcatgccctgtaatcctcagcactttggtaggcccaaggagggtggatcatttgaggtcagaagttcaagagcagcctggccaacatggtgaaaccccgtctctactaaaaatacaaaaattagccaggcatggtggtgcgcatctgtaatcccagctacttgggaggctgaggcaggagaattgcttgaacccaggaggtggaggctgcagtgagctgagatggcaccattgcactccagtcctgggtgacagagcaagactccatctgaaaaaaaaaaa

SEQ ID NO: 654960 - DNA, 1358 bp, Homo sapiens
  misc_feature (517)..(517): n is a, c, g, or t
gatagcgtttcctcttctgtccaaacccactaggccttaggtggtacgaatgcatagtgggtcatcccttgatttcgccgtatctattgttctcattttagattcgcgcttaatatccagagggtgctgtctcggtcgcagatcgcactaccagagcactgagcgttggctcatcgcgtgttgaaacgcacttataggcgacgatacgacacagattgttcagaaggcgctatgcgttggttcgagtgtggaccgttttggcgtccatgttgatacttgcgactcgatggtagtcccactatttggcaacgcaatcattggtgatagacactgtatggctggaattcgacagctcaagcgtcgagatgttgtcaagatacaccatttgttgttaagctttagactgcgaccttacaggccctagatatagattttggctccgaggcacacagtccaccactatcagtgacacccgttcttgttggagatgactaagtatatgtaatcgcttcccagngcttcgcaacaacctgcgtttcgggttcgatacatcctccataacatgaagctagaatacaggtggcggctagatcgttcgctattgggctggctacaaatcacaaatgggaaaaccccttgtcagcaagtcacaacgttgtcacagtgccgtatctcgtgctagccttaatgggaacgtacaacatggaaagtgtacaccaaaagccccaaaaaacaacttgcgctcaccccagaagtatggggagtgggaagaaatcgcaaaggaaagtgctttcggattcggcatttgcactaggtttgacagagcttgcgccatttgttatgccatttggcaggccaatattgcaagagcaaagttagcgctgttgtggtggatcgccacacgacattgagatgtgaccctgctacgtaattgtgcaccaccttttggcgccatggccaaattgaatccggcgtcgcttttttacctgttttttgagttggcgccactctgaggaaaatcgagcccgttcttgttgccttagtggggccttaaagaaacggtgttagttgaaacacggccgttgctaatgtcgtcgaaccgacgggaacactgtgattttgcccataagggcaatagctgtggtaattaaatggggcgttgaccctttgacacctttgggttgggtccccataccacaggccatcccggaacctggaaagctcttttcgggcgggtacatggaacatggtggggtaaaaggaaggcggttctcaagggttcatatggcgcgcaaaaactatgaaaggtacccctacataaggtgggtatgcccatggggtcagtcccacagaagact

SEQ ID NO: 654961 - DNA, 322 bp, Homo sapiens
cccagactgtcattcttcattgatggagatgatggatgatggatgatgaatgataggtaagtggatgggtggatggatggatggataggtaagtggatggatggatagatgggataggtgtttgagtggatggataaatagatgtctgagtggatgaatgcatagatgaatggatggataggcagctgggtagatgtatgaaaggagtgacgggactgacgtggtggttggatggctacgacgacctggactggatacgctcggcggagggttgcgatgggtaggtgaatgagtggctcgatgggtggatgcatggctgcat

SEQ ID NO: 654962 - DNA, 256 bp, Homo sapiens
acctgcgactattacacaggaaactactaatcaccgtttttgatcgagtcacccccacagttacatattacttcaacagagatcctttccctcccatgagatatgaacaacctccggtttctcatgaacgtatagttcggtatagcgtcgtatacgaggataacatatgggccataggaaggcatctaaatggggactcctcttaggaggtcgatcctagcgaggcatgctaagcctttggcactgtgccgtcgat

SEQ ID NO: 654963 - DNA, 296 bp, Homo sapiens
ttttttttttaaagagaaacccggctcactttgtttcccaaggttggaatgcaaatagaatactaactgcattattcagcctagaactcctaacctcaagtgattcttccacctcagactcctaagttgttgggatttcaggtgagagccaccatacccggccaactacccttttaaagccatctcctgcacctggccacctcctctcccccagtccagttgaacttgtcagcaggctgcctcttcctcattaccacaccactgaaaagtcttgtcctgccataactgagcccaag

SEQ ID NO: 654964 - DNA, 146 bp, Homo sapiens
tgctctgagttcccaatcatagaggccacgcaataactgtctgctataccagtcagattgagcagcatctgtcaagagtttcagtcccacttgcagaggaaaggctctctggcttcggtccgtggcctctatgggtaccgagtctc

SEQ ID NO: 654965 - DNA, 456 bp, Homo sapiens
tatgtgacaacttctgggcccaggagtaatttctcagcattgagggtaaaataggatggagtgctctgttgatcatttgggagatgtaggttacctgatttgtgccttaggatgcagcgtgaagcagaagtccatattgcaattatgattttagaaggaactaagcattttactcacacccacagcagcaagaatgacttcctgcagcagatattccacctgtaatagccctttggcactgtgggcaaaacccaaaggctagtgtttccatttattccatgttggtgtatggggtttccctggcaacttcccttaggccagactcactggcctaattcagagaggggattctcaatcactttatgcatgaatgattttgtgtatgtgtgtcataatattccgtcggatcttccgcagttttgtaagttatactgtaaggcccgtttttaaatatgg

SEQ ID NO: 654966 - DNA, 189 bp, Homo sapiens
gcgctacatgcggatgacttacactcacacggacaaccctgacaggaaataccagacagccttaggcaccactcgctctatactagaacagcaaatatcagtagtatcaccacagaaaggtgatggcaactgtagcactccgagctcacacagttcagctcctaacttctacaacaccaaacggagaaa

SEQ ID NO: 654967 - DNA, 154 bp, Homo sapiens
  misc_feature (27)..(27): n is a, c, g, or t
tcagttactaagtctcagcctctagcnctggaatatggctagagaacctcctccctggctatatccccatttgtctaacaggcccttagatggatctgtctcccactccgtgcgccatcccatcccgctgagagccacctgtacccttcaatga

SEQ ID NO: 654968 - DNA, 329 bp, Homo sapiens
ggtttgatcccaaaccccccccccccccctagttctcaggaaaaaaacccctctaaagcccttcttgcgcttgcccgaagaccaaaaaaggcggcccgatgcgtgtatcatcaagaaaggagaagaaccctggtggacatttaattgaggcccccaagggaatgcatgagagccctaggatttaaaatatgaaatggtggtttgctgtgtgaataaataattcctgaagaatgaagaagattaattttgggagttttttggcgaactttgatatgtggaaaaaggatttataatttattgtaagaagaaagttaaatattactagtgga

SEQ ID NO: 654969 - DNA, 227 bp, Homo sapiens
attatttgaatttttaaattatttgtttataaaaaaaaaaaaagcccaattgggtgggctgtcctgtgttgtgctgggcccccagtttgtagtttgcctttcctgtgttggaaaggttgtgagtcctgctggtcaccccccagcctggtccggcctccccttttaaaaagggttgagccttttggggtttcaaacggggaaccgttccaataaaacaaaggggcaga

SEQ ID NO: 654970 - DNA, 357 bp, Homo sapiens
catagcgcccttttccctgtcgctgtgctgctcgccgtgcccgccatgctgtctctagactttttggaccatgtgcggcggatgagacaagcggcagctctattatcaaggcctaaattttggaatgagtggctcataggcactaatgatctggaaggggttaatggtaataactggaagtgaaaggccgaatgtagtggtgctcagaggcagcatggaacctgcgtttcatatgaggagaacttctctttctaactcgagttgaagataccataccagtgggagtggtggttttaggatagaaggaagagagagtcctataggtcaccgagtcttggattcatgatgccgcggcct

SEQ ID NO: 654971 - DNA, 115 bp, Homo sapiens
tgaacattcgtgtccccatggcgggagaacatgctactgttcttgtcccccttttttttagatatgtcaaaaaaaattaagttttctagtcctgttcttttttttcttttaaacg

SEQ ID NO: 654972 - DNA, 715 bp, Homo sapiens
caggccgcccgccgggatgcagtgggccgtgtgccggcggctggcgcgtgggccgcgctgctcctggctgtctgcatcggtgctgacccaggtctgtctggctctggcgtggtgtacgcaccacgccttgcgtacttccacgcgcggaagcatgcatcgcctgcagctctcgcgcgcggccacgtagcgcctgcgtgctgggaccacggaggctggccgttctctcgatctgattctgtggagggctgctggcgtgctgctgcccagtgctcacggtgcttgtcccgaccgaggtagctgctactgggtgttcgtgaatgcgggtggctggatgggcgccatgtgccttctgccacgccatctgctggtccgacgtagtgtcgctgctcttacggcacccggcttgggctcccgcggccactcggggcgctactggttctgacgactctcgcgcatcccatcactctctgggacctttccagccattggcgacgacgcgcgtaccaccaagaagtgaggtcttctagcctagcgggagacggtacgtacacgggcctggtgattgccacagctgtgcgagtggtgggccaagacatcactggatggtggagtacggccggggcgtcatcccatccaccctggccttgcgctgctggtccgacactgtcttcagtcacccatgacttcctcatgcctcttctatactcttcggtct

SEQ ID NO: 654973 - DNA, 115 bp, Homo sapiens
aacagaggatcaccacgcatctccccgacaagcaatctcgcactgtcataagatgtcggtggacttatgtgacctttgaatcgaacatataagcaaatctcaaaacacactgtag

SEQ ID NO: 654974 - DNA, 356 bp, Homo sapiens
tgtggctgggggggaagattgggccatgaagtggcagcagagggcgtctcacactgcgggcacggccccctctgagggcgagttcatcgacgtgttccagaaaatcaagctggctgattaacttgcttggcaaatgctgcagacagcacatccatgaaccccatgcgccgctggagctctgttgccacttcctcttcgtggcctcgtggaccctggtgccttggggccgtgtgtggcatgggtgctgctgcatgggtggttggcccaagatggcctcttgcaggcatctcccctgggggtcgggggtttggggcaagaagtgttgcctgcctttgggcaggccccggttcacggct

SEQ ID NO: 654975 - DNA, 1108 bp, Homo sapiens
ctggacctgtccatgccccgtggaccagtactcccccagctttcccgacaccgcggatctctacgtgctcctcaggggaggattccgtcttctctcatgagccgctgccctgaggagccctgcctgtcgccctgacatcccgagatccagacttgccaattggcgtgagctcaaagctgcctgcgtagacgtgccagctccagcactgccgctccccagactccagccgtacagctgtagagcctcacccagcagcccctgctgggcccacgcacctgtcgcgtccctgtcccctttcctgctggcaggagccggctgcctaccaggggccttcctgtgtggcctgccttctacccactcagctcacctctccctccacctacctctccacctgctggtgagaggtgcaaagaggcagatctttgctgccagccacgttcatcccctcccagatgtcggaccaacagcccttccctgccaccaggcactgcctggagggcatggcagtgggagccaatgaacaggcatgcaagtgagagcttcctgagcttgcgtcctgacggatggactgatatgccttcacccataagccccgtcgcagtctggtggcaggtgccttgtcgtcagggctacagcaagtacggaggtcagggcttcgtgcctcgattgaaggtgacctctgcccagataggtggtagcagtggccttataattccgataactagtatggcatcgctgaccaaatgccctggtaccagcacgcaggccgccgccacatgccaggtagggcgccgcgttgtggagcctggggcccagccaaatgggcgtcagactatagcatcacacaccacactgctaccagccagaacacctgctgccacttacaagggccgctcccaggaattaccctcgggattagacggaccgcaggcggcaagacaagcggcgaactataggccacacaaaaagccgccaccacaaccagagcaagaaaacaccccatgaccaggccacagagcccaacgcggcgcccacagacaaagcaagagaacatatgtagcaccgccacaacatgacaaccacacaacacgaccagccccacaggaaa

SEQ ID NO: 654976 - DNA, 298 bp, Homo sapiens
ggagtgctcccggtgtcgcgagtacagtgctgatgttattgaacataaacactggtatgcaacgacagaaggcatgatcagtggaagatgtatcgaagaattttagatcccatctatccagaccggtgctcctcatgtatccactggccgagcgcgatagtgtccctacctcttctccagagcatcattcctttctatctgctgccagagccacaggtgccagtggagctccaaggactcactttctaaaattccacacctggagtgacctctagtcgctcagcattcctcgcaacag

SEQ ID NO: 654977 - DNA, 892 bp, Homo sapiens
  misc_feature (108)..(108): n is a, c, g, or t
  misc_feature (111)..(111): n is a, c, g, or t
  misc_feature (142)..(142): n is a, c, g, or t
  misc_feature (151)..(151): n is a, c, g, or t
  misc_feature (186)..(186): n is a, c, g, or t
  misc_feature (213)..(213): n is a, c, g, or t
  misc_feature (354)..(354): n is a, c, g, or t
  misc_feature (357)..(357): n is a, c, g, or t
  misc_feature (379)..(380): n is a, c, g, or t
  misc_feature (410)..(411): n is a, c, g, or t
  misc_feature (425)..(425): n is a, c, g, or t
  misc_feature (428)..(429): n is a, c, g, or t
  misc_feature (432)..(432): n is a, c, g, or t
  misc_feature (440)..(440): n is a, c, g, or t
  misc_feature (445)..(445): n is a, c, g, or t
  misc_feature (465)..(465): n is a, c, g, or t
gaagttggtgtgaccggcgggggacgccggtggtggcggcagggcggctggggggcaccgggccgcggcgccaccatggcggtgcgacaggcgctgggccgcggctgnagntgggtcgagcgctgtgctgcgcttcacgggnaagcccggncgggcctacggttggggcggcgggcccgggggggntgtgtccgcggggagcgtccaggctgngccgcaggaccgggcgcggagcctcgcaggttcgggctcgggctccctaaccgtctccgttcttccgcagtcggtggccgggctggcggcgcggttgcagcggcagtcgtggtgcgggcctggggctgcgcgggcccttgnggncgggcagtctttctggccttcnnggctagggctgggctcatcgaggaaaaacnnggcggagagccggnggnnggngtctcggnctgtncaggagatccaggcaatttntacccagaaaagcaagccggggctgacgcgtgtggacacgacgacgcttgcagggtttcggtggaggagtatctgatagggcagtccatggtaaggcctgcaagtgctgttgtgtttgaagcaccaatgcctacttggtcccagacactggggtgacaaagagcaccgggttgttccacggaggggccagtaccagtggcccaggagagggaggagcgactcgggggccggcttccctggctcagatgtgtgacttccggcggtctcagcgagcacttgaacaatggcagaattgtccggagcaatgcttggtggaagtggaccctaaacgaagcaggaagagcgcacaaacggcgcccacagcggcgggtcaactcatgcaccaaacaaccccaaaaggctcacccagttatcactctgtcttgtc

SEQ ID NO: 654978 - DNA, 266 bp, Homo sapiens
cgtctcaacagagatatctgtctcccatgttatataggtacccatgtcagagcagcactattcacaatagctaaacatgtggaagcaacccaggtgtccatccacagatgagtggataacaaaatgtggtatatacaaataatggaatattacacagccttaaaaagagaggaaatactgacacatgctacaccatggatgaacctggaggacattatgctacatacatttagccagtcacagaagaacgaatagtatatgattct

SEQ ID NO: 654979 - DNA, 111 bp, Homo sapiens
ttggtgatgatcattataagctatggagctgaatacgcggtgtggcacagattgcctccatggatctcgttaagtggatcatccagcagacaagcagtattaagtggatca

SEQ ID NO: 654980 - DNA, 121 bp, Homo sapiens
tggatgctggccaggccctacttttagccccttcatcatgtcatttcccttatgctggaactgcccccatgtggagtgggcaggaaggggcctggaaaaaataaaggattttggcagttta

SEQ ID NO: 654981 - DNA, 308 bp, Homo sapiens
  misc_feature (305)..(305): n is a, c, g, or t
ccccctgtcttcctacgcgagctggacgcccttcttactcacttgcttcttaaaaattcttacttctcttttacttacttacttcgtttatttattttctgagacgcagtcttgctctgtcgcccatgctggagtgcagtggcacgatctcggctcactgcacctctgcctcctggattcacaccattctcctactcaggaggctgaggcgggaggatcgcttgagccccaggggtttgcggctgcagtgagctgtgattgcaccactgcactccagcctgggcgactgtgagaccccgtcttanaga

SEQ ID NO: 654982 - DNA, 1207 bp, Homo sapiens
tccccggggtgcgtgttttcgcgtgcgcgcatgtttataacggtccccctttttgtcgcgggggtttttttctccgttttctcatgcgtgttgtgggttgtgccggtgtcgcattcgggtgttgcgtcgttttcccgggggttgttcacccgctgccggcgtggttgtgggtgtcccaccttgtgtgggtggtttcgctctcctcgcccctgtggtgttgcaccgggttgtgtttttttgtgttgcggggggtgtgtacccgctcttcgtttttttttcggcggtgtgtgtttggctgggggcacctccccagtttttttttggtgtgggttggccctctgtctgtgtgtggtgttgttctttgtgttttgtcctgtcgttgtgtctcttctgtccttgtgcgggttggggggcttcggtctttggtggcccctcttttgagttctctggtttttttttggttgtcctcctctccgtttggttgctggttggcctcccccccggttgttttgttcgtcgttccgcgtgctttgttgttgtctccccgtcgcgctgcttgttttttactcgctattgtctgttgtgtggcgctcctccgtgttgtcgcgcttcgtttgtgtgtattattttttgctccccgccccccagcgcggggggtttttttttttttgtggtgtcgctgacgtcggtgcgcgcccaccgctaattcactgcctctctcccccccgccacatcgttattatacatgtgcgtgcgcgggtgcgccccctctccccccgcaaattttgtccctccgctctcttcttttgtgttcgtcccctctcggttgtgggcgcggtcccttcctgcccgcctctccccctctcggtttctctcgtcctcctaacccctctctcgttcgttttctcctccgcgcgcgcggttgtttgtgttcccggcgggcgcccaccccaccccccttctctcttcttctttttctctctccccacatatatattttttttcccgcccccccgccgcagagagcatatatgtgtgtgtgtgtgtatatatttttgtgcgtgcgccgcccccccccctttttttctctctctcctctctctttcccccccccttttttttgcccggggggcccccccccccgctgggggggggggcgcgcgcgcgcgcgcgggggggggtcgtgttggcgcgccgcgtgcgtaga

SEQ ID NO: 654983 - DNA, 117 bp, Homo sapiens
aagtcccaatccgaaacacatagcgattactcacatcaggagtatcaatcacctgagctcaccatagtctaatagaccacaaccagcaccaaataattcaggcactgcttattacaa

SEQ ID NO: 654984 - DNA, 599 bp, Homo sapiens
  misc_feature (89)..(89): n is a, c, g, or t
  misc_feature (148)..(148): n is a, c, g, or t
  misc_feature (213)..(213): n is a, c, g, or t
  misc_feature (232)..(232): n is a, c, g, or t
  misc_feature (253)..(253): n is a, c, g, or t
  misc_feature (261)..(261): n is a, c, g, or t
  misc_feature (407)..(407): n is a, c, g, or t
  misc_feature (430)..(430): n is a, c, g, or t
  misc_feature (472)..(472): n is a, c, g, or t
ggagaagtcgccctcatcatcaggttctcctccccctttgacatcgctgtacctccacggccttttttgttattatgtccattactggngaaaaaggaggaatccaacaggtcaaaggccctttcagaagcaactccatttcattggntaacttatttccttccagagtgtcctgtttacatgttcaggcacaactgctttggttcaaaagtnacatctttagagtcgggcntttaagcaacatatcttgctncgaaacantggcagatgcctccactgagcttcagcaagtcatcctgatctccgtgggaacattttcgttgctgtcggtgctggctggagcctgtttcttcctggtcctgaaatttagaggcctgttttaatactggtttcacactccaccaagncttccctttctggtggaagagtntttaaaagacccaactcagcccatcttataggccttgggcangggcagctcccccaaggatgacgtctgggactctgtggccattttctcgtttccgggataggggccagaagatgttcttcacacgcttttgtccaaagcatgggccttgcccactggctccctggaa

SEQ ID NO: 654985 - DNA, 416 bp, Homo sapiens
  misc_feature (6)..(6): n is a, c, g, or t
  misc_feature (11)..(11): n is a, c, g, or t
  misc_feature (405)..(405): n is a, c, g, or t
ataaanggaanatgctccccaagggacctatgtgcagctcttggcccttggaatcctgtggctgggagtctgaatcctgtcctgcccatggccccctctttaaaaaaattttttttttaattaaaaacaatttaaggcccaggcacagtggctcacgactgtaatcccagcactttgggaggcccaggcaggcagatcacaaggtcaggagttcaagaccagcctggccaatatggtgaaaccccacctctacttaaaaagtacaaaaattagccgggtgtggtggtgtgcacctgtagtcccagctagttgggaggctgaggcaagagaattgcttgaacccaggaggcagaggttgcagtgagccaagatcacaccactgaactccagctggggcaaaataanttatcctactc

SEQ ID NO: 654986 - DNA, 129 bp, Homo sapiens
gagtcttatcaacctctatattcgtgaagcataagtcacaagcgttggattgttcaccactaatagggtttcgctgaggtcatttaaccctacgagcgcacgtgttaggacccgaaagatggtgaacta

SEQ ID NO: 654987 - DNA, 1718 bp, Homo sapiens
  misc_feature (1654)..(1654): n is a, c, g, or t
cgtatgcagcgccgcctttttttttttatattttggtggcatgcaaactttatttgggctatggatagggttacttacttggggttttccccccttatttattaagggagtgtttttgtggtgactcacaggcgattgagcgcattctcaggaaggaaaggtttagggaaaagattgcctcgcattttactcttagccattgtgtattcaaagtgtgagagcgcgcaggcgaagctatataagatttaaagaggtctccatataagacctcctgtgcctgtgtcttcgccacctctccctcttaaaggcagatatacacttgtgtaaccgtgtttctccctcaacgcaggagaggccttgtgaagcacttttacagccagatgtgtaaaattccccagaagtagaaaacacgggagaaaaagtcttcacaattaagagttaaatattttcgacgcaaaaaccaaaatttatcacagacagaataccaaaaccgacgaaacttttctccttgtgctttggtaaccgcccctgttgtcccccacaccccgttattaagggctcttcttttctccaccgatgattccccccgctgttgtggaggaggccccctgttggtgctaccacagaccaaggtgttgtgtgtgtgcgataaaaaatgcttgttgggaaacaagcaggcgcgacaacacctgtttattaaccgtcgggcccagatggaaaaaaggtccttgttgtaccccggggaaggaaaaatctttcctcccaatggccgtgtgttggtccgaaaccccccccttggttggtggcaataaccaacccatacgtgggggcagaaggcggcactacttgttggtggccgaagggagaaggcccccatttttacagtccggagggaggaaaaaagggccgtgtttgggcccactattgtgttggccgattcttccttttttcataaaggggtcggcccaaccaatgtagaacgagctgcccacaaacacccacatatgcctgttggtgtgctggtttgggtgccaccgaccgaggaaatgcattcatttcacccaacgactggagaacggggcgaggggggggacaaccccccctctcttgttttgtttcttttcacagcggcgacccacatgggtgggggggggcgacaagatcaatttaacgagcacatctgtttgtaataccccgagcgggtggttagtagagttataagaacaagcggctccgtttgtgagtaaataaacaacctgatcgatgggtttgtgtggctcctacatgtgagtgtgactcacctcgacggcgtaacaatacgagacgtgcgcgacgaaacatacacgcccaccgcctgttttgtggaaataacacacattccttttccccaacaggcaacatcatctcttattgtgtggacgctcctcagtttgtgtgagtcgggtgcgacaacacaccgagacaaacagcgatattttctcctcgtatggatccccccccacaaaaaggggggggtggccccccataagtaaaatcagcacatcggtcgtgacacgcacaaatcattttggcgaacggcagcagaaagaggtgctctccctggtgagggaagaggaacaaacaaacagtgtttctacccccatagttgtgaggngggaggggagcatcccaactataaaaactatcgcagatgtgggagtcgacgggggggaacaaaa

SEQ ID NO: 654988 - DNA, 109 bp, Homo sapiens
tctcatggagaccaggctgagatgagaccaggctgagcaagaacggaaacagacatttccattaagctaggtccagtgggatctggctaaattctatcaagagcctcat

SEQ ID NO: 654989 - DNA, 353 bp, Homo sapiens
gaggggagcattgccatcttggacaaacatggccattttaagttctccgtgattaaaaaccagcccaaaacatcagcctaatggctcatgtcagtatgagcagaaacatttcaaccatgagataaacccccatctgaccagaaacatgccaatcctgagaataacctcccctccagccagagatattccaactctgcaataaaactctccttcacacagaaacattcgcagcctgcggtaggctcccccttcctaaacccttaaatgcccttagtctgtaagagaatgtccctgaccgaaatcggccagaagcccctctcaggtttattcccaaaataaacctgtctctgttg

SEQ ID NO: 654990 - DNA, 1369 bp, Homo sapiens
tggtttggtttggaaatggagtttcgttttggtcgcccaggctggagtgcaagggtgcgctctcttcggcttcaccgaaaccttctgtgccttcccgggtttcaaggtgattcttccgtgccttcagccttcccgagttaaccgggactacaggcgcccaccaccagcgcccagcttaattttgggatatttcgtgattaaaaatgtggggttttcaccatgtgttgggccaggctgtggctctcaaacttccgggccctcaagtgtgattccacccaatttcggcctcccaaaggtgcgtgggattatacaggcgttgagccgccagcgcccgagccttagaattgcaagtttattttataataagtgtgataaggtgccactctcggtatactcatgagggtctcataggaacacagcgggccatttctctttaagaaaaacaaaaacaaaacacaaacaacaacaacaacaaaacaacaagaggggcggggcgcgcgcgcctacaaagagagatatcccacagagaaagagggggagcacaaaaaatataatacacggatatatcacccccgcagatattctctgtgggtcaccaaacaggcggggcgcccccaataagaggagacgccgacgaataacaaaaaacgcacagacgcgacatgggcgccccgacagagtttcaaacaccccagcgcctccgcgacagcgtgcgacacacaacgcgtctaacaaccagggagcaaccctcttgggcaaagaagagcagccccctatacaaccacgcgggggcgggggccacccaacatggggcgccacaaacacccaaacggacagaattaaaggccccacaggggaaaactataaccatttcacagctagatcaaaggggggtgtcaacccccaagggggaacaattcaccgcgcccacctgaacaaacattgtgcgccacaccgagactagcacatctcacacactatttccgcgagagacgtaatataacatcatacagaacgcgccacaaacacacccagcaaccaccccaccccagacgacacaatccgagccacgaacatcaccaactcaacgaggcagaacaccgaagacgcacgaaacacaccgccaccaccaaccaaaacacagaccacacaacacccacacagagcgagaacgacgacagaaacggacccgacgagcagaccaaacacaacaaacgaaagaacaacaaaacaagcagccagaaagcacgaaaacgcacaagcacaacacacacacaagcaaacacaacagcgcagacagacaacacaaaacaaacgaacgacgaaccaaagacacgcagcagcagaagaacaaagatagacagaaaca

SEQ ID NO: 654991 - DNA, 366 bp, Homo sapiens
tccccccccccccccaggaaccccatcccagaatccttttttcctggggagtccttaaagcccctaaccatcccacactcttcactttcctttccccctttttcattctctgtacttaccccagttttttgcccttggttacatatccttcactctttttttttcatcccatccccccctaaataggtcaggtggggggggctgggaaaaggtgggggggggggccgaagtgaaggaagaataggaaggatattcccccttctgttttttttttaagaaaaattttttggggggagcaatctccccgtccctatcactgttgggggcctaattttttttctttaaatttttttaaaagcaagtcca

SEQ ID NO: 654992 - DNA, 132 bp, Homo sapiens
ccgactagcccgacagcgttcgctctgtaggcaagctggagtgcagtgcattgaggcctcgacagcctcaacctcctagggtcaaacatagcccacttcagcctctcaagtagctggggctacgggtgccca

SEQ ID NO: 654993 - DNA, 172 bp, Homo sapiens
acctacttcaccatactaccagacaacctagccaaaccatttacccaaaataaagataggcgaatgaaattgaaaccgtgcgcaaatgaatatgaccgcaaggaaagagtaaaaattataccaagcatataatatcaaggacaatccccatatcccctgtaatggtaaaaca

SEQ ID NO: 654994 - DNA, 241 bp, Homo sapiens
atgatccctgcgatgaggtaccggaaaggtagccgttactggtcaggacagtccctcctctggagaagtggtgagcccagtgggttgcctctccagtcaggatcctgtagagaccttactctctagcaatgcacacatccacacacttgctcacattgagcaaacacgttattgtaacgtgtcaccgctgggcctcattccagggttaggggacataagggattgaataagaacaagggtc

SEQ ID NO: 654995 - DNA, 323 bp, Homo sapiens
ttgttactgctagcacatcaatctgagatcaacctgtgatgctgcagattggtggggggaggggcacccaccattgctaaggcttgagtagctcacactgtaaacaaaaaggcagggaagcatgaactgggcggagcccaccacagctcagcaaggcctactgcctctatagattccacctatgggggcagggcatagtagaacaaaagacagcagagagcttctgcagatttaaacatccctgtctgacagccctgaagagagcagtggttctctcagcaaggcatttgaagcctgagaatggacagactgcctccttaagc

SEQ ID NO: 654996 - DNA, 106 bp, Homo sapiens
gaaattcttacagcaaagactattccttcccaaatttaattggacagactgctgagcaattgatgccctggaacattgtcaaaaacaatagaactgcaattaatgg

SEQ ID NO: 654997 - DNA, 242 bp, Homo sapiens
tgtaatgtcgcgtgagtatagtatgatgggcagtgaggcggcgcatatgatctaggcctataatattcgggagtatagtagccggtaaggtaaaaacggtacctctagaactatagctagcatgcgaaatttaaagcgctgatatcgatcgcgcgcaagatctgtcatgatgatcattgcaatgggatccatatatagggcccgggttataattacctcaggctcgacgatttatggcccat

SEQ ID NO: 654998 - DNA, 564 bp, Homo sapiens
ccaattcttcagcttccagtggagaagctgagcagagctggcgctttcctcatggatgcaggctctgtactgatgcttcgggttggaacaatctgtacccagacttttctcacccaagttctaggtgtccaaaactatgcatcaatcccacagcctatcacagaccttccagaactcgctacaccagactctgccagaatcctacctttcatctcttggcttagagcagccgagcccattcttcccaatactttatgtaataagggctgagagtcccatgacagcaaacttccttcaacacatgatagacgacagcacagactctgcattaccatactatgcattcctgttgcatataccgcacacaagtcgcctcactgactgaatgacgcaatttgactcatttttcaggaatgtcacgatagtgcagaatacctggaaatgcctaataccttctctctctcttatgtctgtggactaatgtgcatcattgagatgctctcactgtgatttcaccaacctctagcaactaacagaccccaccagagaatcacaacatgccac

SEQ ID NO: 654999 - DNA, 1902 bp, Homo sapiens
gagccagccaagatcacccaggagcttgtgcccccagatgggccaaagaaagagcctatgaaggagaagcagaagcagacggctggcctggctcaccttcccacgccagtggggcaggggtctgcttcaggaaatggaagctgtccaggaaatgagcagagattcacaagacagcactttgattctatgttgagtttgtttctatattagaaaagcagcaagtcagtaatcccccgtggcatcacagctaagtagctgtggccaccggcagtttcacagcatcctgaaagctggcactgatcgtgactatcagtgaaagaagtttaattttcaggttagaaaatgtgatctggcagtttatgcattcttcagagtaatgtaataatacctatgtgatgctgtaattttacttttcaacataagttgaacccgtagcagtctgtttaccttgtaaagggattacttagaagacatttttgtacatgctcttccccaaggattgtacgtattatacaaatagatggaaagaaaagtgaacacgtttgtagaactttcataagcacacagttgctgtgttgagttctctttaaaaacaaggacaaaaccaaccagcgttcaaaggaacctcccatcagagtcccctaaagtattttaggttcagtgagcatttgcctgaataaaacctaaaagagtagtcttaacacattactaactttttctaagagaaattgattcctgttttgtcatctgatgcaatttgctcttataaagagacattttcataggttcagagtaactcacctccatgggctgaccaaaggcttttctaatttttgttactgatgagatgaaacctatttgtaaggagatcttccccaggagcatttctgttgccttcttgacatcaatgaaaagtagcatattctcttatgaaatagcatgagaaaacacagggcatttctaggacagtaaaacgttaaagtactggattaagaaaacaacaacaggctgggcgcagtggctcacacctgtaatcccagcactttgggaggctgaggcgggtggatcacctgaggtcaggagtttgtgaccagcctggccaacatagtgaaatcctgtttctactaaaaatacaaaaattagctggatgcgatagcacgtgcctgtagtcccagctactcgggaggctgaggctggagagttgctcaaacccgggaggcggagattgcagtgagccaagatcgcaccgctgcactccagcctgggtgacagagcgaccctctgtctcaaaaaataataataataataaataaaacaacaacaaaatgcatcagagagccaaaacattcagtattgcattttcacataggtgatgaaatgactttggaactttatctgtgttatagttatgagttgctttgggagacttggagctctctgtagctattgttcataacactttgctccataaccctgatgtccgcagtatctaagtatctcagccttcatccattaactctactagggagcccacagccaccatttccactaggaggtatcaatatttgtggtatgacataaggctcccttgaaataacaagacttttgagcaatctgaattaaaaatacatcaaaaaagtaatagcgctcatttgctaaatgcaaaaaataatcacctttgataccaatgtgcaccaatatgcctaactagctagccagctggagataatttaccagggaatgtttcaaagccctaaccttgaagtttggaaacaggtggtcttctatgctgcagagaaactatgcattaggtctcttttcaattagaaacctttactatttccaatgtatgtttgttaaaaataataataataaaaccaaaagcctttgtggaaaccccca

SEQ ID NO: 655000 - DNA, 1455 bp, Homo sapiens
ccatgcagcatgatctgtcctaggctcatcaggactgcgtgcttcctttctgcttccagagagaacccctcctccaaaccttggcgtgcgtcctcaggccagacccctcacctgcacatctcccagccagtaactgtaaagggaagggcccctgatggacgcaagatgacgcatcttgctcccatcagagtcccctaaagtattttaggttcagtgagcatttgcctgaataaaacctaaaagagtagtcttaacacattactaactttttctaagagaaattgattcctgttttgtcatctgatgcaatttgctcttataaagagacattttcataggttcagagtaactcacctccatgggctgaccaaaggcttttctaatttttgttactgatgagatgaaacctatttgtaaggagatcttccccaggagcatttctgttgccttcttgacatcaatgaaaagtagcatattctcttatgaaatagcatgagaaaacacagggcatttctaggacagtaaaacgttaaagtactggattaagaaaacaacaacaggctgggcgcagtggctcacacctgtaatcccagcactttgggaggctgaggcgggtggatcacctgaggtcaggagtttgtgaccagcctggccaacatagtgaaatcctgtttctactaaaaatacaaaaattagctggatgcgatagcacgtgcctgtagtcccagctactcgggaggctgaggctggagagttgctcaaacccgggaggcggagattgcagtgagccaagatcgcaccgctgcactccagcctgggtgacagagcgaccctctgtctcaaaaaataataataataataaataaaacaacaacaaaatgcatcagagagccaaaacattcagtattgcattttcacataggtgatgaaatgactttggaactttatctgtgttatagttatgagttgctttgggagacttggagctctctgtagctattgttcataacactttgctccataaccctgatgtccgcagtatctaagtatctcagccttcatccattaactctactagggagcccacagccaccatttccactaggaggtatcaatatttgtggtatgacataaggctcccttgaaataacaagacttttgagcaatctgaattaaaaatacatcaaaaaagtaatagcgctcatttgctaaatgcaaaaaataatcacctttgataccaatgtgcaccaatatgcctaactagctagccagctggagataatttaccagggaatgtttcaaagccctaaccttgaagtttggaaacaggtggtcttctatgctgcagagaaactatgcattaggtctcttttcaattagaaacctttactatttccaatgtatgtttgttaaaaataataataataaaaccaaaagcctttgtggaaaccccca

SEQ ID NO: 655001 - DNA, 1135 bp, Homo sapiens
gagccagccaagatcacccaggagcttgtgcccccagatgggccaaagaaagagcctatgaaggagaagcagaagcagacggctggcctggctcaccttcccacgccagtggggcaggggtctgcttcaggaaatggaagctgtccaggaaatgagcagagattcacaagacagcactttgattctatgttgagtttgtttctatattagaaaagcagcaagtcagtaatcccccgtggcatcacagctaagtagctgtggccaccggcagtttcacagcatcctgaaagctggcactgatcgtgactatcagtgaaagaagtttaattttcaggttagaaaatgtgatctggcagtttatgcattcttcagagtaatgtaataatacctatgtgatgctgtaattttacttttcaacataagttgaacccgtagcagtctgtttaccttgtaaagggattacttagaagacatttttgtacatgctcttccccaaggattgtacgtattatacaaatagatggaaagaaaagtgaacacgtttgtagaactttcataagcacacagttgctgtgttgagttctctttaaaaacaaggacaaaaccaaccagcgttcaaaggaacctcccatcagagtcccctaaagtattttaggttcagtgagcatttgcctgaataaaacctaaaagagtagtcttaacacattactaactttttctaagagaaattgattcctgttttgtcatctgatgcaatttgctcttataaagagacattttcataggttcagagtaactcacctccatgggctgaccaaaggcttttctaatttttgttactgatgggagtcttctcccatcagcctcctgagcagctgggactacaggcacctgccaccatgcccagctaatttattgtatttttagtagagacggggtttcaccctgttagccaggatggtctcgatctcctgacctcgtgatctgcctgccccggcctcccaaagtgctggggttacaggcgtggcccactgcacttggcctttttttttttttttttttttaaaaacaagttctccctttttcccccgggttgatttggattgggccaattctgggcctcccaagagatggt

SEQ ID NO: 655002 - DNA, 182 bp, Homo sapiens
actgttgttcatacctgcactgtgttcatactggtcgctgtatcgcgggggtaggggtatgaacaacagtgcaggtatgaacaacagtgcaggtatgaacaacagatgcaggtatgaacaacagtgctggtatgaacaacagtgcaggtatgcacaacagtgcctgtatgaccaacagtgca

SEQ ID NO: 655003 - DNA, 405 bp, Homo sapiens
  misc_feature (74)..(74): n is a, c, g, or t
  misc_feature (330)..(330): n is a, c, g, or t
tttcacctgagttcaggagttcgggaccagcctggccaacatggcctaaattccgtctctaacttttaaatacnaaattagctgggcgtggtggcgtatgcctgtactcccagctactctggaggctgaggcaggagaatcacttgaacccaggaggcggaggttgcagttagccgagattgcaccagcctgggcaacaagagtgaaactgcatctccaaaaaaaaaaaaaagaattgcccatatatttgaaagtcaagaggctgggcatggtagttgcctgtactcccagcatcatggtgggtgcctgtactcccagcactttgggagnccaaggcaggaagatcacttgagcccaggagttcaaaaccagcctgggcaacatagtgagacccaatttctacca

SEQ ID NO: 655004 - DNA, 583 bp, Homo sapiens
  misc_feature (9)..(9): n is a, c, g, or t
gaatcccgntgcggcgaggggggaggtgtaaatatctcaccgccggtccgattagccttttctctgccttgcttgcttgagcttcagcggaattcgaaatggttggcggtaaggctggaaaggactccgcaaaggccaacacataggcggattcccgctcgcttattgggggggggcatctcccagtgggccttattcatagacacctaaaatctaggacgaccagtcatggccctgtgggcgctactgacgctgtgtacagcacagccatcctggaggacctcaccgcagaggtactaggacctgcaggaaatgcatcaaaagacttaaaggtaaagcgccttacccctcgtgacttgcaacttgctattcgtcgagatgaaaaattgcactctctcatcacggctacaattgctggtggtggtgtcattccacacatccacaaatctttggttgggaaggaaggccacccagaagactgtctaaaggttgcctggattccttgttttcttaggactatataaacacactttttcctttttggattttttttaagcaaggtgcgagtttattatgcttccaa

SEQ ID NO: 655005 - DNA, 689 bp, Homo sapiens
gccgggcagtcaggtgacaatggtgcaggagacctcgtggccctccccgcgcgtgccgcccgaagccgccgctgagcactgggaagaagacgcatcctggggccccgcactcgcctggcgagtgctggtgcccttcgcgcgaactgcttcgaggcagctccgtggtcttcgctgccccagcatgcgccgcgttcctgagcaggaagaccgatccggcaccacatctacgtgctccacccaggtggaccacttcaggttcaaccgggcagcgctcatcaaccgctgggacttcctggcagagcagcaacagcacaggacatacagttgaccatgcaccgaacgtttgacccttgctatccccttctcaaccataggacgcgtggactactgcgcattatccatgaggcatgggcccattcccacgtggcactctccactggaagcgtccaacccgtctctaccacctacaacgacctactgtctggctgcgcaactccttgcattgcgtctccaaggacagcacgtaccgtgcctgtgccaactggggcatggtcccaacccgcttccgtgtggtgcctggcggccgcgaaggcaccgaccgagctttcttaccgggccgcccttaacgggagccctgcggcctccatgcatttctcccgccccctcggcgcaatcacaagctgggttac

SEQ ID NO: 655006 - DNA, 286 bp, Homo sapiens
acatgatagcttttttcatgtcagccatactcagagataagtgggaaaaactcctgtctagttctcccacatctgccatgaaagttactagggttcttataggcttttcttctgaattactatagcatatatttaggattatccctatttcatctgaaagtttttatttaaatgtactgcttgtttgcacatgtttgtttaagttttgctgaaatcttaagtatcattctaaatgtactgcttgtttgcacatgtttgtttaagttttgctgaaatcttaagtatc

SEQ ID NO: 655007 - DNA, 112 bp, Homo sapiens
tttagtcttatgatgtatcccctacacactgcacacacactgctgaacacagcacacaaacgcacagcacactgcacacacatgcacacacatgcacagacactagcacact

SEQ ID NO: 655008 - DNA, 220 bp, Homo sapiens
tttgtggtatgcccgtgcagccttcaagatgggtttgcaattcggtcacctccagccaccacaccaatcacagctctgttggctgaggagataaccttcttggagccggtagggcagcattcacacgtgggtcttcttggatctcagggctcttggctgatgcgaagtgtgtcatggtgagtgagggtctatggtgagagggcgagaagcatggaagctg

SEQ ID NO: 655009 - DNA, 116 bp, Homo sapiens
ccagtagtagggagagtgacgggagagagaggagacgtcgacatcagatcttcaatcaaagccatgactgtcaattacagtgtttagccttcagaaacactggagttaccctctga

SEQ ID NO: 655010 - DNA, 921 bp, Homo sapiens
  misc_feature (51)..(51): n is a, c, g, or t
  misc_feature (344)..(344): n is a, c, g, or t
  misc_feature (352)..(352): n is a, c, g, or t
  misc_feature (355)..(355): n is a, c, g, or t
  misc_feature (362)..(363): n is a, c, g, or t
  misc_feature (367)..(367): n is a, c, g, or t
  misc_feature (369)..(369): n is a, c, g, or t
  misc_feature (371)..(371): n is a, c, g, or t
  misc_feature (374)..(374): n is a, c, g, or t
  misc_feature (383)..(383): n is a, c, g, or t
  misc_feature (385)..(385): n is a, c, g, or t
  misc_feature (390)..(391): n is a, c, g, or t
  misc_feature (393)..(393): n is a, c, g, or t
  misc_feature (396)..(396): n is a, c, g, or t
  misc_feature (402)..(403): n is a, c, g, or t
  misc_feature (406)..(406): n is a, c, g, or t
  misc_feature (409)..(409): n is a, c, g, or t
  misc_feature (418)..(418): n is a, c, g, or t
  misc_feature (439)..(439): n is a, c, g, or t
  misc_feature (454)..(454): n is a, c, g, or t
  misc_feature (522)..(522): n is a, c, g, or t
  misc_feature (534)..(534): n is a, c, g, or t
  misc_feature (540)..(540): n is a, c, g, or t
  misc_feature (543)..(543): n is a, c, g, or t
  misc_feature (545)..(545): n is a, c, g, or t
  misc_feature (556)..(556): n is a, c, g, or t
  misc_feature (580)..(580): n is a, c, g, or t
  misc_feature (592)..(592): n is a, c, g, or t
  misc_feature (679)..(680): n is a, c, g, or t
gtgaaaagccatctttgcattgttcctcatccgcctccttgcccgcgcagncgcctccgccgcgcgcctcctccgccgccgcggactccggcagcttatcgccagagtccctgaactctcgctttctttttaatcccctgcatcggatcaccggcgtgccccaccatgtcagacgcagccgtagacaccagctccgaaatcaccaccaaggacttaaaggagaagaaggaagttgtggaagaggcagaaaatggaagagacgcccctgctaacgggaatgctaatgaggaaaatggggagcaggaggctgacaatgaggtagacgaagaagaggaagaaggtgnggaggacngangaggagnnaagnangnacngtgatggtnangcaannangcntggcannatncangatgcaggnacgctgagtcagctacgggcnaagcgggcagctgangatgatgaggatgacgatgtcgataccaagaagcagaagaccgacgaggatgactagacagcaaaaanggaaaagttaanctaaanaananaaaggccgcgngacctattcacctccattcccgtntcagaatctaancgtggtcaccttcgacgtagagaggcccgccgcccaccgtggcagtgccccccccgcagatgacacgcgctctcaaccacccaaccnnaaaccatgagcaactttcgcaaccagggggaggacacacaaagaagctccaaaatcttcccaaaggccccggacttttttctttacacagttcctctccccccggcaaacttgcttggacttcgcattccacttcctctacttctggtcacgtatctggttagggccacccctttcaatgatctcgtatgaccatcctgcttcgaggcttccctgccctcctcgacttaccttgtgtgtac

SEQ ID NO: 655011 - DNA, 210 bp, Homo sapiens
  misc_feature (25)..(25): n is a, c, g, or t
  misc_feature (30)..(30): n is a, c, g, or t
  misc_feature (53)..(53): n is a, c, g, or t
  misc_feature (58)..(58): n is a, c, g, or t
  misc_feature (74)..(74): n is a, c, g, or t
  misc_feature (87)..(87): n is a, c, g, or t
  misc_feature (93)..(93): n is a, c, g, or t
  misc_feature (95)..(95): n is a, c, g, or t
  misc_feature (101)..(101): n is a, c, g, or t
  misc_feature (106)..(106): n is a, c, g, or t
  misc_feature (121)..(121): n is a, c, g, or t
  misc_feature (125)..(125): n is a, c, g, or t
  misc_feature (135)..(135): n is a, c, g, or t
  misc_feature (140)..(140): n is a, c, g, or t
  misc_feature (149)..(149): n is a, c, g, or t
  misc_feature (157)..(157): n is a, c, g, or t
  misc_feature (168)..(168): n is a, c, g, or t
  misc_feature (179)..(179): n is a, c, g, or t
  misc_feature (181)..(181): n is a, c, g, or t
  misc_feature (184)..(184): n is a, c, g, or t
aatccatttcccagtcatctgtgtnttttntaaggccagccacttggtccctngttgnaggcctggactatggnaactaaatacagntgcttngntcttgncctgntccttccaaaatcancaancagcacttgntctcntcggctccnagggaggntgtcaatttcntatagacaatntnagnaagcctttcctgcatttcctagcatg

SEQ ID NO: 655012 - DNA, 126 bp, Homo sapiens
tggtttttttttttggggggggggggtttaaaatacttggtttttaaacccggggttttttaggggaaaaaccttggccaaaattttttcctaaatttttaaggccctttaaaaattttaattaga

SEQ ID NO: 655013 - DNA, 901 bp, Homo sapiens
  misc_feature (206)..(206): n is a, c, g, or t
  misc_feature (213)..(213): n is a, c, g, or t
  misc_feature (625)..(625): n is a, c, g, or t
  misc_feature (722)..(722): n is a, c, g, or t
  misc_feature (726)..(726): n is a, c, g, or t
  misc_feature (737)..(737): n is a, c, g, or t
  misc_feature (755)..(756): n is a, c, g, or t
  misc_feature (763)..(763): n is a, c, g, or t
  misc_feature (815)..(815): n is a, c, g, or t
  misc_feature (817)..(818): n is a, c, g, or t
  misc_feature (841)..(841): n is a, c, g, or t
  misc_feature (896)..(896): n is a, c, g, or t
acatgtttttggcattgtgctcaactgaagtagtacaaattcttaactatgttcaggaattctcacaaaggcaatgtgatcagcgtggtgttaagattcatatatctatgaagaaacgaggaccagtggtgtttgtttttacgcttttcattttaaatttatattttatttattactttaatttttgtgagatacgtagtacctanactcgtntctatggattatatcactgattttgatgaaggcatgaaatgcacaaaaataacatcagataaatggttattaattgcctcaactattctgttctttattttacgaacaatactaataacattcttttagttacttaaaaatgtacaattaaattgctttgactatagtcactcccgaccagagaaaaaccctgtagacattagtcactcctcattctgtctcaaaccctctccctgaccctcagccctaggtagcaactacctagtgcgatcaatcccatatgcatagattaccatattgtggacatttcctataagcggaattgcacaataggggagctgttatgactgacataacacgtagcacaatattttcaagattcgtccacattgtaggcttacccacagggggnaaaccattttattgggggcttttagtaacaccggtgttttctccttccttacgtccttctttccttccttccttccttccttccttccttccttccngaantccttctttcntccctccttcctcctatnnctctctnactccttctgcactctctctttctatgcctaggtgcatccacattctgcgtntnnttggggaatcctcgacaggtgcngaaatttgtgtattgtaacatttaccgttatctctcttcacggctctcatcagtngtgag

SEQ ID NO: 655014 - DNA, 179 bp, Homo sapiens
tgcgcctcaggtatggcgagatgtagcgagaaactcgactacacgcacggcgtgttcacggttgaacaacacatccgtggcaagtgggtctgtgaggactgcgagaccctgatccaggcacctgttcctgcgcaggtcatcgataaaggcacccccggaggatcctctagtcgtcgacc

SEQ ID NO: 655015 - DNA, 609 bp, Homo sapiens
  misc_feature (609)..(609): n is a, c, g, or t
ggcccatcatattttttatagaagggtttttttcacaaagaaaaatcctgccaaacaactacaaatcaagaatttgggggcaaaaagctcaatttatacaatgtaaacccattgaaaaaacaaatgcaaaataaaaaaagctgttgatccatcaccttgaaaaattaacacaactaaattaggggctttagaaaatatgttcagcttatatatcatacacgtcatttaacttgaattttacaatttttaaactaatagaattcagatttattacttgaaataagggtatccccagctgtttcttataagggcaggcatattccatatacaatacaatttatttagcatagttttattcttttaagtaaaaattgttaggggttaaaagcctaagggaataaatatgccaagcgcaaaaattaataatggaaaaaacttatggggggattaaaaaactggataatggccaatactggattaaaacaactttccttttattcaaaacccatatatttggagggaaaactggtcctatgcccggtttttttttttggaagaaaaaatgggtttaaccatttttacaaaatggggggcgcaatttctttttcn

SEQ ID NO: 655016 - DNA, 1116 bp, Homo sapiens
  misc_feature (324)..(324): n is a, c, g, or t
  misc_feature (886)..(886): n is a, c, g, or t
agcgggacgtaggacaagcgccgtgccacagcgtcggaaatcgagccgtgggagatccacggggcgcgagtgagcacgcgtggagggaggagcaggtgcttctggtggtacgcgcgagtgccggacaagccatgcatggtcttactctcaggagtctcagtggtctatcactatgttatcatgtgggagccatgtttgtactgcttcatgaggacgaccgaaagcaggagaggcacgcgaagaacgtggaaaatagacagttgtgcatcggtccaatgaaagactggctgctagacgactaagcacagaaccggaggaccgtgnaccaagatcgccgcattgagtgaccgggctagcctggtgcctacaaaggacttggctcgagacattctacctagcagccatttaaggagccaacgattcccaacctggatgcataccgtatgcatttccagcagattggaactttgatgcctcgtgacctaagaggaaccgacgggatgccactttgatggacctatttaactacataaatatgaagccgatggtacaactgtacagcgcaagctactctagaaggcccgaggataaatattctcgtatctttggcgacagggatatctcgagagaaagcatgacgagagcccaccgtgaacgaatggtctattactcacggaatgccagatgttcttagaaagactacttttgtaagcgaagagacatgagacaatgactgggtggaatgcgctgtacagatttcgtggcccaaggggaaatacagaatgtatgtacgcaacactgactggagatctagtagacatgatgtggtaattatcgtacgttttcaataccccaaaacgcgtaattctacgcttgtcacgttgangagttcttaagggacaaacgtggtccacccgtttgtacctcacgaaagactggggatttcgggcgctagttatataacccccattattgtgaccagcgagtcattttcggggacgtaccccaaaatcccgctcggacctacgcggaagtacaaacatgtggtcaggctttggtatgcgcgaaatgttagccttgtccgcgcgaatgcagactaccagcggatacctaacg

SEQ ID NO: 655017 - DNA, 83 bp, Homo sapiens
gtcgacgactggaccctttggaagagaagccttgccagctttgggcctcctgaagaatgcagattacctggagcagggacttc

SEQ ID NO: 655018 - DNA, 189 bp, Homo sapiens
  misc_feature (7)..(7): n is a, c, g, or t
ccacgcngtcggggatgaggtgctgggagggatagaggggggctgcctggaccccagctgtgggtacagagaggtcaagcccacgagtatggcccagggaggacggagggagcccgacggagaactgtcgaggtggagggaagaggcatggtggtaggcatatcggacgggatagcgggggacgcgttg

SEQ ID NO: 655019 - DNA, 469 bp, Homo sapiens
tgcccccgggttggtccacaagaaggtgggcccggcccgggttcagcttggagaagctcagggggcccccattcaccaagaaggtggcccggccctcggcttttctgtggaccaagaaggcggacaagtccccggagtcctgcaggccaacgtgcagcgggtgaaggagtaccgctccaaactcatccttttcccaaggaagccctcggcccccaagaagggagacagttttgtttaagaactgaaactggccccccagctgaccgggccggtcatgcccgtccggaacgtttataagaaggagaaagctcgagtcatccctgaggaaaagaagaatttcaaagcctttgctagtttccgtatgggccgggccaacgcccggctttttggcatacgggcaaaaaaagccaaggaagccccagaacaggatgtttaaaagaaaaaataaagccctcctgggggcttggga

SEQ ID NO: 655020 - DNA, 236 bp, Homo sapiens
aaggtctgagcgtcacttggccaaacagtttaatacgtgtaaaacgcgagtgtgagagcacatcatcaccacagagcacacctcagtgatttgtacacttacttggtagtgtaattatttactctttccaaggtataagatcccacctggcaaaatcttcactcaatgaaccaaaaacactgtaattaacaaaatataataaagttccaccattgaaaactaaatatacacgaacc

SEQ ID NO: 655021 - DNA, 400 bp, Homo sapiens
tcgagctcggtacctattggactttcttcatttaaaaggagaaaaaaaaaaacctatacagtagtctttccttatgttcatggcacaaaaggagttcggcttttagaaacttggacactcaagggttaattttacaatttaagattccaactctataaccttttttctactccaaaacaccctgttaaagtttttctttagggatggtgtaaaaaccagcatttctggcacaattcacgggaatttttttcttggtaataaaaatctcttctcggtaaaaccaaaaacaaaacaaaacaaaacaaaacaaaaccaaaagaaaagtcctctacctatcagggtttcggcagctatgcttgtatttctgttttatagcaactggggggaagaaagtccatta

SEQ ID NO: 655022 - DNA, 767 bp, Homo sapiens
  misc_feature (25)..(25): n is a, c, g, or t
  misc_feature (89)..(89): n is a, c, g, or t
  misc_feature (98)..(98): n is a, c, g, or t
  misc_feature (115)..(115): n is a, c, g, or t
  misc_feature (159)..(159): n is a, c, g, or t
  misc_feature (174)..(174): n is a, c, g, or t
  misc_feature (176)..(176): n is a, c, g, or t
  misc_feature (178)..(178): n is a, c, g, or t
  misc_feature (189)..(189): n is a, c, g, or t
  misc_feature (199)..(199): n is a, c, g, or t
  misc_feature (207)..(207): n is a, c, g, or t
  misc_feature (211)..(211): n is a, c, g, or t
  misc_feature (214)..(214): n is a, c, g, or t
  misc_feature (218)..(218): n is a, c, g, or t
  misc_feature (233)..(233): n is a, c, g, or t
  misc_feature (235)..(235): n is a, c, g, or t
  misc_feature (238)..(238): n is a, c, g, or t
  misc_feature (255)..(255): n is a, c, g, or t
  misc_feature (257)..(257): n is a, c, g, or t
  misc_feature (268)..(268): n is a, c, g, or t
  misc_feature (276)..(276): n is a, c, g, or t
  misc_feature (279)..(279): n is a, c, g, or t
  misc_feature (322)..(322): n is a, c, g, or t
  misc_feature (324)..(324): n is a, c, g, or t
  misc_feature (328)..(328): n is a, c, g, or t
  misc_feature (345)..(345): n is a, c, g, or t
  misc_feature (359)..(359): n is a, c, g, or t
  misc_feature (384)..(384): n is a, c, g, or t
  misc_feature (386)..(386): n is a, c, g, or t
  misc_feature (408)..(408): n is a, c, g, or t
  misc_feature (436)..(436): n is a, c, g, or t
  misc_feature (524)..(524): n is a, c, g, or t
  misc_feature (548)..(548): n is a, c, g, or t
  misc_feature (700)..(700): n is a, c, g, or t
  misc_feature (720)..(720): n is a, c, g, or t
ggggaggggtcacaggatgctattngggcacctagaagccgacagctgccctccactgggcggctttgcaccatgcgcaggtatgtctngaccttgtncttgtctttcctggggntgtggggcagcccgtagttcttgggcagtgcgtcttggttgtgngggtttgtgtcagantngntgtaggtctgnttgggggtgngcccagtncggnggntgcngtcttccagggtccncntcngggtttggttgctttcntntgggtcttttnggaggtgntantcttggttgtcgggggtgtcttataccaggttgttggcgaacntnttcntggggagccgcacgggntccagccaggattngttgggcagcagggagttgcggagngntctagggttggatttttgttgngtttcctccatgttggagggtgtcggtntagggtctgggaggcagaagggggtctgggagtcttgcaggattgattacttctggtcctttggtgttgtaggtttcttcaaactccnggtaggtgtcaatggccagctggngcgcgcgatgggcttggagcatagcgtggtcaaaaagcctggataacggaacggtttggacggcaccagcctcttgaagccagggcaggcagagcagggcaaaagccaggagcagggacgtccgggagcctggagccattgccactaggtgngctgtccacaggaccctgantggttcggggagttgggccttgggatcctagagccggtctcttgtgg

SEQ ID NO: 655023 - DNA, 131 bp, Homo sapiens
gtagactttataaacaccgaacacttacgtgacactaaaatttatacaaaacatgtttctcttctggttggacatggtgccttatgcctataatcccagcattatgggaggccaaagagggtagtcacaga

SEQ ID NO: 655024 - DNA, 178 bp, Homo sapiens
  misc_feature (42)..(42): n is a, c, g, or t
ggtcatctagaggatcccgctcgaattcgacggtttctcaanaactgagccgagaatagggtctgatagcccagccaagtttaaaagcagaccacacacgaatgtagtataggttggtgcctgaaaatggcccatttcctggggttggttaagaaatccccggaatccatcccagaag

SEQ ID NO: 655025 - DNA, 297 bp, Homo sapiens
agatggggtcttgctttgtcacccacgctgaaaatttttgacttaatctactgagtaaaccaatgtaactgttgtagactattttgctgtaataattagtcttgaatgctttttgtataaccaatattttaacatacctaatacaatttgtttactcttcttggggctatcgcaatacagataacttattaacaaaatatcaaaccattgctatagctgctgttaaaacaggctgggtgtggttgctcacacctataatgccaactcttaggtgggaggccaaggcaagatgatccc

SEQ ID NO: 655026 - DNA, 350 bp, Homo sapiens
  misc_feature (16)..(16): n is a, c, g, or t
  misc_feature (36)..(36): n is a, c, g, or t
  misc_feature (60)..(60): n is a, c, g, or t
  misc_feature (103)..(103): n is a, c, g, or t
  misc_feature (105)..(105): n is a, c, g, or t
  misc_feature (111)..(111): n is a, c, g, or t
  misc_feature (113)..(113): n is a, c, g, or t
  misc_feature (154)..(154): n is a, c, g, or t
  misc_feature (177)..(177): n is a, c, g, or t
  misc_feature (239)..(240): n is a, c, g, or t
  misc_feature (252)..(253): n is a, c, g, or t
  misc_feature (263)..(263): n is a, c, g, or t
  misc_feature (276)..(276): n is a, c, g, or t
  misc_feature (311)..(311): n is a, c, g, or t
  misc_feature (345)..(345): n is a, c, g, or t
ttctctgggaaaactngagatgagaatctggccagngctctgctgtacagtcaccgtctnttgaattttagttttggcaccaggagtaccgttagctttcccntncttctngnccatttgactcatcagcacaatagggtcaccaccttaactnttaatttctaatctgatttactntctttagggtgtgtatgtaataaacattgacaggctttctggagccctcaaggtgcctactnngctggttccctnntccagcagcncccccacctcccntagcccccctcctctagcagcctctcctgcctctnctgagctccctccacgtgttccacccccttaccntgctg

SEQ ID NO: 655027 - DNA, 378 bp, Homo sapiens
gcttaccttggaaggatgagatgggaggatgtcttgaggcgaggtttgagaccgaccagccagggaacacagtgagaccccttctcaaaaaataaaataaaaaattagccagatgtggtggtgcacccttgtgttcccatctaatcagcacgcttaggtgggaggatggcttgacgccaggaagccaaggctgcagttgtgccactgtgctccacgcttggcaacagagcaagaccctgtctgaaaaataaaaaagacagacacagaaacacaaaaacaggcaatctctgccatcaggggagttatattccaatgagatcttgatggaaaatttggccctacctttaaggcaactttaccttcccagcttgctcagaa

SEQ ID NO: 655028 - DNA, 428 bp, Homo sapiens
attatgccagtggacagacagatgacctatttaagtagtgcgagtatatgacacactgcaggcattataatgtatcttgtttcaaatgccataaatcaataatagcagaaggccgaacacattttttgctctctgttcagcatattctctagaagatgaggtaaagcatggtcacaagtgcgaggcttatctgtgctacatgaacagaacagaagggaaagagctattataaaacgcaatatagttgggagtgcggaaagcatattataacagacattttagaaagatttacaaatgaaggttcgtgttaactaagttgcatacaatgatcataaggcatttctgcagtagctgttttcaatggacacgcctccccagtcctttagacacgtgctcaggggaatacaaaaccccaaggcataaggtgc

SEQ ID NO: 655029 - DNA, 115 bp, Homo sapiens
ctgcgcttcctgagcaggagctgagcaggaccaggccctgggtgctctcctctgccacagctctgacctgggcaggttggaaggtggcatcgtaatgtatgggggagcgatgaat

SEQ ID NO: 655030 - DNA, 126 bp, Homo sapiens
gaccgagtgggtcgctatggcgggtgaacccaccacactgcgcatgaagaagctgaactggcagaagctgccatccaacgtggcacgtgagcacaactctatgtgggcgtcctgagcagggaccca

SEQ ID NO: 655031 - DNA, 874 bp, Homo sapiens
ctcgggaggcggaggttgcagttagctgaggtcgcgccattgcactccagcatgggcagcaagagtgaaactccgtctcaaaaaaaaaaaaaattttttttttttataaaatggttactcatatcatatggtacgtatatttaactctggctggtctttaaaataagatgacacacttttatgaagttttataaaatcttacatttttaggggtcggtgtccccagggctgcctcactttttccctaaaaaactaggacccacggttaacctcccagcagatgcaaggatcatgcttctcgggagtccttagtcacttccattcttggcaagtttagtactggcccaaatttactcattctacagtgttactgcccttgtgaacgtttgtgacccatgtcacccaagagaagcaaacttttggttgccctagagacaacttcgggtgctgctctcagtaaggtctatgagtccgggggtctacgtatctgtaaattatcctctccatcaggtctcactgatcattagtgtgtctgggttttcttaccctaagatgtgttccgacaatcaaagaacgttcactattttttaattggaacatcgtttcgggaggcaaggtttttattttcttttgtggaccacgtttcccctgcctccaaggggaggccgggggggactcaagccgtgggttcacctcccggtcagtggtttctgccgcgcccgaggggggttgggggcgcgcccgcccggaattgtttaaaagagggcccacggggcggggtaaagagcatggacatactcggcccatgggtggtgccgcccttttttgttgtctgcaccctgcatgggggctactatggggcaacgcgagtgcg

SEQ ID NO: 655032 - DNA, 87 bp, Homo sapiens
cttaatagggacatggagaggagttagaacaaaactctgtctaataaataaaaataaaaaaaaaacgttagaagcttgaattcgagc

SEQ ID NO: 655033 - DNA, 560 bp, Homo sapiens
  misc_feature (2)..(2): n is a, c, g, or t
  misc_feature (313)..(313): n is a, c, g, or t
  misc_feature (315)..(315): n is a, c, g, or t
  misc_feature (321)..(321): n is a, c, g, or t
  misc_feature (336)..(337): n is a, c, g, or t
  misc_feature (352)..(352): n is a, c, g, or t
  misc_feature (354)..(354): n is a, c, g, or t
  misc_feature (364)..(365): n is a, c, g, or t
  misc_feature (368)..(368): n is a, c, g, or t
  misc_feature (372)..(372): n is a, c, g, or t
  misc_feature (379)..(379): n is a, c, g, or t
  misc_feature (385)..(385): n is a, c, g, or t
  misc_feature (387)..(387): n is a, c, g, or t
  misc_feature (390)..(390): n is a, c, g, or t
  misc_feature (392)..(392): n is a, c, g, or t
  misc_feature (395)..(395): n is a, c, g, or t
  misc_feature (399)..(399): n is a, c, g, or t
  misc_feature (402)..(403): n is a, c, g, or t
  misc_feature (405)..(405): n is a, c, g, or t
  misc_feature (408)..(410): n is a, c, g, or t
  misc_feature (413)..(413): n is a, c, g, or t
  misc_feature (415)..(415): n is a, c, g, or t
  misc_feature (417)..(417): n is a, c, g, or t
  misc_feature (420)..(420): n is a, c, g, or t
  misc_feature (426)..(426): n is a, c, g, or t
  misc_feature (429)..(429): n is a, c, g, or t
  misc_feature (435)..(436): n is a, c, g, or t
  misc_feature (439)..(440): n is a, c, g, or t
  misc_feature (442)..(444): n is a, c, g, or t
  misc_feature (449)..(449): n is a, c, g, or t
  misc_feature (451)..(452): n is a, c, g, or t
  misc_feature (460)..(462): n is a, c, g, or t
  misc_feature (553)..(553): n is a, c, g, or t
tnaaaaacatacaaagcggagcacggcaataaattaggtggtggccgcaggacggggcagggcggcggcggccagacacgggcccacatgtgatctgttttcaataatttatatcatgataaaaagcagcacaaaaaataaataatgaaatggaactgccaagtagcacagaagccagggtgaggcggtgtggcggcgtggcggcatagggggccggggtccccacgccctggaaacgcaaagaccttggatctcttttgggaagccggaggacggagacagaaaacaaacccacgtgacaaagagtccctcntntttttnttaaataaaaaaatnnatatattaaatcatnanaattaaattnnaanaatnttaaaanaaaatnanaananacntttnttnngnggnnnagntntnggnggttanatnttgctnnttnnannnttttnannatttattnnnttctccatcaaatcacttcattccaatttcatttataatcccacttcccacaatacttttacaccaataaccccaatactttacataaccntgccacc

SEQ ID NO: 655034 - DNA, 358 bp, Homo sapiens
ccccccttttttttaaatgggtttggggggaaaacccccccgccccaaccggggttcccccaggggggggtcccggcccccccccccgggggggtggggggggggtttttcctttttgggcccccgggggggggcccccccgccccccccaaagggggggggggggggggggggggggggttttttttaaaaccttgggggtttttttccccccaaggggggtttttgcccccccccaaaaatttagggggggaaaggggcttttcttgggggggggggttttttttgggaaaaaaggggtcccctttttttttttttggtggggggtttttttaaaaaaaaaaccccctttttttta

SEQ ID NO: 655035 - DNA, 283 bp, Homo sapiens
cccctggcagagcttagacaagtgttccatcacctagtgatcagtgcagggataagtcgtaaagtctcctgtaggctgagtgtagacaagagtttcctcccagggatgatcagtgcagagatatgtcacaaagcccctgaaagcagaaccttgacaagggttacatcacctgtttgatcagtagaaatgaatatcccaaagccccttgtagacaaagaacggacaaatgttacatcacctgggtgagcagtggagagatctgtcacaatgcccctgtatgcag

SEQ ID NO: 655036 - DNA, 409 bp, Homo sapiens
gacgtgaaggactttatgacttcagtgtctcgccgtttggatgcttgtattcgccggttctgttggccccgtcctgcctcagcggtttaaattattcagaaagacaacagaacgttctttttctacctttttcacaagtattgcgactgcttctatatgtaatttctcttttgtgaatatgtaaatgaaaacaggaggggaggcgttattgtacagtggtgcattttgggccttcggcggatatcaaagcttgttgtaatggatttgccatgcacagcgcattctttgaaatgtctttttttgtaaggaaacctcccaacgctctctcttgcatatacggaggggcggcgggaactctgaaaaggtactactccattaatacaatgatgccccttctcaagaatgaata

SEQ ID NO: 655037 - DNA, 266 bp, Homo sapiens
actagtataacaattgttgtactgaactcttgttcgatactgctgatcataaacatcctgtgtgtaatatttttttccaaaaaacgtagcacccttcagcaggaccctataaaactttcctccagcccttgcctctttgcaggtagccccttctctgctgagcagcccactgcaacatattttcacaatttctctaataaatctgcccttctttacctacaactatcttggtaaatggctttaccacctgcaaaactgaccctagg

SEQ ID NO: 655038 - DNA, 212 bp, Homo sapiens
caggtcaggtcctcggcacgcgtgtggtaatggggcacagttaggcctcctgccctcacctcacctgctccctgcagggctgcgacagctgtacacctgcccaattcgaccatgcaggccaggccagacgaatggggagtacggcccgtcctccatgggccagatgtcggccttccagctgagtgcagacaccagcagtggttccttgtcgc

SEQ ID NO: 655039 - DNA, 355 bp, Homo sapiens
cggtcagctagaggttgaagtcgtggcagtgtgtgacagtgtgagcatctgttacgccagatcacagtgaacacactggggagacgtgcttttttggaaaactcaaaggtgctagctccctgattcaaagaaatatttctcatgtttgtttattctacgtttactacttttcatttacaactcctttacggttacagtttaagcttttacaaagttacgtttggacgaacttgagaccacaaaactaatactgtaaggacattggtgacggcctttgaccttaaaaacctttcttggtacctgtgacattcctttgggggtgtatttgggctattgtaactttctaaaactacgg

SEQ ID NO: 655040 - DNA, 884 bp, Homo sapiens
gcgctggagttcgcaaaacgtgacccggaaatggtcacgagcaggcgccgtgggctttgtggacgcctaacttgcgcgctgagatttccgggcgtgggagcagaggtctgagtcttgcgtgggtcctctatagggtgagaagctgtggcgcgtcggttccgtgtcctcggtggaaagtcgctggcgcagatggggcccactggtggcctgggcggtggcggtctgctcttgggacccgacttgggtgcctaggctgcctggtagtcctggcggtcgcctgggcttggcgcggggcttcctcgggctggtcttgtggagcccccggccccgggctcttgttggtgtgctgctccaactctttaactgtgggcttgcggggcgcccttcggtagcggccggggcaccgggcgtgatgttacggaggctaagggcgctctggagaccctgacgattgggcgttcggggcccggggctcgccatggacccctggggccgcgtggtctcgcttgataagttgacaggctggggggacgtgacttggcgcctggcactctccagggagtttgccccacatcttgagcccatgtgaccgatgcccctgaggtcctcccgacttgggcgcgtttcagaagcggttcgggttttccatagaagagaggtggtccccggggaaggcccttcaagcgggttcagggagcttttgccctgggggtggttcgggcatggacattgcgcacgcgcaggagcggctcttgggcttgcgggggtgacacgcggttcgtgatccattttggccccaggggattcatgagcacgcgttggaggacggggcatcggggagcagcgggacaaacgtgtttgacccttgtggggcctttggggag

SEQ ID NO: 655041 - DNA, 177 bp, Homo sapiens
cgcaggacttctgtgggcagctcgtgctttcttggtgtcacggaatcgttctaggttcccttcttgagctgatttcttcaggaacagatggatagatggttgcactgaagtgccttgcgcatcccagaaccgaggccacctgcctgtcctcattgcgctataagcggtatagcctaa

SEQ ID NO: 655042 - DNA, 1212 bp, Homo sapiens
  misc_feature (845)..(845): n is a, c, g, or t
cgggggagaggatcgcttgaccccaggaggttgaggctgcgttgagctgtgatcatgccattgcactgcagccttggtggcggagcgagaccctgtctcaaaataaataaataagtttaaatgataaggtaatcctgaatgttgtttatttgtagcctaagtaaattatgtttcaaactggggcaaggtgataaagtttaacttgaagagcagagtcctgagaccctgggagattcagcttcaccgtcactctggatgtatggaacccactgttttttgtttttccaaagataatttcttggaccttttctcagaggtcttctacctaactcttcaattatttctgttgctagatcagactttcaccaaatgctcatgctgcttgagttgtctgggctatatgcctgactccatgctgagatacacagaaacctcaggccaaaagctgggtctccccgtcccccacatggttctgtgcacctgtgcattactcattccgcatgccattctctaagaacagaaatgcttgttctcttcaatgtcattgtgtccttggcatcctgcacaaggtctggcagttacgttgggttcaacaaaagtttgttgaactgaacaaagcaacaaccaagggttctaaaaactggagttgaaggttatattacaagcctgtctcctggtacctgatgtctttgacagtcttaaagcttgcatttctgtagccctgaatttaaatcaagttctttttgaaaccatgttaggtcatcatgcctgctgtgaatggattcaccaactttctgtaccattcattgctagtcactgaattttgatattcttcccccacccantctaaggataattgttattgtccagctccagagttccttgcctctaatgaaacaattgctgctgctttatgcagtagtttgtgtttatgtatgtgttataaaatcttctgtgtgactttcaattccttacatcatcttgcacaatgaatgttgattgaatttaataaaacataagctaacaaaagaatagcattatgtatttacacaataagtgtatagggttttttttttaaaccatttaagcctaaaaacaattgataaagtagctaatgtgggtagatacctcaattcaatgaaattgaggaaaatggggatttaagaagcttcttatgtgagaattaaccccggtctttctattcctgatgcc

SEQ ID NO: 655043 - DNA, 364 bp, Homo sapiens
gggggggggtttttttttaaaattttgggggggggcccccccctttccttttttcccctcccccctgggagggggggaaggaaaaaaaacccccccccaaaggggggtttaaaaattttttgggggggggggggtttccaaaaaaaaacccccccgagagggggtttttccccccccaaaattttttgggcccttttccaaaaaaggggggtcccaaaagggggggcccccccggtttttaaaaaagggggcccccccccctttttccccctggggggggcccttgttttttcccccccgggggaaaaaccccggggggggggggggggggggcccttaaaaaaattttttttgggtttcccca

SEQ ID NO: 655044 - DNA, 192 bp, Homo sapiens
attctccggaatccgtctctgtgtccgtcattgctgcatcatggggcaatgggcatgccgctctcagtcacgggcccgattccctcgtacttgagccagcacgaattcccttagcaccagcacgaattcagcaccagcacgaattcccttagcaccagcacgaattcccttagcaccagcacgaataccctt

SEQ ID NO: 655045 - DNA, 135 bp, Homo sapiens
caatggggaaggagatgcctgttacaacgacgtggattgggatggcattcccaatggattgtgacacattgtccctaaagtctcccacacccacatacagacagacagaggatgtaggcacgcggttgtgggaga

SEQ ID NO: 655046 - DNA, 272 bp, Homo sapiens
ctctgtatatccagatccttgtccagctcattgtccggttcgtgatgtctctgtctgtcattatccctatcattctctcgctcctgttcgtgttctttttcaagttctttctcacgctccggttctttatctcgctccctttccctaatatcctctggagatggttgattatgcaggacgccaagcttcacaccctattgtttcagatgctccgcacaagaagccttcctttgttgttacatttttagctcttccccttctgtcgtcttctc

SEQ ID NO: 655047 - DNA, 1266 bp, Homo sapiens
taggtgcgtttacaacgcagtctcgtgcgttgcctgcctccattctctgttgtgtgtaagaacacgcacttggtgttgggaagaacaaccacgcgagtagtttgatgaggctggtgtgaatgatgcatcccatcagcacgctgcttttgtcttgcgtgggcgggggcgggtgtatgtaatgtatttgttgtttgcactttcgtggtgtgcgttaatgaatctagtggatgtatatgatagtgatcgatatattggtggtcttgttggtggttagaggcatagatgtggaggtaagatgatgtactgtatggagttgtgtggagaaattataaagtaggtgtgttgtaacaacaacgtcgtgatccagcatcacatgtttattatgttcatccaccagctgtctgtagtgtttatagtatatcatatctcgtggtcgcctccacctccagcagatagtagtggtgcttctcctcctgctttagacgatcacccccccctctgcttcggaggagatgatcatcggctgctgttcccccctctgctgcgtaggagtagccccccagacggcgggtgcactgcgcgtagtgaaagaaaaggagatgtgtgtgctgttgtgtgtgtgtgtgtgttgtgtgtgagaaaagtataggtgtgtcacacactgctgtgtgtggtggtgccacacagcggtgtgtgtgaggtggcccacacgttggcgcacaaacactagtctgtgctctggcggtcactcgcagcaacactacctctctgtgtcactctccgcgggagtgtctacacagttgagattttgtctcctgggttgtctactaccctgctccacacaggtatggcgctgtggagacctactacacagcgcggccacatgtccacaccacacacaccgctggcgctataatgtgtgtgtggatatatgttgtataggtgtgaaaacacacacggaagtctcccacacagttgtgcacccgcatgtggtttctgaatttctcctgacacctctacaagtgagatccacacctgccgtctatacacctctaccacccggtaagtctcaccgccgtttcagaggagagctatataaagccggaagaatataccttgtagacccccgaagtttgaaaccccccctgtggccaaaattagcgagacccccgttttctccacaaaaaagggaaaataataaaccaaagacccaaaatatatataaaaatatatacgtcgagcattaatctcggtcgagaagagtat

SEQ ID NO: 655048 - DNA, 385 bp, Homo sapiens
tagcaggcgcaccgggtgaccattaatgcattccaagtggcctgagtatacccttgtgaactaactcattcgcaaatgaggcaaggacctctctttccttccgagcagtttcaccaaaccactggctcaaagagcctgactcagaggcctagcgaccggaattccactctgctaaacgtgcatttcccatctgccccaccctaaacatatcttaccaatgtcagtgtctttttttctgacctgacacaaaagcatgcatcatgacagcacacaaagggcccttgacacacttttcattgtgagctcacgccagttctccatcacaaagtgagctgaggaaccatctaccattaggagatcccataggaatgtcagcaaaaataga

SEQ ID NO: 655049 - DNA, 409 bp, Homo sapiens
  misc_feature (284)..(284): n is a, c, g, or t
  misc_feature (326)..(326): n is a, c, g, or t
  misc_feature (333)..(333): n is a, c, g, or t
  misc_feature (343)..(343): n is a, c, g, or t
  misc_feature (355)..(355): n is a, c, g, or t
  misc_feature (362)..(362): n is a, c, g, or t
  misc_feature (382)..(382): n is a, c, g, or t
aaggtgactcatgcctgtaatcccagcactttgggaggccaggagtttgagaccaacctgggcaacatgatgagactccatctctacagaaaatttaaaaattagccaggcatggtggcgcacctgtagtccccagccactcaggaggctgaggtgagaggatcgcttgagcctaggaggttgaggttgcagtgagccatgattgtgccactgctctccagcctggggcattcagagaaggcaagtaagagaagagctgaaaggggccccttgggatttcgatncatctccttgccagctcttgcttttgtgggaacttgtgggtnggaggtnggaaaacagntttacaacaggntgggggngaagccagggttagggaagncaggttttaaaaagcccagttacgggt

SEQ ID NO: 655050 - DNA, 339 bp, Homo sapiens
aagtgagaaaagagcctgtgatagagcagagcttagtcacgtgagacatgtatgcatcttcaaaggtctaattgctcaggcgtgaaacaatcctatatacttagccagctccatggcgtactgagatacatggtgccgcacaggggtaatatggtcatcttttatcagaacaacagtgccaaacggggatttaacaaatgaatattccatctgactttatttcccaatacactttcttttttaaaaaaaccatacactttctttgaggatgaccgcattaggaaatccaattatacacaaaatactacatctagtctggggtagatatatacatttttg

SEQ ID NO: 655051 - DNA, 1016 bp, Homo sapiens
gcatgattatcgtggtagaaggttagagggaaattctcaaacactgctggtagcggtataaattgctgtagacttttctagagtgacaacacgtatgtacttcaaggaacacacctttaaggatttcctactggacaggtccgttaaagataagaataagtcattacagtataatctatcgtaagtgaaaaactgactaggcaacctaaattatatgccaccatggggactgcttatggtaacattccatatacgtggaatcgctaggtaggaacgcgagatcggagaccaggacaacgtccattgttctacttggacctagataaccaggtgacgtttcaaacaaagtccaggcattaaatgctatggtcagggtatggagaaaacctttatgtcgtgcactgtggcgtggttgtcatcacaacctgtaatcccaggactttgggagggccgaggtgggcaagattgtgaggtcaggagttcaagaccagctctggcaaacatagtgaaaccccgtactctactacaagataaaacgaacaacacattcagatggggcattggtcgacagggggccgtagaccccagcaaacttgcgcaggcacaagggtcgcagatgcggccgagatcggagcccctgacatccagccgggtagacaacaggcgagaccacgtccaacagaagcacgagacaacacagacaaaaaaaagtgtggcgccgcggcccagaagccaaccaaacaacggtggggcggcgccaagagaaatcgacacggcacaagcgaccaagagaccggcgcacgcagggtgcattccacaaaaagccggggaccggtgcaagctagggtctggtctgctacagccacaacaccacccgacgcgaaagaaaagcaaagcacagagcgaagtaccatactctcacctgtcgaagaacaaacaagagagcgcacaacacaaccagagcgacgaaggaccagacaacagacagatccgaaaacacaaagctagagccaaag

SEQ ID NO: 655052 - DNA, 266 bp, Homo sapiens
gcataacagacgtggcagaaatgctgtgatctcttcatcctctggacgaactacgcctcaggcgctgtgaccctgggattgtggggctcttgtggtctcgtgtcctccatcctgtctattctcaccctaatctatccctggactacgattcaaggccctgactcttccgtgtacaggataagggacggggacctgtaattggtgacgatggaatctctagatcgtcccccatgtgccagcgctcattcgaagttctaactctttgg

SEQ ID NO: 655053 - DNA, 946 bp, Homo sapiens
cgaggacgtcacgtccgtacttgaacttgcagctcagggggctttgccatttttttcatctctctctctctctctccctctatctctcttctctctctctctctccctctttttttttattttttttttttttgtttttttgttaaaaaagcgagtggggtccccccaaattgtttccccggggccttttgtgtttttttcattttttggggttgttcaaggctgaaaatttttctgggggtccctttttttaccgggtttctccgttgataaaccggagcaccgtagctgcagaccgagcgacgccggcctgcagccgccagcacgccaggcccagtacccaaacatttgttctcggccgaaagaaagtgaataacccaatacattaaagaaaagggaaaatctcgcccgaaaccttttaaaacccatttcttacatattgatgaacaagagctacggccctgtgtgaagatcccaaaagggggattctataacctcctacacctgtgatgggacgacgacaaaataaatttcacatggggggaaaacttctatttatatcagtcaaaccccaacgcgggaaaaccacggagaggggaaccccccggctaacaaaaagggcgaggggataaaccccaccttcaccctgtagcaacaatggaaaggtaaaagaaccaactcaaccacgagtgagggagatgtggacaacccagggaccgcaccaaagagacagacaagattgtgaacacacacagtccatgcaaagagaaatgtgcgcccgaaacaggaggaccaccgattggcgaaaaacagatgagcgagggaggaggggcacaccccccaccctagtacgaacagtgaggatataacccccaccgcgaggacaataagtcacaaaatcgccccggagagacattgggaacaatgaacccaccagagcagtcca

SEQ ID NO: 655054 - DNA, 424 bp, Homo sapiens
gtcgaccaaggcgctgcgcgcgaggcaagcggctcaacgagaacaatataagcctgcggatcattggcgaccgctcgcgctttcaccccgagctgcaacggcgatgcgcgaggcggaacggcgacggcggcagcaatcgcttcattctgcagattgccgccaactacggcgggcagtgggatatcgcccaggcggctcagcgtctggctcgtgaagtccaggccgggcatctgcggccggacgatattacccccgagctgctgcagacctgtctggccaccggcgacctgccgttgccggatctgtgcatccgtaccggtggcgaacatcgcatcagcaatttcctgttgtggcagttggcctatgccgagctgtatttctccgacctgttctggccggacttcaaacacgaagccatgcgcaa

SEQ ID NO: 655055 - DNA, 512 bp, Homo sapiens
cttacgcccaaactctttctgctgcctgggacgggccgtcggtggatcagtgagtgagtctggaacacacacaatataataaccaagagaagtgggcttaagagggccataaaaacccatttaaatgagaacttcaaatgtagctttccctggtatccaggaaaataaagcacacaaggccaaataaagtaatgcgaactgatggtcagaataagctttgtagcccatgggaagtgagggtagaggtccatgtgtctcaccttgcaggtgagtgatcgcgtgcaggaccttttgctctccgggtcctggactccacagtgcttgttcgggtcaaacaccctccctgtaaacaccagacggagagaaaaaaaaaaaaccaggtcatcacggctgatatcagaattatgtctaccggagtaccacgaagacatcttttgccaatactttgtgactgacaggcgagaagttgtctacaaagtggtgtaataggcactacagtagactgttgtcgc

SEQ ID NO: 655056 - DNA, 172 bp, Homo sapiens
ccagaggtctccacaacgctgtcacagctgggcagcacagtgaagggattaagattttagcacaatacttcttactcccctccccaagtcccagtgcatggcacacaagagcagaaggaaatcctatgtaccctacaagtctcccatgcgacttgacaacacagaaagccaa

SEQ ID NO: 655057 - DNA, 866 bp, Homo sapiens
  misc_feature (99)..(99): n is a, c, g, or t
  misc_feature (101)..(101): n is a, c, g, or t
  misc_feature (107)..(107): n is a, c, g, or t
  misc_feature (109)..(109): n is a, c, g, or t
  misc_feature (111)..(112): n is a, c, g, or t
  misc_feature (115)..(115): n is a, c, g, or t
  misc_feature (119)..(120): n is a, c, g, or t
  misc_feature (131)..(131): n is a, c, g, or t
accatgcgtcgagacggtctctccgcggccaggagagagagaccagaagtgaacggctcgagagatggatcatgacccatgaagagcagcatgcacaanancttatntngnnacnattnntgtcttacctntggtggagatgcccaaggtatgaatgctgctgtcagggctgtggttcgagttggtatcttcaccggtgcccgatgtcttctttgtccatgagggttatcaaggcctggtggatggttggagatcacatcaaggaagccaccatgggagagcgtccgatgatgcttcagctgggaggcacggtgattggaagtgcccggtgcaaaggacttcgggaacgagaagtgacgactccgagctgcctacaaccttggtgaagcgtgggatcaccaactctctgttgtccatttgggggtgatggcagcctcactggtggctgatcaccttccgttactgagattggagtgacttagaagagggtgacctccatgaaagcaggtaggatcacagatgcggacggctacgaagtccagataccttgaaacattgtggggcctgcttggaatccacttgacaactgacttctgtggcccctgatagtgaccaattgtgagaaacttagcctccttgcccctgaattcaggattcaatgcaaaccttgctagattgccaataactatccacgtgccgcagaagccatcccagaggcaatatgtgtacaatctaactgggcgcgcccgtggctggataccttggccctgatacatctacatgtcctttgaggccactgcgattcagtcctgaatgtccccgatgacaatggaggaaccacatgttccgaatacacagaataggac

SEQ ID NO: 655058 - DNA, 881 bp, Homo sapiens
tgcagtggctcacgcctgtaatcccagcacttgggaggcaaaggcgggaggatcacgaggtcaggagatggagacaatcctggctaacacagtgaaaccccatctctactaaaaatacaaaaaaattagccggacatggtggcgggcacctgtagtcccagctactcaggaggttgagacaggagaatgggtgaacctgggaggtggaacttgcagtgagcagagatcgtgccactggcactccagcctgggcaaaaacagaaagactccatctcaaaaaaaaaaaaaaaaaaaaaaaaaactcaatctttaaaaaatataataagtcttagtcatatgggtagatattattgaatgtatcatttaaaaaggacatttgccaggcatggtttatgcttgtaactcacagtctttgaaaggccagaatgggaggatcacttgaggccaggagttccagacagtctagccaaatggaaaacatgtttctactaaaaatgcaaaaattaatcaggcatggggcgcaaagatacttgggtagcataaacggtgaacctgaagaagcagaggatgcactgaggcaagatcggacattgactcagctggaaagtgagactctgttcaaatcggaagtcataaataaaaattaaagccactttgtaattttgcaccattagattttataatggaagcgatataattaatggtcatggatcatatattatgtttaacaatttgggggatggtgcataccgttacacttgagacgtgggaactcaggcaggaaagaaggggacggtataaaaaaagagggagacgatcaatcgaggaaaatgatgagcggggaataattattggtttgcctcaacgtatgttctcagcgt

SEQ ID NO: 655059 - DNA, 906 bp, Homo sapiens
agcaggcgcgcgggtggcgtcacgccctggtaatcctcagttctcagtggaggtataagtagtgcgggtaggatagtcttgagtccactagagatgatttggatgagcatgccttgggcaaattatagacagaggaccgccggtgtcatccagaagacagataaatagaacaaaaatcacaagaatggaagatacttgatgggtcactcgcacgcttggagtcctattcgaaacaaggagatgtcctaagagcgagctcggatgagtgcgagagagttgacggcccacagacgcgtgaggggagacaaggtggggtccaaaagagcgcggttcccccgagagagagagaacactcgggggccacaagagaacaagaggcggcggggggacattctctccacacaaattataaaaagagcgccgcgggggggggaaacaccgcggaagagaggtcttctggaaaaaaaatccccaaagagggagagtcatgacgaggagggggcaccaatcaagggggggacctaatatataaacaggagggagaccaaaagggaggagcccgcaagtatatccaaaaattatcagcgcgcccccgagccttgggggcgcacacaaaagcacacactgacacaccacagacaccagagagggacggagagaaaccaataaacgagaaaagagtagaagagaaaaccgggaacacacagtgaaaactataccagagaggagacgccgatgccacgttaaaaaacataagagaacaaagagacaacgacagcgacgaccacgcaggccaggcaagccgcacgagcacgagaaacacaacagcacaccagaacaaaacgataagacaaaagcaagagatgacaggaaagaacacaccgcgacgacccagtaagacacctg

SEQ ID NO: 655060 - DNA, 503 bp, Homo sapiens
catatatataactgtacaataaaatatataaaatgtaccatattacatactaacaatcatcatcttcttcctcttcatcgctgatcacatacttcttatgctttaaatttgcttatatcatcatcttctgctttactcttaccggaaggttcaccttcctcatcactggaaagtaacttagcttagagtaatctttgagcttaatcttcttctgatccctcatcactgtctgatgaatagattctggctcgtacctctcgaatgcccccttaatatcggttataaatggcagccaagctagatggaactcctcgccttcctcctcctcatcgtatcgaacaggtaccaggtaactggcgctcagccccccgctgttgctgtacctctctcatacgggcgctgcagagataccctacgtatggaagccctcaaacgttcttcttctttctatatcatttctgtgcgttggcatacaggatcacgaccagccatgtgcaggattc

SEQ ID NO: 655061 - DNA, 522 bp, Homo sapiens
cgggtcgggttcaaggggtgccggaacttgtccaatttttaaccacacaaaaaaaaatgtttccgataaaataaattaaagcgtactttcccagggggaaccaaatcctaaggaaaagttgcgagagtatacatataaaagaaggttctcgcatcgttaagctctaaaatgaaatatgcacaagagtatcttaaactgcacatcagcgaggctacactgagcaagttttccgagaatatgaagatgtaggcatgcaggcctgatggtttgcacctgtttttccagcacttggggaggacaaaaccacctgcaccaccacaggcagggagtttgagaccacgcgggcccacataacccagcccaggttgctcagaaagatagaccatgtccccaggcaggttgaaaggtacttttactcccacaggcgagtaaggcccactcaaggtaatgacctcaacgtttgtttggacaaagaaacttgggccatggggcctcaattaattaggcctcggaaaaaaaaaa

SEQ ID NO: 655062 - DNA, 109 bp, Homo sapiens
  misc_feature (61)..(61): n is a, c, g, or t
gccaattatgaatactgtcctcgctgctgcaagtattgtttatcgccagttctggccgccngtttattgcctgattttgtgagggccatggcctcgcccattattggtc

SEQ ID NO: 655063 - DNA, 103 bp, Homo sapiens
ctagaggatcccgtgaagaatttcagaaactggagtaggttctttgccagtgcaggtggcatgaactgcatggaggcataacagtcagaggcaggacaagcag

SEQ ID NO: 655064 - DNA, 832 bp, Homo sapiens
agaagaatgaaactagactcctatctctcattacatacaaaaaccaaatcaaaatggattaaagacttaaatataagacctcaaactatgaaactactacaagaaaacactggggaaactcttcaggacatcagatgggcaaagatttcttgagtaataccccacaagcacagacaaccaaagcaaaaatggacaaatggaatcatatcaagttagaaagcttctgcacagcaaaggatacaagcaacaaaatgaagaaacaacccacagaatgggaaaaaatatttgcaaactacccatctgacaagggattaataaccagaatacttaaggagttcaaacaacttcataggaaaaaaaatctaataatccgataaaaaagtaggcagaatacctgaatagacatttcttaaaagaagacattcaagtggcaaacaggcatatgaaaaagtgctcaacagcactgattatcagagaaatacaaatcaaaatatgatggaatatcacctcacaccacttaaatggcttcttcctctttcttgagagggaatttccccctttggtgaccaaaggcggagggcaacagcacgcatcgtggctagcgggacaccctcacaccacgggaccagcgcacaccctgcgcctacagcgtgctacacgaagtaagcccttcaacaaaacacaaacaaaaacacgtttcgcgctccgccccaaagctgacaaccgcaggcgacgacccgacacccacagcccacgaccccaacacgacacaggcgatcacaccacccccgacgcactgcaccaacaccgaacgagcaccaccacaacgccc

SEQ ID NO: 655065 - DNA, 538 bp, Homo sapiens
aggatccactctaccaggtggtgtctcttaattatgctggacagcctcttagatcactgcctctttgagtcactgcctagagtatacttgctttgaccaaattcttcagtcacatctctcaccttggaaaccaagaaaaatgttacactgaaattcccgagagtttaaaacaaacatacgggttcctgtaattgaagcaaaaacacatggtacatttgtccaggatttattcaccattttaatcaggcactaaaagtctaagtttgagaaagtttgtctgtcttgacctggagttaaaactgggttgacctgaaaagggaactgttttgtacctttttcacagtacggtgtggagagagctatagcctggtaagaagcagctgtgagatctatggtacatggggaaggagaggtcctacggaacaagcaggaaactggtcccttatgcgttttcacgtcatttggtatgaaatagccttgaccttatatatacgtggtgagtgaatggttctgaacttgaaatatgtatacgtggagt

SEQ ID NO: 655066 - DNA, 299 bp, Homo sapiens
agcgcgagtgagggagcctgagccgcccgccgccgccgcctccgcctcccctccgcgaacaggagccctgggcctggtggccctggcactgcctgccccatgccctgtccctcgtgctgtcatgtgcctgcgatgtggtagctgctgctgcgaggctgagcggatggtggtgagtggatgatgctgatgctgatgctgcctgtgtgatgtgatgtgctgtgctctgtgatccttgatgctgtgtgctgcgcctgctgcctgttgttgtggctgttgatgtgtggaagtggcctggcttg

SEQ ID NO: 655067 - DNA, 711 bp, Homo sapiens
taggtttggagggggaatgctggaaattgtaatggggttatggaaactctttcataataagtaatgctcagggtgagtggtaggaatgtttttccataaaggaggtggttatgatgttgggtccgtagcggaatccgggggttatgctggttccgataattcataaaaacagggaggttaagaatgtaagggtcttgggtgacaaaattattgttgtgttgtaaatgttccaggggagatgtgctgtcattattgttggtctccttatggaaaaattgtggttaggtggtgtgaggggtgtgtttatattatattatatataatgtgtgtgtgttgtgttatctctcaggctatagtgaaaaaaaataggggcagaagggcgccgtgacggcgaatattctcgagtgtttagaacccgtgaaaacatagttctcggaactctccccttctcgagacaagggctcagaagggggggttccggggtgtgagtcctcgtgccataggtggtgggaagattaaatctcatatatttagtggcgcccacaggggtctcccggaaagtggggcagagaagaataaactcagaaggggtggtccgttgggtggtgggggaaataagggggtggaagaagagtttaagagggagcccattttatttagataagtggtggataaggttaaaaatgaaggggcctaaggggagaacttcaa

SEQ ID NO: 655068 - DNA, 273 bp, Homo sapiens
ggggttacatgaagggcgtcgggtttgaatcctatcgtccaaccccttaccttctcggtacccacacttccacatgctgactttccttgtatatgcccaaaagaaatgaaaactagtactcaagcaaatacacacacaaatgttcacatggcactattcacaatagccaaaaggtagaaggagcccaaaagtacatcaacagatgactagatcaacaaaaatgagccgggcacagtggctcactctggtaatcccagcacggtgctcgtgcgg

SEQ ID NO: 655069 - DNA, 432 bp, Homo sapiens
gctagctgcgaaaagtacggggaagagcacacatctattgatccgtagatagccgaatggggtacccgttagtagtgatactaacattgcgagtttgaataaaataggactgcaaagcataactgagtggagtgaaccatctaagtaactcaaggaacagaactcaattgagattctgacaagtagtggcgagcgaaattggaagagtccaaaccctataggggtgtcgtacgggctgtgcgggcgtaaagccgacaagttaggatcacactatatttatagcagaaagatctgggaaggtctgacagagagggtgaaatccccgtaagccgaaatgacatatggacttgtttgtacagtacctgagtacggcggggcacggagaaaacctgttgaaaactgggtcgaccacgatccaagactaaatattac

SEQ ID NO: 655070 - DNA, 882 bp, Homo sapiens
taacagctaaggactgtgaatctcattctgtatcaactgaacgctgatcagtcactgtaattaagctaagcctttaatagaccaatgggatttaaattccacaaaacacttagtttccagtcataggtacctctaaatcaagtggtattaaatcatacattctcccgactgtcgggaaagaatgggcgggaagatagccccgagagagtctgatagctgagttcttcgaattgcaacctgcaaatatgaagaatccacctcggagctggtaccaaaagaggtctaatcccgtgtctttagatttacgagtcccatatggctttcaacgtccatgctcaatttttatcctgacctcagcaaaaaataaaaaaacaaaattaagagaagagcgcaacatagagacactgtgtgtgagagcgggccattgaagcgcccgttgtaaaaaataccgcttgttagtaaaggaatccactcgttctgtgaggggggggggtggcggccaattaatgtcgtcaagttcgggagaaggtttgtccaaatttaaggcgtggagcccatacaaagaaagaaagtcgtgaaggtacgaacgcaccaaggcggggagggacaatctttccaaatccaaaagaaaaaaagcaggcgccgcggggggagaacaccccagacgacggcctccggggaaaaaaaacccctacagatggggaaaggccgtcggaagcgccaataagcggggaggtcctcccccataaaaagaggggagtctccccgcaaggcacatctggcatggctcacaaaatacccggagggacgggcggcgggcagagagagagtaccaaagggcattccccgcctacataagggtccaaattagcctgcataatg

SEQ ID NO: 655071 - DNA, 306 bp, Homo sapiens
tctttactgtagccctgcccatagcctttaatattcaaatgagacctagaattttagggctgtgtttctcaacctcaacgctatagacatttgggactggatgcttctttgctatggagccatcctgggcattatgggatgttagcagcctccctggcctccacctcctagatgccatagcatcctcccaccttatgacaaccacaaaatgtttccagccattgccaagtagccccagacgaacacatcagcctgccccaagtgaaggatgttattcactaggttctttttttttttttttttttt

SEQ ID NO: 655072 - DNA, 415 bp, Homo sapiens
actcatatttctcatgtaagtggaatcattcagtatttgtccttttgtgactggtttcacttagcataaagtctttaagatgcatccatgtttccagtgtttcggtttttttagaaaaactcatacgtgattgcagccgggcatggtggctcacgcctgtaatcccagcacttgggaggccaaggcaggcggatcacctgaggtcaggagttaaacaccagcctgacaaacatggagaaaccccatctctactaaaaatacaaaattagctgggcgtggtggcacatgcctgtaatcccagctactcaggaggctggggcaggagaattggttgaacccaggaggcggaggttgcagtgagccgagattgtgccactgcactccagcctgggcaacaagagtgaaactctgtctc

SEQ ID NO: 655073 - DNA, 405 bp, Homo sapiens
gggtcgaatctgtggtacctttggggaaaattggaatgtaaaggtccagaattaaaaccgttgccccattaacagatttcctctggaaggtcttccttacctaacctgatggtatccaccgaagggcatttaactaccattaatggggagtaataaaatcctccgggttaattcagacctaactgcgtaattactttgaacgcctttgtaagctgggtcttaactcgccccaaggtggttgaagggaggcctttaactctgcttcaagtcctggccttaaaggtagtcagaggcaaaggctggattaaacacacactgtttaccaagtgccactttaagaccacctgaaagacggggggccatcagtctgaaggttcctagagacgtcaagaattgaatatcttc

SEQ ID NO: 655074 - DNA, 778 bp, Homo sapiens
tcggctgcaggaattcggcacgaggagagagagtttgagagagagagatagagagagagagagagtgagacttttctctaccttctttttcccccccttttctccacctcctctcctccagttcctcctttctcttctttctctttccatctttccttcctctctcctcttcttccttcttcatcattcttctctttttcttctcccgttcatcaccttctcttcttctctcttctcttcctccttctctttcctccctctcctctttctcctctctcttttctctccttttctcttcttttttcttctcttcttttctctttcccctctttccttaatccttctcctcccctctttcttttcttccttctctactccttctctcccctcttaatcctctccttcttcttcattttccttctcttcctctcttttcccttttcctcctcctctttcttctccttttttttctcttattctctttcttccttccctcttcctttccttcttttctctccccttcttcttctctctctcccctttctttcttcactccctccctttcctcttcccctcttcccttttttttcattcctctctcttctctctcttttccttccttctctctttttcctttcacttttcttctttttttccctctttctcttccctttcttctcctccttatccctcttctcttctctcttctctcttttctcttcctttctccttccttctcttgtctccctttttcctcttttctttctcctcgctccct

SEQ ID NO: 655075 - DNA, 243 bp, Homo sapiens
  misc_feature (138)..(138): n is a, c, g, or t
cactggctcactactcatttgacgttacgggttctggtgttggtttcttcattctttactgcactcagatttacgccttacaaagggaaagcctctgcgcgtcacacgtaggacgcatgacaggtcactcgtggtgcnggctgacatgctcacacattacaacagtcgagagggcacactcctaagacagaggacactccacgacgatgcgtgtctggcgcgcttcagttccgcccgcggcct

SEQ ID NO: 655076 - DNA, 1222 bp, Homo sapiens
ggtcgccagatggttgctcggtccttccgaggaagctaaggggctgcgattggggtgaggccctcagcttcgatcctggcgattagtcacctgggttccgggagcgcccggccctacactcgacgccagcgactcatgagtcctcttgtcgtctcgagcatctgcgcgtagcatctacatcgtgtgcctcattctgctactgacgatgaggtgacagtcactggatgataagatcaattagcgccctcattaatagcatgtcgagtgtaatatgttgagcctttgtggcgctggtttgtatgcaaagtggcctgggcaacgtcaacagttgcgagcctcatctgcaagtgtagggggccggtggacctgctccagcatgctggtgctgcagccatccgaggagggtcctggcgccgcctccactgctgcgtgcttccagctgaggagacagagaaagtggaacgctagaagacaagaagaatccgaggcagtctgatgatgacactggcgcgtatggtctatgcgagctaatcgctctttgggttagcactgtccggagtccagatgctgagcttttagtactttggcttcactcaactgtccgtgagcatctgtccagaggagctggaaaagcgtggtgcaggtgggtgcaggggagcttgggactggtatgagcgggggctaagtctccttggttgccagccgtggtgttcatcgacgtgtgtgacccctgtatacgtggactgactgtttgaattgccataggacccgctgagtgtcccgggaacttcacaaccgggaaaaagtgggtctgaaccgggtcccaccaaaaccaaggttgaccccaggtagtcccgagagttaacccgcaggtgttctaaccaattgaccgggccccaatggattgaggacccgcgaactaacctctgtggaaccactttccatttggccatttcttaaacctggcttcaaaccacttgaaccgggccctcctttcacagcgggatttaactaccgggccgggagcacgaatagggattgaagcagaatcttccaagacacgtgtaggcgagcgcaccattggcggagatatcccgcgacgggactcgtgatgagacacttgcgagctgggcccacatcattagaacgggcttgggtttaagaagaacgaaagcacactcgcgggctcatatatgcgagtcgggcacacacaagtgtcaga

SEQ ID NO: 655077 - DNA, 1331 bp, Homo sapiens
tgtcccaaaaaaggtatatttttttttttcacaagaaggggcaaaagagaaaaccaaaaggaggggccccgcgggggggcacacttatctggggaccaccctctctcctacaaaaaaagaaggggggaggaggggggcgcccctacacccctcttattggtggtccacattgagggcccccgtgtgttgaccactctgctggggggaacactctcgatgatgaggggggggcccccgacttctctcgcgggggaacgggggggaaggggcgccacccacccgcggtgcagaaggcccgcaacctcctttttctccacaaacaaaaagatatttgtgggggcggggcggaatcgcggggccacaaacacgacgcgcgggcgagagctgggagcagatacaaaacactctgtggcggcgcggtgagacatcacccacgccccagcaatgaggagcgagagtgtgtatcacaaaagagagtgggcactcttcggcacacacacaaaaccacaaacacaaaagagggggctacacaagaggagtatgtcggcggggaacaaccacgagaaggaacaagtgggggcgccccacaaaacctcgggggaggggcacgcgtggagagatcacacccggaaggggggaggttctgttgaggagggggcgaccggaggagagaaccatcgagggtgagatcggggggggcgccccacaataatggagcgagagggagacacaaggggacacactaagaggggagagaacaacaccacatgggggggttacagcggaaagaaacaccaccccgaaaaccaactgcactccatgggatgggacggcaacaaccagcggctatgagaaggacccaccacccggtgggaccaagtgacgcacgggcgcttccccagaagaacacaaacaatctcgtcgcaccaaacacccgcgggaagagagacaacaggacgtgtctggctaccaaatgaaaaacgggcgacacgggagaccaccccccccaggcgcaccactagtacgccaaggggggggctgcaacacactatgaggcgacacagagacaacggcgagacagacacaacgaggcacccccggggggtgaaacacaatcggtgggaggggacctggggggcgcagccccaccacaggtgacacgtgatggtgcaggagctgtaccgaggtgctcgagcaaagggcacgcccactagggcaggaaccccacggcacagagagacagacaagagaaggaggggccccaaaagagaaggttccaagaggggatagaggggacaagtatcagcgactgtggggggaaagctcccctg

SEQ ID NO: 655078 - DNA, 188 bp, Homo sapiens
tggcccaggccgggaaaagccacctggcagggctcacactcctgggctttgaacacacacgccagctcctttttgaagcgactttcctgtttggaacggcaaaaaaaaaaatttttttttctctttttggtggtggttaaaagggaacccaaaacatttaaataaaactttccaaatatttccgagga

SEQ ID NO: 655079 - DNA, 187 bp, Homo sapiens
  misc_feature (178)..(178): n is a, c, g, or t
ggccttaccaaaggcggcgaagaggcggagccaagaagagtagtgtgctctgatccattttctagtaaagattggtatgatgtgaaagctagctgcttactcgctttcgattagtaaagaaagtgatctggagaagtactgcgtgcgatcaggcagaggagcccataggaaacccaanaaatggcat

SEQ ID NO: 655080 - DNA, 293 bp, Homo sapiens
gaatgactatgatagagctcgctctgggacagtggtctatggtcaggaagagtacatatgctgtcaggaggctctgagtgagctcaccactgcgcagaaagcacgaatcgcgagctgtcagtgatattaccagtcagctggcgatgacctatctcaggcccctgacgactccccaacaggcatacaggtgacatacctaacctacagacagacgagtcgagcctagccctagcttggatcgaatagctctgagcatatctatagcacattggagagttatgtgacctagctgt

SEQ ID NO: 655081 - DNA, 114 bp, Homo sapiens
tcgtacttaatacccacgatcactcacaaccccaccatcaccctcattaacctctacttctacctacgcctattttacaccaaccccgtgatctgtggtgtgttgtaatgtggt

SEQ ID NO: 655082 - DNA, 121 bp, Homo sapiens
tatgcactccagcttgggcacagagatctgtctcaaaacagtacaacaatcacctatgctatctgcctagggccattcacaggatggtaaatcagatgactccattctctgactgaccagc

SEQ ID NO: 655083 - DNA, 354 bp, Homo sapiens
  misc_feature (304)..(304): n is a, c, g, or t
  misc_feature (346)..(346): n is a, c, g, or t
taggatccccctcataatgtgtgcccatgagggcaccgcctagcagggcatgaaactgcccaagaccttgggaacccaccctttgcatcgaagtgccctggatgtgagacatagagtcaaaagagattattttggagctttaagatttaattacttcctgcttggtttcagatttgcttgggccctgtggcccctttcttttggttgatttctcccttttggaatgggcatatttacctaatgcctctacccccattgtatcttggaagtaactactgtgttttttttattttacagactcatnagtgaaagggactagccttgtctctgatgcaactttggattntggaactt

SEQ ID NO: 655084 - DNA, 170 bp, Homo sapiens
atcaggcgagtacttgtggcaatcatggcagatagccctgtagtaactagtcattcgtacatgcaagagcccgggaagggttcacgggcgcaggtcatactcataatcgcccacgggcttacgtcctcattactattctgcgcgtaggaaactctaaactacgaaagcat

SEQ ID NO: 655085 - DNA, 338 bp, Homo sapiens
gctttttaagattacgctctctcttaactctggggtggattttaaccatgacaactcttgtcctctcggtgatgagtatgtagctttggatttgttgtgcaactgttgctacagctgtggagcagtatgttcctctggagaagctgagtatctatgagtgacttggagtttatgaatgaacaaaagctaaacagatatccagcttctctccttgtggttgttagatctaaacctgaagatccatgaagaaccagggccctctactacaaagtgaatccttgctcattctgaatttaagcatttcctttaaagacaagtgtatagacactctcaaaatt

SEQ ID NO: 655086 - DNA, 808 bp, Homo sapiens
gggagagagaagactgtgtatcaggagtggagaccatgagcatttgggccacttcttcatgtagcttgtgccttcagggcctgctcaggccccatcacatatttaccacttccatttggtgatggagcactggtgtgcacacccaactttatggcttggtgggtcagataacacccagatcatgatgggcagctcaggtcaaatggtaacttggtggcctatggtcaagtgttgtttctactaaaacccagtagcagatcaagagctgttctcaataggagagtggttatctgcaggagatggcaagtctttgctctaaaatcctaagggcctgagctgtggttcacctatgggagcctgccaagagctccaaacaacatccctaaatgccactgtcatttcaagcaccactgtcattggatctgctggatcatatgccccaagtggcagagcagcttgcagagcagcctggagctgttgcagagcattttcttattctggaccccactcaaaactagcagcttctcaggtcgcttcataaataggccagagtaacaaagccatatgaggaatatgttggctccaaaatccaaggaggtcctatgtattagtctgtactcacactgctaatgaagatatacctgagactggggtaaatttattacggaacaggagatttaatttgactcccaagttccacatggttggcgaggcctcacaatcacagctgaacggcagaactgaggagccaagtcccatcttacattagtggcagggcaagaagagcgcttctgcgggagaactccta

SEQ ID NO: 655087 - DNA, 438 bp, Homo sapiens
cggcggtcttcaatcatgcccgttgtggtacaaaaggcatgatcgcttgttatataccgggaagaaagatcaaatttgaacattttctttgagttgtaggattgcagatcttaccaaggaactttcttttacagattctaaatttctacagtgtttcacttttatacaatgagtacctattacttctgaacgtcgaattaacaaagattattggtatcttatgaaagatattcatcataacaaagcactgttaccatactgaaaaactggaagcaacttaagtgtccactgataagtgattgtttcaagaagttatgcatggacttttttttttttttttagaaacggagctcctcaggtgtaacccccaggcgtgaagttgcaaaagcgcattctcggattactgcaccccccgctttgctcccggggttcaagcgg

SEQ ID NO: 655088 - DNA, 963 bp, Homo sapiens
  misc_feature (109)..(109): n is a, c, g, or t
  misc_feature (443)..(443): n is a, c, g, or t
  misc_feature (481)..(481): n is a, c, g, or t
  misc_feature (521)..(521): n is a, c, g, or t
  misc_feature (531)..(531): n is a, c, g, or t
gagaggtgattaatatctagagtctaacgaaagccttttaatcaacctgagaagctcttcgttcagtgctgttacccacaggaaatgagaatgattgaaattctatggnggctcctccaaaaaccttcctccatttgcacctttctccttctaccacttccctgactaatgctaggggctccaagggccaccacacccactctcctgccttctccttctgtctcctttgccactttacctgccattattaccttgcagacaattagagacttcgagctgggggaatcttcttagattctctggtttgaaatgctactttcgtagatagtgaaaccgagacccagagaagtcccccctagagcgtgcacagcatctagggttagaatcagatacgaatatctcaacttctaagcagttctcatcacagcttgtctccctcattnggttcaggttcctacaaagtcactatgggtgttcgctntcttctggcctggggtagagagggaatgcctgcgtgtccnagtctgctgnggggaaacactgtggtacagttttattagattgtgattcgtgctttgaccgacagaccggccgagacaggtgtgggagcacagagttctaggtagagtggcgtctcctaactcagtctgatactaggtttcaagacagctgattctgcacgactgagtagagcttaagcacgtgaatggtgaggacctaagcagagatgagcagggccctgacaggtgaataggttgaaaaggatatgactattacacaggtggacctgatagacagggcttctacttcttgcttctaagcctatggaaaggcagacaagataattgaggatagtcagcgctggaatatcagaatggatgtcgaggtcattaaaactttaaaggttctttctgcaaaccttttggggtacgaataggtcgctcatttgtccagaaagctact

SEQ ID NO: 655089 - DNA, 395 bp, Homo sapiens
caaagaagctctctaggtggcaaataagcactgtcctctgggaaatgcaaataaaaatcacaatgagaaactactgcacacccgtgagaatgccttaaaaaaaaaaaagacaagaccaaaaccaagtgttagtgagggtgtggaacaacagaaattctcataccttgttggtgggactacaagatagtggagccctctggaatcagtttggcagtttcttataaaataaaacaatcatttactgtatgacccagcaatcctgcccctcattctttataccagagaaatgaagacatatgtccacacaataaccaaatactgtaaccacaatgaaaaatgatgcaagtgttcacagaagctttattcatttacctaaaactgaaagcaaccacctg

SEQ ID NO: 655090 - DNA, 365 bp, Homo sapiens
tatataacattccacctccctgtgtaatttggatagtccttttccatggtttataacattttcctccctgtaaagataggcctaatttcctgaaataataattaaatttatagaaagccgagaggaaattgcctagtttatccccggtagaggaatttctgtatttgaaaattctccagaaggaataatataaactgtggactttgggtgataatgatatgtaggttcgtcagttgttaacaaatgtatccctctgttgggggctattgataatggggaaggctgtgcatgtgtgggagtaggaggtgtatgggacatctctgtaccttctaatcaattttgctatgaacttaaaactgctctaa

SEQ ID NO: 655091 - DNA, 371 bp, Homo sapiens
caaagcatgctgcttatactacagccacttctgaccattttatacataccgcagcctgaaattgtgtgattatctccaatcaaatcactttgatggcagcataaataatccaacatgttctatagtcatagattaggtgagaacagtcatggccaaatggtgtacgaaggcattctcatattttggagctttccttccagagtcctggctgattggtgttcgctgtacatctgagcccccaaaagcattattactgatacttgcacacagtcaaaagcgcagactggatggctggtctttcataaggcatttaagggtacactactgtgtatcactgaccatacatttttcttagaccctcaagcactatc

SEQ ID NO: 655092 - DNA, 383 bp, Homo sapiens
  misc_feature (48)..(48): n is a, c, g, or t
  misc_feature (255)..(255): n is a, c, g, or t
  misc_feature (314)..(314): n is a, c, g, or t
  misc_feature (381)..(381): n is a, c, g, or t
cggggtgagcagaatgccttcttctggaatgcttcctgaaggaactgnctgaagctgttttacaggcttttataagtagaaggagtatactctaaaacaacaaaagtataagatattataaatacaggccaggcgcagtggctcacgcctgtaatcccagcattttgggaggccgaggcgggtggatcacgaggtcaggagatcgagaccatcctggctaacacggtgaaaccccgtctctactaatacaattanccaggcatggtgaatggcgcctgtagtcccagctactcaggaggctgaggcagaacggngtgaacctgggaggcggagcttgcaatgagccgagattgcgccactgcactccagcctgggccacangc

SEQ ID NO: 655093 - DNA, 373 bp, Homo sapiens
  misc_feature (40)..(40): n is a, c, g, or t
  misc_feature (82)..(82): n is a, c, g, or t
  misc_feature (94)..(97): n is a, c, g, or t
  misc_feature (134)..(134): n is a, c, g, or t
  misc_feature (138)..(138): n is a, c, g, or t
  misc_feature (141)..(141): n is a, c, g, or t
gagggaagggtatgactctgctgaagcagaatagatatgnctccattaggattttatacctgcattgagcctaaatattatngccttcgagaannnnatctttctgataactgagttagggggcaattcagctntganttntaaataaagaattttagacaatcactgcaattctttcctgctatgcaatgggttttgtggccaatggccaagtttaactctatcgttttcccttctgatttaagtatctgatgcatatgtcactttcaaaagctttccacattccgtttcagaaggacctatctaccacatgagtttgctgatataattagtgacctttggtatctacatgaaggctttaccacatttacta

SEQ ID NO: 655094 - DNA, 418 bp, Homo sapiens
  misc_feature (13)..(13): n is a, c, g, or t
  misc_feature (63)..(63): n is a, c, g, or t
  misc_feature (83)..(83): n is a, c, g, or t
  misc_feature (143)..(143): n is a, c, g, or t
  misc_feature (197)..(197): n is a, c, g, or t
  misc_feature (272)..(272): n is a, c, g, or t
  misc_feature (278)..(278): n is a, c, g, or t
  misc_feature (285)..(285): n is a, c, g, or t
  misc_feature (300)..(300): n is a, c, g, or t
  misc_feature (308)..(308): n is a, c, g, or t
  misc_feature (333)..(333): n is a, c, g, or t
  misc_feature (410)..(410): n is a, c, g, or t
ggatctgttatcncatcatggagataagttttttggttctttttaacataagttatttgtttnagagtttgctgaggagctanttggctttaagaaggatgttaattagatccaaatacatagggaccaggtgctgctttttnatgttcacaaaagctgttcttcaccatttatcttcatttttttagggggcttantgaaggctaatcaattcgatgcatgttttgtgttacagttccatgtgtctgtgtcacttgttaacagtcctaatngccaanacccatntaggtttccccaatngagaatanacccaaaacccctgtaagtaaactntctgtgtcttgtaactttactaaacatacttgtaaagtttgtctgtaaatgtgtccataaagttacctataatggtnttgtccag

SEQ ID NO: 655095 - DNA, 392 bp, Homo sapiens
cagcgcacaggcgtagcagaggcacatgtgcccacatgtgtagatgaccgtgtccaccgcgtgttcatagcaaatggtgcactcattgctccactggcccagacctggggtcactggcgactcgggcaggctcactggcgaattggggctgtcccaccagcagagctacccagagggccagagctgcacgtgctgagcaaggggtcagacaggcggctcgcagggcactgggcgaggttggcgtggaggcaggggagcaggggagtgatgggataccccgctcggccaggatagtggagccgaggatgcggatctgcgtgatggtcccgtgcaggccgaagagcatccaaagcggtctgcgagggtccaagcacagctgcatgcggcggtcc

SEQ ID NO: 655096 - DNA, 110 bp, Homo sapiens
atttcttcgctcatctctctccattcttcgctcatttcgctatttccagtcaggcagtggccaaaagcagcaggcccccataatcctgtgcatgatgcaggcactcctgg

SEQ ID NO: 655097 - DNA, 206 bp, Homo sapiens
ggtcccgttgcatgtgtgctgggcccgagggttctgcaggcggtgttgacgaacagcgcgcgcggcggtgctgcgacgcggcctgctccagcgcctcgcaatccagcccgtccagcgtgcgcgccaccggcaccacccgcagcccggccaggcgcagcatctgcagcaggttggcgtaggccggctgctcgaccagcacggtatcg

SEQ ID NO: 655098 - DNA, 546 bp, Homo sapiens
  misc_feature (520)..(520): n is a, c, g, or t
ttggggctcattcagggcaacttgatagtgagtctttaacttctctgggggacagggtgacttggatccagaaagactgggcccggggggagttggggcctttacttgggggtatggtgaaatagacccggagtgacttggtctgggcggtgtttcaggtttcacttgggtatcgggtgaggaggacccagaatgacggtatctgggcaacaatcgggattccacatgggagcagggagatacggatctgcttcgccgtggagtggttctcgacgtcaccctactaggactgggagaagaggagccagaagggcttcttggtctgggtgatattatggccttcacttggggtggtggagatgatgacctagatgggctcggtcggggaggtgtgctagatttcactctaggaggagaggcccggagcagctatgtctagaaggggtcctagatttcaactcagggtcaggtgatgattcaaaacagctcggtctctgtggcgtaacagatggctcattgncctggggacttgttatggacccttgc

SEQ ID NO: 655099 - DNA, 393 bp, Homo sapiens
tgtggaggaataagggagatagtgcagagactgaaggtgatgagcagtggctggagacagtggacatgactgcttcggcggaacgggctcgggcagctgggcttccacgtgaaagtacgactggcacggtggccgatggttgagtgactatgtggttctgcctggcagtgccggcctcctggcagtgctagcctgactagttggagatctcgcaaggtggcctgtggtcacacatgacccacgagccagagtgatcgacctgctagcgcacctcgtgtcacgtgtgaagtgtggtcatcatcccgcacttttgaggacggcactccccggaggagttggccggagacctacgacatgaatacctcggagcccaagacggagcaggaaagcatc

SEQ ID NO: 655100 - DNA, 524 bp, Homo sapiens
ggaacaagagcaatcatggaacaggtgaagtactcagagagaaccatccatcggtattgtataagtgcgcacctgggggccgagcgaatagctccacaagatgcgccagttgttcgtgcgtggagtcccactgggtggcatcattgcggacttgcgtctccctccgcccgatcgtacacagaagagctgtcacgcatgatgacaccgaagccgtgtccctctataaggccacagcgcttccagcgggaacagtcagacatggtcattctcatatcctgccttctgactctgggccggtggagtggctctcagaatatactctgtctgctggcagaataggcctgtactcttcgtatttgctttgacttgatgttgccaagggactgaggtccattgaatcaggcttagtaccacctgctcctcatcttaggagtctccttttcaaataattaggctcgtgttcccattttaaaactctgatattgccttcaccgtagaataaacaccttactagagcccttctt

SEQ ID NO: 655101 - DNA, 156 bp, Homo sapiens
tctaaggatcctgtgcagcctagtgccgaacctgatcctctccggtgcatgccgggagtggctggtgcgggccgtgcgaccatccggccctgtagcaccttcgtggaccagcagcgcttctcacggccccgcaacctgggagagctgtgccagtgc

SEQ ID NO: 655102 - DNA, 311 bp, Homo sapiens
gacctacaggatcttactggcaggctcggctcgtcaggctcgaagtccaggccaggaactgtaggcagagcttctccagcagtgtcgtccctgtggccactgcataggcctacaggtccagtggcatctggaacgaggggtcctgggggaggaggatggcaaagaggcttgcgcagtaagccctgcagcttgcctggcccctatagggcagaggccagctttgtggaagcacttgactagacgacagtggtgatgtcaagtccttcgggggttagaagtaccttgagaagggtcccttgaccatttgggca

SEQ ID NO: 655103 - DNA, 173 bp, Homo sapiens
gacatacttctcgtttaactataccacaaggtcttttgtgctaaggtggccatgtgtgtcacagtcagggaaatccctcctcctggtgagccacagaggaagtctctcaagaactagacagggaaaggtgttttctccacgatcaatccagactttgcgaggggtacctgagc

SEQ ID NO: 655104 - DNA, 323 bp, Homo sapiens
acagcttgagtatgtcaggctctggggcttatgagttgtccctgtacttatcttgctactctgatctgatgtaagcaactgtattagtccattctcgcattgctataaataaatacctgaaactgggtaatttataagaaaagaggtttaattggctcacagttccacaggctgtatgggaagcacggctgaggaagcttcaggaaactttcaatcgtggcagaaggtgaagtggaagcagacgcatcttacgtgctggagccaggaggaagaaagagaaggaggaggtgctaaaaacttttaaacattgggaggctgaggcg

SEQ ID NO: 655105 - DNA, 177 bp, Homo sapiens
cgggccctgctggtttcccgggctcaggaattgtgcagctcctcacttcaaccatatggagtctcagccagcttttatgcaaagcagttgatccctagccatctgtggtcctttctggtactgctattcacaacgtttccaactagtccaacaccaagtaacttgccacgggcacaa

SEQ ID NO: 655106 - DNA, 1080 bp, Homo sapiens
  misc_feature (558)..(558): n is a, c, g, or t
  misc_feature (652)..(652): n is a, c, g, or t
  misc_feature (783)..(783): n is a, c, g, or t
  misc_feature (831)..(831): n is a, c, g, or t
  misc_feature (860)..(860): n is a, c, g, or t
  misc_feature (888)..(888): n is a, c, g, or t
  misc_feature (926)..(926): n is a, c, g, or t
  misc_feature (947)..(947): n is a, c, g, or t
  misc_feature (950)..(950): n is a, c, g, or t
  misc_feature (959)..(959): n is a, c, g, or t
  misc_feature (994)..(994): n is a, c, g, or t
  misc_feature (997)..(997): n is a, c, g, or t
  misc_feature (1006)..(1006): n is a, c, g, or t
  misc_feature (1021)..(1021): n is a, c, g, or t
  misc_feature (1027)..(1027): n is a, c, g, or t
  misc_feature (1030)..(1030): n is a, c, g, or t
  misc_feature (1061)..(1061): n is a, c, g, or t
aaaaaaatttattttcattttggagccaaggtctcactctgtcacccaggctggagtgcagtggcaggatcatggctcactgcagcctcagacttctgggctcaagctattctcccacctcagcctcccaagtagctaggaccacaggtgcacgccaccacacctggctaatttttaaattatttatagggacgagatctccctgtgttgctcaggcgagtctcaaactcctggagctcaagcagtcctcccaccttggcctccgtaagtgagattacaggtgtgagccaccacacctggatgcacttccttttagaataacctttgcgtgtcatgttggcactcaaaacatttcagattttgaagcattttggtttcagatttttagattagggatggtcaacctgtatatgtttactcagagaaagccacaattttctggaatgatattttgagtactttaagagtaactgaaattttctattttctttttctctaccccaaagtgtttactttggaggcatgaaataatttggaaaaagaaaaacaatcaccgtnagatattgattctgtctctaagctttttgcattcattagtttccataggactttcttgcagatatacagatgcctcattggattttactgtganggaatattggtacattagcaaaaacagtggactttgtgaccttgaaaaagtcatttaacatctctgaaccctactttctaagtctctacaagtaatatatagtgggtgaggtgttctttctttgttctgtnacttggatgtgaaactctccttttgtagatgaaaccattgcataaggnatataaagaccttttccctggaagttaancctaccaggcctgggaggaggagtgccnagtggaatgcttttggccttccaaatggccccaatccnccttgggggaaataatttggnaangggtggggnggtaagccaaaacccggggggcaattaaaaaattnaanccccccttnggggaaaaaaggggnaaaagnaanttaatgggccaaaaccccctgggcccttttncccttccaaaaagggcccc

SEQ ID NO: 655107 - DNA, 205 bp, Homo sapiens
ctacatactggctagacacataaaagaacaatttcagagcccacatgatttataaagcttatgggccagccaggtcagccggctcttaaccctcgggccagaaggtccctatcactggccagcgcggtgtctttttccttctttcaacaggcaacacgcctgcaaggagggtgcagacgggtggggcccggagctcagatttcga

SEQ ID NO: 655108 - DNA, 1015 bp, Homo sapiens
tgtcggtgttgtgtgtcttgtgcgtgcttcgttggtcgcggcgttgtgtgggtagtctcccttgtttgtctgtggtggccctgccgcttgtctgtgcgttggctttgtccctgtgccgttggttacgtgtcctggtcctgtgtcgccttctagccgtttgcctgtgctagttgttgctcttcttcgcggtggctggggggctctctgtgcgtcggttcgtggtgttgggggtccctcggtatgtggtcccatcgtccggtgcgctggcttggttcgcggcgcgtttggggggccgggggtccggttgttggaatccctgaggaaaatgctgttgggcaacatgagatggaccttttcatattattgtacaatattagagtcttggaagttacagaagtcagttctcacagccacccagtagcttaatgtcagctcctgatacgctgcagtggactgcttcagccactgcacctcgagtacgcaggctggctgggctgctcctgctggctgtcctggaggatttcaacatgtcccaggatttgctgcaccctcgagggcagccagacagcgtcgaccaggcaatgacggaaagcagagacaggagaggaaggcctcactcacccactgcgtcgagggctgcagaacacagcgggatccctgtccaggcccagggacatcgagtgcaagccagacacactgtcctcttgagacctcgttctctcggagtgagccaaacacacttcccacacgtctcccagccacagctgggatgctcgatggaaaggcatctgccattaaagtaaagcaaagagatagaaagccgcaatccgatgtggggatagagagtcggaagacgcagtcaggcttgaggagctggcgcttgtaatgtttatccgtcttaaacatattgcgtccctcactggtacacgtagggaactgtcggacacaggtagcctgagcctcaggctgttgtagaagcatctgatgcctttttcttgctggagtcctccggatg

SEQ ID NO: 655109 - DNA, 126 bp, Homo sapiens
agtgtaatggctcattgtggtgacagtgtggactggagcatcaggtgtatactgttctgtctccagcccctccctcctctgtgctgtccacctcctctgtgctgtccacctcctctgtgctgtcca

SEQ ID NO: 655110 - DNA, 82 bp, Homo sapiens
aatggctagaagttcagggcgggggatgttgcggtgagatgtcttcttgtaggaaccaaaatttttttatgaaagaagggga

SEQ ID NO: 655111 - DNA, 112 bp, Homo sapiens
tatctctatgtgatgccagcagagacctttgtgaaatcgcttcttttttactgtgtttaaaagccccccagtgtccacccagtgaaatacgcaagctgcgtttcacttccga

SEQ ID NO: 655112 - DNA, 120 bp, Homo sapiens
gcccccccccccccttttgaaaaccctaataaaaatttttggggttttcgggcccgggggggtcccggggccccccccccttttttttttcccccgggggcccccctttttttttttcca

SEQ ID NO: 655113 - DNA, 323 bp, Homo sapiens
ttagagaccgtgttgtcactgtcattaacggagagaaggaagagaagtaagcctgaggggtctttgattgtgtagtaagggtggactggtgatttctatcggaatgggaggtgattcctagggggttgtttgaccccgtttcgtgcaagaataggcaggtggagtgctgctagggttgccatacatcgaagggtaagatgaagtgacagtgtacagaatctgtgtgacgggtgggactgtctactgagtagcctcctcagattcattgcaccacggtcttctcagggtacccggaggctcgaaattcggtaatcattgggtca

SEQ ID NO: 655114 - DNA, 167 bp, Homo sapiens
  misc_feature (23)..(23): n is a, c, g, or t
  misc_feature (42)..(42): n is a, c, g, or t
  misc_feature (64)..(64): n is a, c, g, or t
  misc_feature (90)..(90): n is a, c, g, or t
  misc_feature (125)..(125): n is a, c, g, or t
acttttacttaagcatttgtaanttggagtatctggtactanctaagaaataattctataattnagttctgtactcaccatatatggatnattcctcatgtataatgtgccccaaatgcagcttnattttccagataccttgacgcagaataaattttttcatcatt

SEQ ID NO: 655115 - DNA, 329 bp, Homo sapiens
agtgcagagagaaagtggtaagaaatggtcattcgagcatcgtggtaagagtagccaacattgcctgggaatctttggcacaaggtccgagatagcgaagttatcgtgaccgatttcttgtctttcgttttttttcatgacatattttattctcacactaaataacacatgaattattatggatgacattcaaacatgtatgctaaataagaaagtccactttcctgtcgcgctacccttcagtgtgttttccgaccctagaggtaataaccacttgttctgagcttttccgctctttgcctctctccgttcttcgttctctctccact

SEQ ID NO: 655116 - DNA, 657 bp, Homo sapiens
cgatggtgctctggtaggagcgtgacatttatgcctgccagttcaccaccaccgtggagtattgctgtgccgcggagctgttcaccgaagggagcatccgcaaagctgaagtgctgagcagatagcaagtcatgctggacgacaaagcgcttttccctgatggctgtggacaggctgatgaccgtggggcagaccatgacatttatgtgctgagagtgactcacccacctgaacagactggtcattttaccctaacacccctgaatcctgaaaggcacccattggtacctgctgataggcagcgtgtgactgaccacatgctccacacatagggtctgatgtaatgatcggagtgtgctgaccatctatttcagctgaaagacacatcatggtagatagggagatctcagagtgcgagtgagcttgacactcactctatgactgcagagccagcatctgacatagagcacagcgtccatgaaggtatagatcggctggctgagcatgcctagaactgacactgatgatacttatagtgagctggtaagtgacagcccatcctgatgacctgctgtgctcacttaggtgtaacatcaaggcgttgtatcaacatgcgctcttgaccctacggtgactctcctgagcatgaagacttcg

SEQ ID NO: 655117 - DNA, 760 bp, Homo sapiens
  misc_feature (219)..(219): n is a, c, g, or t
cagatgagggaagaagctgcagactaggatacgcctcctcctctgccaggtacccggaacgtgatcgaggcttgtgtgcggaccggaacacggtacctgtctctacaccaacatgatggaagttgtggggcctaataccaaatggtcagcccgttctacagggcgcaactgaagcatacctctctagtacgaacgcagatgcaacagggcgagccaccntagtcgcatctgccaggcgaacggcccctggtccgcagctggtcatagtggtcctgcgaaggccacaactggagagagtacatggtcccgtggggggctgcccctggtgactttgtgcccttcagtcccacgggcatctacggtgaaaggccaccagagtcatgtagggacttctagccgaccagggctctgcgcctgggcaggttgtgctcttccgggcctcatcccgagtctcatgatggtacgctactgggccgtgcgtctatcgtgggcacatgttgacgctggcatgctcggtgcgtggcggcccgggagctggagctgagggcaaccctgatgggcgcgcaggtatacttctggctaccggatgtgatcaccctgacaggcaggctacgaggatttcaacatggcagttcctggtgcccctgcaggactgcggtttggtgggcgcccggccattgctgtccttactggctgtctgtgtgttgcctggctgacctctgagtgccctcgctgcagtgggtgttgcggccactggtgc

SEQ ID NO: 655118 - DNA, 158 bp, Homo sapiens
gctgtattatcacgcttttgtcagataggaaactgaggctcaaagaagatatgtgcccaaggtcacctcgctagaaaagtgagctagatttaaactgtgactttaagccacggtcaacccacaagccacggtcaacccacaagccacggtcaacccac

SEQ ID NO: 655119 - DNA, 888 bp, Homo sapiens
ctaccctagacatctgcatcttgtaagttagccagacaataaagaaaagcagaatgaaaaaaaaaaaaaaaaaaaaaaaaaaaaaaaaaaaaaacaaaaaaaaaaaaaaaaaaaaaaaaaaaaaaaaaaaaaaagggaaaagaaaaaaacacccagaggcccagaccaacccacacataaattatatataaaaacaagatatcactaaccatgaactctatctcttatacatcaaacatacaactaaatctttaaataatataaatctaaatataaataaaacataccaactatatcatattataacatacaaataacataaggatatacataattgaagaaatacactttatattatacatacaattacaaagttcttacttatcttatctgtatcaatattatgtatcaaagtactcggtcagattagaattagtgggatatgactagagaatgcggacgatatgactacggtaagaatagtgttgaaagaaaggtgtatagttagtagcgcagtaagcaagggactcgaacccgaagacgaatactagattactccgactatgtttccgtattctgtagtgcgtttacgtaaggattggatatggtcggctgtggtgatattgtgactggtgcatgtgatcgtcgtgccagcgatgggcgtgtcggtgggtgtggcccgcaagagcggcatcgtggtgtggttttgtatctgggtgtggatgggcggagtgcggtgagcagaggtcacgagcgtgctcggaaggggctagggcgagtgtcaggctggagggggtatccgataggacagtggatcgtgtcagtgttgcagccgcgagcgtctctctttgacggctgagtcgggacggatactggagctgccgctgg

SEQ ID NO: 655120 - DNA, 1606 bp, Homo sapiens
  misc_feature (1589)..(1589): n is a, c, g, or t
cacacaagagaccgactcactagggctatcctgcggggggagctcgatgtaagtccctcgcaggtcgctgagaggttgacgcagggataattacaaacgaggcatgcgtaatagtcgctacctagttggagatgatgcttgcaaccatcgtcgctccgtatgccttgggaggcgagactgtaatcgaggccgatgtgttgacacgtggaggtagtcaccgcgcgtgtgcagaatcgctcgactggcgaatggtcggagacgtactcgagagtaagctattcgtgcctgggattcatcgctaggcgggtgggcctgttcccgatcacgtgtgcctggaactcgcggaacgtatctcctctgcacggatgataagcgttggaaggctggtactgtgtagagcctcctgttggactactagtatcgcgcgattccagcgtgttgtactggggtccgcggtggtacggaaggggtcgtcgcgagggtataggaatacctcccttaaaggacgtttaatggcgaaggagcccgtgtgtgcgggcgacgcaagagagcggcgatgccgaagcgagcagtaaccatgccagaaccagaggcgagccagtggaacgtggacgtggacgagtagtagggaacttcgcttcggcttgtgtgtgcacagctcctaatctggggagcgccacatactgggaaagtacccgatggccttcacactcgctcgaaatggattggtagtctagcaaagaccacccgcatggacggatggacgcctagcgttgtcattgattcaccgcgaagagggtaaatcgcacattggggcgccgctaggcgtctttcgctatgggtagctctccgccgaaacgatcacctggcggccagggccgattcaatacctacaccggtgtgtccgtggggacctcccggttggcacgatacttagagccagcgatccagaatatcctgtggcgttaggcgctcgatgtggggcggaaaagcgaatacgcgggagaaagaagtccaggcgttcccttgtgggcccattggtcggcaatcgcttaaagttatcccccgagagtgaacagaggacacgtgggggtcaccatcgggatggaaggtccctgggcacaggatacccacgggccatcgcagcaaccacaacccgtacggcctcgttgtcgtacaccaccttaaacacgcaacaatttgggacacgccgccgagtgcgggcaggcgactgatatccaccgaacattgtgggagccacactcgcctatggcggagtgacaggaggcgctatccaggacaaatacactttggatgatctagataattagaccccaacatcgtgagtaataattgatcagagcgaacaagcaacgagtgggtgttacaccaggcaacatacagcaatagtgaaacagatggttgctgttcaaaatatcatttgttgcgtactatgctatgatatccccctcaagtacagactatattgtttactcaaagttcgcacgagttcgtccagaatgtgatggcagacaaacaaagctgtgtgaagacaatagtttccatggactataatatagtggtgtgcntgagttgagaatcccca

SEQ ID NO: 655121 - DNA, 399 bp, Homo sapiens
tagggcggtgaagctgcatgcagggcggctccgggtggagcgagctcatggcacgtggtggttaccggctctgctcgatgtatgcggagatgtcgattacctctggaagtactgccacattaacttcacaacggtcctggacgtcattgaggatttaggcatcattctcgtccgacacaacagtgatggctaggcctttggtgccacaagcgaaccgcccgggacacccggtgcaggtcggtgtccgagtcctcaggcatgtcgtacttaaagacgatgttgactcgctcgatgtccatcccccggacaaacagataggtggacaccaggatccgccgctggaaatccttgaactgatgatagcgtgacaggcgctcctcctgggccatgccccggtgg

SEQ ID NO: 655122 - DNA, 260 bp, Homo sapiens
cgaatataattgtaagtcatccacgctgttggtctgcaaacttttgaggtaactacacacacacacacacacacacacacacacacacacacaaggattttagatttgaaaatgatgttttttactcatttcagaatgtactgtaacctttctttggttcttactgtttgcatttaactttctctgttttcaagaagagttgtctttattgacatttgtaaaaaagaatgtgttttgcccagttattaagtattttattg

SEQ ID NO: 655123 - DNA, 372 bp, Homo sapiens
  misc_feature (100)..(100): n is a, c, g, or t
atacctcagccctgtattacctaaataggcacctccataccggccctcacctattggccctcaccatggcccattcaccctctgtgccaagaatgccttncccttcctgcccaattttatagccaaattcccctgatgacaagataagcgccccattcaaacccaagtctcctcccacctttcagctctcccagagcctgcaatgcctcagccttcaaatgcaagcaggcaacagtacatatttaacggcaattttagcaatctgtgagtgcaactccaaaggaataacaacaaagtttctaaacattaggctatttttatggttttctaatgaagatggttgtgacagatcaatggaggtctgattgtgga

SEQ ID NO: 655124 - DNA, 140 bp, Homo sapiens
  misc_feature (18)..(19): n is a, c, g, or t
  misc_feature (50)..(50): n is a, c, g, or t
  misc_feature (53)..(53): n is a, c, g, or t
atcccagaggctgtctgnngctcggaccaccagcactgctgcccccaggntancacgtgtgtagctgaggggcagtgtcagcgaggaagcgagatcgtggctggactggagaagatgcctgcccgccgggtttccttatc

SEQ ID NO: 655125 - DNA, 430 bp, Homo sapiens
gggcgttgtgacgcgcactgattttcatgacaatgaacagacacttgcggagacttatatgaacatgccagaagacatccttacttttatgccccggaactcccttgctttggtacaaggcatatagctgcttttacagaatgacggcacgctgctgttcaagctggctgcctggtgcccaagctcgttcaacttccggatgaagggaaggattcgcctgcctaacatagactcaagtgtgccagtgttcaccaatttggagaaagagccttctaagcatgtgctatagctggcctgaggcaaagatttcccgctgagtttgcggaagcttgcaagatagtgacagatcttaccagagctcacacggaacgctgacacggagatacgcctgaatgttgtggagacagggcgtgggcatgcgtgttctgtg

SEQ ID NO: 655126 - DNA, 212 bp, Homo sapiens
ttgggactcaagcctgtattacacagctgaactccacttgtgctcccagatgctcggaaggctgaggtgcgagaatcgcatgaactcgggaggcacaggctgaggttagcagacgatcgcgctgttgcactccagcctgtgcaacaagagcgaaattccgtctgtaatcccagcttactcgggaggtgaggcagaagaatcgcttgaatccg

SEQ ID NO: 655127 - DNA, 949 bp, Homo sapiens
ataataggtgtcaaatgctaaaccttttatcttcgatgtggcactgtagccatccccgacctctcccgacatccaccgcctgacagcatccctggccttgcaccagcatgtctatgtatggcactcttgccatccccgccctttcccagcagagtctcactgtgtcaccccggctggagtgcagtggcgagatcttggctcactgcagactcactgcaaacatccacctcccgggttccagtgattctcctgacttcagaactacctggagtagccttggagattacaaggacaacgactgccacacacacactggcataatccaaccgtattctttctacgtagatacacagggtattacaccatgtaggaccaggcatggtacttaacacataccaagcactatcagggatgatacccagaccatacctgcgcagccatcaccacaacaagatggactgagacgcaataaccagggcaggatgaagaacccacacacgaggcatcaagcaccataagcctgctaggatactaggtacaccacacacaaccgccaagaacacggaaccccacgagaacacaccagggcgcacacaaaccaccacgaggcccacaaacaagaagcgacggagaaccaaaaaaccagcaaacacagacacacacacgcgcacacgtcaaagccgcacaacagcacccccaccaaggcatcaccaagccaacacacgacccccagcaactacaacccctaccgagcaaacacaccctgggacaagccacccgagcacctacacacccacaatcccccgggcacaaccacaaaggaacactcacccagccacacaaaccgagggcaccacaacagaaccacagccacacacccacgaacaccctcaccctctcaccccaccccgccacccagcacgcacacagcacccacacacacccccag

SEQ ID NO: 655128 - DNA, 708 bp, Homo sapiens
  misc_feature (76)..(76): n is a, c, g, or t
agggttaaagtgttttttttcaacataaacgggtgttttccccccctcaaagaggtgggggccccccttcccccanaaccccaaggtgagcaaaggtggagatttctccgcaagtcattggtttcaccaaggggccttcaatgtgagctgtactcggaattccaaattggggcccccgggggccgaggggttccggttcggggtccgctcagccccctcacggcgaaattacggccctttcggcccaggcggcctgggtttcttcggacgattgcattttgtgttgttttagggcctccccccagggccggggggcccccacccttccgggggccaaaggaattttgtgctttgtgggtttccccccacgcgccccgccgggttttaaggaaaacaaaacccatcggggggccctgggccctttaatgcctcccacctgggggttagggttaggccccgggcaggaaagggggctcccctttgccccccctcttgtcccccaaaacttttggggggggggttccccccggggggtttttttttttttaaaacccccccttttaaaaaagggcccggttgggggctttccaattttttagggaaatgccttggtttggatttttccaaggtcccccccttagaaaattttttttccaaaattttggggggcgggttttttgttttttaaccaaaaattttaatggggga

SEQ ID NO: 655129 - DNA, 337 bp, Homo sapiens
cacccagtagacattttgcaacatctggagtcgttttggattgttttaactggggggacgtgctactggcctctggtgggtagaggctagagatgttgctaaacatcccacaacacgcaggaaagtccccacagcaaagaattatcccgtccaaaatgtcagtgtttaccaggaaagggagataggagaaaaaaaaaaggaaaggaggaaaaggatgagggggggggaggagaagaagaagaagaagaagaagaggaggaggaggaagatgaaggaaggaaaggaaggaaccaaattgtcggagcatggttgagaaaccctgttgttttgtcccttg

SEQ ID NO: 655130 - DNA, 739 bp, Homo sapiens
catatgcagactttgcttcccgcgggttcataccttgcgcctcccggctggaagaggccactttcagactgactatgccctcttcggtcctgaacacgggccccctgcagctgtggacacgcctggcaccgatctggctgccggctgtctgactgttcatggagccgccgcccctcacagggacccggtttttgcatcccggaggcgccgggcctccttcccccactgtctcacatccagtactctatatgcggggcccggctggctgaggctgaacgggccaacctggaggaggcccacccagctgtaccaggaggccgctcaacggtgaaccccagatggcggtgcgccatcatgcatagcctgggtctgaagctgaggtcggctgggccacccacgacgcttggccccgaaggtgcttcgctgatctccgtggagagcgcacgatgtatcgtgccccgacggcgtggcacagggcctggcgcgagtgtgctgcaaggcccacgggccacgtacgaaggcttcccttgagctgcttcctcaaccgcccttgaggctggaggcccagcaagccctgtgctgcccttctccatcatccccacgagaactctgacgacctcaccgccacgggagggaggggctggcccgagggacgaggcaccagggaactgggtcagggtggggccaccatggcatcaggttcggggcctcagggaaaaacatctttagtgaacgccca

SEQ ID NO: 655131 - DNA, 215 bp, Homo sapiens
gtgactggagcagctggtcaattgacttttcactgctgtacagtataggaaatggatctgtctttggtaaagatcagcctataatccacgtgctgttggatttcacccccttgattggtgtcctggacggtttataattggactgcaaggctgtgcccttcccctcctgaaggttgtttcgcaacggtaaggagacgttgcttcaaggcctggtt

SEQ ID NO: 655132 - DNA, 207 bp, Homo sapiens
gggggggaccaagtacgtctgactcccgagtaccagagctgggtgagcccgcccacaaccaccacgcacacaactactacaattcatcagtcagccctgcaatgtgagacttccgtagctgtgagagtcactgcaggtgttctttcatcccgtctgattttaacccatgggttgagacgttccaagttagatctgctgctcgttagg

SEQ ID NO: 655133 - DNA, 914 bp, Homo sapiens
ggtgccccaatacttcagctgcatgggctgttgcttctctagagcatatcccactccactaaggtccgcagaagacgatgttggtccaatggagaacgtcacctacaggagatccaatatggcatgatgtagtctagaactcaatttttaatcaaggggtcacagtcaatgtgcgggaggtaatcaaatgttgaggagaaaccatacggtcgtgccattgcagaacccgttcatctcctcacacaatcttacaagtgtgtttactcatatgtggctggatactggacttgatcttgtctgatgtatctcactgggaatcggacgacatctaaagtatgattatagtgttgatcgcgcctttgtagttgaggataataatatatactactcttttctcactttgaaccgataagctcaacatattggacatctgcttccatatgtgtagtatacttggctacgactttttgaccttgctcatatccttcgctttagtcgctatcaggttactaggcagacagtactaggtctctatacatttgaggaatgaatacaggaatctagctttgcatccacggaaattaacagccttttacgagtcatcaaagaaaaacacatgaaaaaagagaagtaaccccggggattgtacttgttcaagcaaaaatctaatactacctattgcgaagtgggaattgctgattgaacattcgaaacattatcttagcttcatttagagccagaaggctaattttttactgcaatttcttgttccctattgagcagggaatgcttaaagtgtagccataaacgttagagttgtaaatagccaaaagtgggaacagaacttgaaatacgcgatcatctacacgcagggaagccgacacgcataaacaggtaggcatcccgaaatcaga

SEQ ID NO: 655134 - DNA, 180 bp, Homo sapiens
ggatttgctggtgcagtacaactaggcttaatagggacatggtggggggtgcctgtaatcccagctactcaggaggctgaggcagtagagtagcttgaacccaggaggcagaggttgcagggagccaagattgtgccactgcactccagcctgagcgacaagagcaaggctccacctaaa

SEQ ID NO: 655135 - DNA, 544 bp, Homo sapiens
  misc_feature (417)..(417): n is a, c, g, or t
tatctacggtgcttattgcattgtcttccctggacggaaaagtaacatcaaacacggcgaccgacatagtgagacctgtctctactagaagaactataaaaatcacctaggtgtgggccgggcacggtggctaacgcctgtgatcccagcactttgagatgctgaggcaggtggatcacgaggtcaggagatcgagaccatcctggataacacggagaaaccccgtctctactaaaaatacaaaaaaattagccgggcgtgggggcgggcatctgtagtcccaattactcgggaggctgcagcaggagaatggcatgaacccgggaggcggatcttgcattgagccaagatcacgccactgcactccagcctgggcgacagaatgagactccatctcaaaaaaaaaaaggaacccanggatatagaataaaccaggagtgtagattggggcatggaggccttcaaatgggatggttctcagtgtccagaagaaaaaacaattttagaagagacccaattcagaaaacaaaggtggggctgaata

SEQ ID NO: 655136 - DNA, 607 bp, Homo sapiens
  misc_feature (523)..(523): n is a, c, g, or t
  misc_feature (544)..(544): n is a, c, g, or t
tatagacatttgtagctataaatttttatctcagcactgatttacttcatcccttaagttctgctatattgtgttttcccttttttaaatctaaaagtatattctgatttttctggtgatttctcttttatctcttggttatttaagagtttgttgtttaatttccacatatatgtgaatttcccaggtttccttctgttattgacttcttttcttatttttgagagacaagatctcactttatctcccaggctggagtgcagtgcagtgatcgcagctcactgcagccttgacctcccacctcagcctcctgagtagctgagactacaggcatgagccaccaagcctggctaaatttttaaaaattttgttgtagagacagggtccgactatgttgccaggctgtgtggaactctgggctcaagtgacctgcacttttccttccgtgctgggattacgcatgagctaccatacctggcctgtactgattcttattcactccattatggctaacatagaatgnatgattctcgcttttatatgnattgaaggtattttaattggcataccgaatttctgtccagagtgtgaagtatttctgctcttg

SEQ ID NO: 655137 - DNA, 109 bp, Homo sapiens
tcggacctctcctcttcctctttcttgtatgtctggaaaagcacattgccagatccatggctgcagagcacgtgcttgaagctattttaatctgctcctgaaattgata

SEQ ID NO: 655138 - DNA, 99 bp, Homo sapiens
cctcattatcatcactattattgctcccccctgtatcccctttactgggcaagtgcttgtcaagttttagttgttcaataaatttgttaataatgctga

SEQ ID NO: 655139 - DNA, 423 bp, Homo sapiens
  misc_feature (10)..(10): n is a, c, g, or t
  misc_feature (36)..(36): n is a, c, g, or t
  misc_feature (379)..(379): n is a, c, g, or t
  misc_feature (382)..(382): n is a, c, g, or t
gatttaatantaaattgccatgtgttaatttcaaancccgtccttacccagcaatccctatgaggtagcctaatgatattattcctctccctaatagttggagaggttgaagcattaagaaattaaaaaggccccggtgtggtggccttacaccctgtaatccccagcactttgggaggcccaaggtgggaggattacttgcccagaagtttgagacccagcccgggaaaacaggcaagacaccgtctctacaaaaatttttttaaaaaattagctgggcatggtgacacaccagtagtcccagctactcaggaggctgagacaggagaattgcttgagcccaggagtttgaagctgcagtgagctatgttcacaccanctnctccggcctgggcaacagagcaagaccttgaaaacaagaac

SEQ ID NO: 655140 - DNA, 367 bp, Homo sapiens
aagacagagtgttgctcttgtcccccaggctggagtgcaatggtgcaatctcagctcactgcaacctctgtctcccaggttccagtgattctcttgcctcagcctaccaagtagctgggattacaatagcctgccaccacacccagctaatttttgtacttttagtagagacggggtttcaccatgttggccaggctggtctcaaactcctgacctcaggtgatctgcccacgttggccccaaaagttctgggattacaggcatgagccactgcacccagccaagagtcagtctttctaactgatgaggccgcacattagttagcaacttctattacaatatgtgttattattcgatttccagatgc

SEQ ID NO: 655141 - DNA, 93 bp, Homo sapiens
tctgaagacacggccgtgtattattgtgcgattagaggtcgccagcaactcggcgggaactactactacgccatggacgtctggggccaaggg

SEQ ID NO: 655142 - DNA, 378 bp, Homo sapiens
actcacccagcttcctttcaccagccaacacaaatcacatggcaacgcaacttccaggactgcactgtcatctactgtgtgcctggaagaacaagagatggactgttagagaggggcccttatgagttccataagtatattctattctgccatgacctctaatttcctaaaccattttcctaccaatggatatctgggccacgagcaatgactttactactttatgtatgacttacaaaccatgtgctaaaaattacttcaactgactacttacctacaacgcccagtcaggaagactttattcagacaccataaccggtagctactacagacccaccacaactacgggtctggcacgccacggaacaaacgactcga

SEQ ID NO: 655143 - DNA, 264 bp, Homo sapiens
agccattggatctgtcaacgggccgccctgcctggggttgttaccgccgagattaacggatgctcgtccataaagaaacttaacgttgtgcctgcctcggtgtctatggtgtatacataggacttaggactgaatctcccgccctggtctgtttccgctctggtgtcctgtcctggggtgcatctcaagaaaccaggttcttggccgggcaaggtggctcgcgcctatggcccccgccctctgaacgccgaatggggaggatcg

SEQ ID NO: 655144 - DNA, 175 bp, Homo sapiens
tagaggatccctctcgcttagtgtcccgatgggctgtgggtctatgtggactgctgcccggcttgccgcgctcctgctggtgagtgcccagacatcctgccaaagtgtctgagcgagcacgagtgttggggacgacgtgaccactctggccacacggtgaccgatggacagatgg

SEQ ID NO: 655145 - DNA, 825 bp, Homo sapiens
  misc_feature (55)..(55): n is a, c, g, or t
  misc_feature (173)..(173): n is a, c, g, or t
  misc_feature (450)..(450): n is a, c, g, or t
  misc_feature (463)..(463): n is a, c, g, or t
  misc_feature (752)..(752): n is a, c, g, or t
agtgaatatcatacaagatgtagatctgatgagaggcaggacgacagtgaggggntccgtgttcctgcgagctcatgaatgtccagtcatatagagtggctcgcgttgatcctcgaagagtgtgtactagtatctaatggacggatctaactaggagtgaacgcgagacgacngtgatcactgtcttcaagtacactgcgattaccacatggtctgcgtagtcttgtgaagtaggctcagtaatttagcatgatgtgcaagcaaggtaggagtatatgcaagcaagctaacagtatggttctaacaatatacagtcatgtatgatgcgacagagctacgcatcatacgcgtctgggttgtgggctgagagctagttatgggttcgtagatgtgatacgagtttggagagtttattctgtagactagtcatttaggtattccacatcgttntccgatatgtcantagggtatattcaatgcataagtgtattgacaagggtttcgtggatataatcatgcttctactaaaaattaacgatgacataggagtcaagacacatgtagtgatgatggttaatgcacttctaagagtaggactatcgttcgtgtggtgtggtccgcattacttagtagacagatagtgaagtcgccgaaagttaatttggcatatattgagcctattattcgattggatagtacttagtagcgtctagttcgtatgagacgctaggatatgtactaagatagggcgntggggaaattatacttcggatcctcaagtttgcacgaatgagctggggtcgcggacatagtattgtttattca

SEQ ID NO: 655146 - DNA, 116 bp, Homo sapiens
ggacaggggccttcgagattgagatcaatggacagcatggtgttctccaagctggagaatggagggtttccttatgagaaagacctcatggaagccatccgaagagccagcaatgg

SEQ ID NO: 655147 - DNA, 914 bp, Homo sapiens
  misc_feature (3)..(3): n is a, c, g, or t
  misc_feature (100)..(100): n is a, c, g, or t
  misc_feature (102)..(102): n is a, c, g, or t
  misc_feature (125)..(125): n is a, c, g, or t
  misc_feature (140)..(140): n is a, c, g, or t
  misc_feature (151)..(151): n is a, c, g, or t
  misc_feature (167)..(167): n is a, c, g, or t
  misc_feature (177)..(177): n is a, c, g, or t
  misc_feature (184)..(184): n is a, c, g, or t
  misc_feature (191)..(191): n is a, c, g, or t
  misc_feature (193)..(193): n is a, c, g, or t
  misc_feature (208)..(208): n is a, c, g, or t
  misc_feature (210)..(210): n is a, c, g, or t
  misc_feature (220)..(220): n is a, c, g, or t
  misc_feature (223)..(223): n is a, c, g, or t
  misc_feature (227)..(227): n is a, c, g, or t
  misc_feature (235)..(235): n is a, c, g, or t
  misc_feature (238)..(238): n is a, c, g, or t
  misc_feature (258)..(258): n is a, c, g, or t
  misc_feature (260)..(260): n is a, c, g, or t
  misc_feature (273)..(273): n is a, c, g, or t
  misc_feature (282)..(282): n is a, c, g, or t
  misc_feature (304)..(304): n is a, c, g, or t
  misc_feature (316)..(316): n is a, c, g, or t
  misc_feature (320)..(320): n is a, c, g, or t
  misc_feature (324)..(324): n is a, c, g, or t
  misc_feature (326)..(327): n is a, c, g, or t
  misc_feature (339)..(339): n is a, c, g, or t
  misc_feature (341)..(341): n is a, c, g, or t
  misc_feature (352)..(352): n is a, c, g, or t
  misc_feature (366)..(366): n is a, c, g, or t
  misc_feature (368)..(368): n is a, c, g, or t
  misc_feature (370)..(370): n is a, c, g, or t
  misc_feature (372)..(372): n is a, c, g, or t
  misc_feature (386)..(386): n is a, c, g, or t
  misc_feature (407)..(407): n is a, c, g, or t
  misc_feature (412)..(412): n is a, c, g, or t
  misc_feature (419)..(419): n is a, c, g, or t
  misc_feature (423)..(423): n is a, c, g, or t
  misc_feature (428)..(428): n is a, c, g, or t
  misc_feature (445)..(446): n is a, c, g, or t
  misc_feature (541)..(541): n is a, c, g, or t
  misc_feature (550)..(550): n is a, c, g, or t
  misc_feature (611)..(611): n is a, c, g, or t
  misc_feature (811)..(811): n is a, c, g, or t
  misc_feature (825)..(825): n is a, c, g, or t
  misc_feature (909)..(909): n is a, c, g, or t
ggngttgggatcttaatataatatttggggggtactaactattctttattgctgtaactgttaaaagtttaattcctgagatttttggagtcggtaaaantncttaaagtgagcagaggaaaganatgtctttcccaganaggaggctganctgtgaatcaacagtntcaatcagtnactttcngtcattntnccatacagcagtctncntctggcatangtntacnctgtagtntantccttgactgcccccaaaananactactctaagangctcttggnagttctgaaatgttcagttganagatggtatatnagtnaaantnnttattgtgaaananttgtgattgtnaagtggctttggtntntngnagtatgagcttgtntgtgagtgtgttagatctggnttggnttagatnacanttcangtgtctgctttaaaatnntgaactgaagaacattaatatttatgaagcacagatataaatacactttctgaaagggagaatattgaatattccttgaaaatgatttgtgttgntcatttttnagactatcaagattacaacctagcctttggtccacatcacatttttaatagttcataactntttatccatatacttaactaaaaatttagaaaacgtttatcaccaagtgcatgaaggaaaacttcaaactgtaacatttcatttaaaagctatattcaaatgaagataggatctgaatataagctatttgtgcttattttcagctatggctaacacataagctgttcattgggtttttgcttgaaatggagttgtatcanagtcttggaaatgnaattccctttagaagttgtgatcttcataatagcaccatttaaagcatcatcttcaatgagtgttattaaatccattggcaatnaatgg

SEQ ID NO: 655148 - DNA, 920 bp, Homo sapiens
tgctgttactggtccggaattttaggcatgttgtggtcctctctcggctcctcgcggatcgcggtggacgacgtgttcctgggacaccgtgcttgcttgagccgttctggggctcagtgcgttctctgctgcgctcccgtgttcgctggacgggaagaagggctgggccgtcccgtccctgtccccatcgtgaaccccaatgtctgctgccgcttgatcctgtccgcattggctgatgagtgatgctgctgtgactgcatgctggcctggtggcgcccctgccctggatctgctgcctggagaagggtccgaacggctacgggcttccacctgcactggggagaagggcaagttgggccagtacatccggctggtgtgagcccggctcgccggccgagaagggcggggcatgctggcggggtgaccggctggtggaggtgaacgggtgaaaacgtggagaaggagacccacgcagacagggtggtgagccgcatccgcgccgagactcaacgccgtgcgacctgctggtggtcgagccctgagaccggacgagcagctgacagaagctcggcgtccaggtccgaagaggagctgctgcgcgccccaggaaagcgccggggcagagccgaggcagaccgtgccggccgccgaggttgcacgaggggcttggccaccggaacaattgagcctcggcgaaggccgacgaggaggccacctcggcagcagagcgaggcttcgggagtcgggatctggaccaatggacagaatgggaccgcaagatggcatatgggcctacgaccctgcacaagagaacaagacccaagccccgggccagtacgatcggggcagagagaccacaaaaaccacgggaagagggcttccgggctccagggccgaggagcagcattgaggacggagaa

SEQ ID NO: 655149 - DNA, 905 bp, Homo sapiens
gctcaggtccgcgtgctctccggaccaccccacttccatttgggccaaaccaaccgcacccctgaaatttctccgcaaatgtcctggcgggaaggatcccaggcattgagagggtgatgatggattctgtgtgtttgagagcaacgcctattgcctactatgtgagcaatgaggagctgctggggaagtactaccacgaggcagcagaccctaaggtggtgcagtgtgaggtttgagcttcgctgattccgatatagtgcccccagacccagtacctgggtgttccctctaccttgtggctatcatgcaccacaagaaataggccacgtgaggtaatgcaataggaggacgtgaggcgaattctggggctgctggatgcgttacttgaagacgaggacttttctggtgggcagaacgagtgacatcgggtgacatcacagtgtgtcgtagcaccctgtcgtggctctataagcaggttctagagccttctttccgccaggccttcgccaataccaaccgtctggttacctcacctgcataaagccagccccagttccgggctgtctatgggggaagtgagactgtgtgagaagatggcccagtttgatgctaaccaagtttgagaaacccaacctaaaaaggacacaccaccggcaccagagaagggtgcacgggaagagagcagaagcccaggctgagcggaggaggagaaaaggcgggtgccctggtctgcaggaggagatggtgatgtgaccagggctggtgtgagcccagggcatgaccctcggtcactggcagatactttgtgtggcgaaatagcgcactgtccagggaaccgtggggggcgatcggggacggaaagcggggccccggcccgaaagctaaaaaccccacgaggacgagcg

SEQ ID NO: 655150 - DNA, 1095 bp, Homo sapiens
  misc_feature (351)..(351): n is a, c, g, or t
atgagccacctgtttcacatggcctatcatatagttaaaatccaggcccatgacccgctaatagggggccctctcagccctcctaatgacctccggcctagccatgtgatttgcacttccactccataacgctctctcatagtagagccatagataagacagatagcagctgaagccatatagccaatgagtggcgcgatgtaccacggaagattagctcaatactcataggggtcatcctatgacacccatccatgttcctatacacaaggtcctttcgactaacgagaggagtagaatcctcaattttgattttagccgtctatggaacgttgtgtttgtctcttacgnctgagtatgtattatcctgaggactctgtattaatcagatcactacctcattagtcctgctaaacccgcacacaaagtgtattaggagtgggcaccgataggggctcaccatagtatagtgtacctacaactcccagcctatataggtcacacccgtaatatcctgttgcgcatcctccctatatactaccacttcctggtactccacccacttctgcagtaaccagagactgtacatcattcatcaaaccttgcacgtttgatcacattaattcttcttgtaccttcaaggacacccaaacgaaatccccggagccctcaccagcaactttaattgaacttttccacgagcgttgaccatttattttgagcttgacctttgtttatcacctggaggctacatgcatactctggaaaactctctatcacattattatacgcctccttacagaaagaggtaccatctacgcgtttttaactaccctttcccacactagtgagcgcgcaatggggcgaatcattgagacgtgagactcgaaggcgaaatagtcttttgaggttaatcacaaccaatgccactctcaccaattgggtgatcttccaccaccggttgcgatgggattcggcggttttcaaattgtgtttaggcttgttccaccataattcctggactatatcattctcgcgccaaaaattaagagtaattctaccactgtttgtagcaatacaccaaattgcattcca

SEQ ID NO: 655151 - DNA, 123 bp, Homo sapiens
gggggggggcccccccttttttttttgggccttcccccctttggggggggggttttaaggggggggggggggggggccgttttttttatttttcccccccaaaattgggccccctttttggga

SEQ ID NO: 655152 - DNA, 470 bp, Homo sapiens
agcggagcgtcctcctgtgcaaggcggtaggggcccgtggagtgggcaagtctgccttcctgcaggcctttttcggccgcggcctggggcaccaggacactagggagcagcctcccgggtacgccatcgacacggtgcaggtcaatggacaggagaagcccttgatcctctgtgaggtgggcacaaatggtctgctggccacatagatggacgccacctgtgacgctactctgcttgatgtttgatggcaaggacccaaagtcctttgcacattgtgccagcgtctacaagcaccattacatggacgggcaaaccccctgcctctatgtctgctccaaagccgacctgcccaaaagtgtcgcggtgtttggaccatcaccggacgaatttttccgcaagcaccggcttacccgttccgggccgattccctgtgctgggccatccgggcccagcaccaaccattttttaac

SEQ ID NO: 655153 - DNA, 652 bp, Homo sapiens
cttgatccaggaatgctatccttacccctatcccataccctgtacttactggacaaagccaatttactgagcacaaccgccttcaaccagatcagctgcacggccaagatgatcctgtctgctttctggcaatgcccttggctcaggaccggctcctttatgatgaatagatgccaaggatcttggagcgagacagtggtggtgcagacgcgtggcgcacggatggagcgtgtcttccatttgccttagatgtttcgaacgggaataccacagacctggactctaacgatggatgtcaaagaatttgagcgctggcgtggacatcacgagccagactcctcgtatcgagcattatggatagtctcccagtgatcaaaaagagactggttgtggaatcctgttggccctagttggtttcaagcctagagtacattcagagaagtttcttaagtcgtctatactttggcattggtagcttggtgtgagccggatgacccctctgaatcctagaaacccctcttgcctctcttaccacgtgaaggagggccttgggccctcgtggagcctctgtgtccgttttggcctgctgctctcgctagactaataaacgagccccttggcggtcgcaagcttaatcacgcctataaagggg

SEQ ID NO: 655154 - DNA, 426 bp, Homo sapiens
cgagaaacgggacttgtaaaacacttcctgcactatctaccaagagactctgtcagatcacacagggtgagggctcagtccccatgagtgccccttctaacccccattagttgcaactatggccctccaaaagttctaactgaccaccttcaatttggggttcccatggctccctttttaggtccaattaatttgctgaggtggtttacctaagggagatgcttctgttaactggtttattataacacattttgcaaaggatccagttaaaggaaatcttggggccaaggaatggggaaaggtccccatttgtttgaaagctttctggccccatttttctggggtttttatggagggtttctgaccccaactttctgcccctaagagtattaaagctgccctctttttggggagggttcaccatcc

SEQ ID NO: 655155 - DNA, 403 bp, Homo sapiens
cgttatagcaccgtggtatgatccttctatgactaattgttgaaagtttttgatcatgaagggatgtagaattttatcaataatttttctgcatctattgaggtgatcatatggtgtcttagtccattttgtgttcttaaaaaggaatacccgaggctgggtaatttattttttaagaaaaggtttccctggctcctgattctgatgcctcaaaaagttcaagactgggcatcttcatctggtgagggcattaggctgcttccactcacggtggaaagcaaagggaagccaacttgtgcagagatcacatagagagagaggaagcaacagagaggtggggaggtgccaggctctttttaacaagcagcactcacaggcactaatagagtgagaactcactgat

SEQ ID NO: 655156 - DNA, 1026 bp, Homo sapiens
atgacggatgtgtgtgcaagcagagctatatggaggccttgcaggagttcggacccatcagctatgtggtggtaatgcctaaaaagagacaagcactggtggagttagaatgatgtgttgggggcttgcaacagcagtgaactacgcagccgacaaccgaaatatacattgctggtcacccaggctatatgtacaatctcactcgtaaccagttatcagaagatcatcccgaccctggggactcggatgactcccggagcgtgaacagtgtgcttcactttaccatcctgaaccccatttatatcaatacaccacggatagtactatataacactactctgtaatccttagtggaccctgtccagagaattgtcatttcccaggcaagaatggacgttcaggcgcatcggtggccatcttgacctcagtttccaaagatgccgcagcgaggacccaagggcctcatcttcaaataggggactagatcatctaattctaggcctgtatgcacatactgcacagatcgacatacgccaacagcctaccaccgcttgaactgtgtacaacgacatgactcacggcatactttaggcaactaacaccaaaaccccgacattctccagatggaacaagtgtagacccctttggcagacaacacccccagacaacaccgccagcaggcagcaccaccttctcgcttcggcaagaatcaagacccggcacgacctcattggaacggccccacactgcaggcgtacccatcaagaccactcaaccataggaatcaacgggcactacagggagcgacaaacacgaacagctataacaagtacgacgaaggtaaagccaaaggacacagagaccaagacgcagacagcgcgagagcaacacgaccagggcccaccgcacgcaaccactgaggtacgagaacgcacaaggcacagaaccgcccagcaccgtcgacacgcacacagcacgtcagcaagccacggaccaacaccagcaacccacagcgcagcgaagccc

SEQ ID NO: 655157 - DNA, 310 bp, Homo sapiens
caaagacatggggctacatagcgtgaccaaggacatggtagtcaccatagtgctagcacatcaaggcagctaggaccataggtgaccataggtaccagattcctacgttacccaagcagggacctgagtggacataaagatgggcggctgatgtctcaagggcaaactatatctgtaaatgtctaaggacaccagaaacctcatataactccgaggagggatagctcaagaataacaaattaagttttccacccgtccagtggcatgcgaacacacagtaagaaatccggttgagagacctgctaccgta

SEQ ID NO: 655158 - DNA, 703 bp, Homo sapiens
cgaaaaatactcccgaagctgccaacctctcccaaggaagaaaacttccaaggcgggttcagccttggtagaaataaggctgtccgtacctggcaacacctttggacagacacagttttttttcaaggaaaaacaagcatctcagtgcccgaccgtcatggaacctagaagctaaaagcccgcctccagaacccttataaaacaaaccgtgatctgggcgtagattaacacacggctccaaactgcgccagtgtaatcacagttccaagttcaccaaggtgaaggaagaacccaaatcagtacaagctaattcgttcccttagcagtgctatccacatacaccccacaggtggcatatggatagttgatcatcaggtgtctgttataataaaataagcataatatgagtcttgtaaggatctagataaagacaatcgttgaatataggctaagctcttacagtttgagtatgaaagaaattctggtccaagggcagaatgttaggtattcagggttcagaacacagagagatcccctttatcagaaagcgtttatcatcaggctcaactagaacctagggtagatgcactacaagaaaatggtggccgtctgtatacaccctaatccacggaagtaagttgtacaaatctcttgagacttttgcaattgtctatttaaactagagtaaaagcaagatcctgca

SEQ ID NO: 655159 - DNA, 295 bp, Homo sapiens
ccccccccccttttttttcccccctttttaaacccgggggcggttcccccccccgggttttttcctggggccgggggggggttctctttttcccccgggacccccttttcccctttggccctttttgggggcccctttaaccctttttttctcaaaaaacgggggggggcccggcccggtttttcccgggtttttttcccccccggccccgttttcccttgggggggggggggggcccccggggtttcctttcccctttttttggccccctttttttaaggggccccccctttta

SEQ ID NO: 655160 - DNA, 207 bp, Homo sapiens
ggcctcctcggcttctttttttccctccccccccttaccccaagctgctccattccttaaggaagggctctctctccctccccaagtagggcggacggcggggcgcgttcagaaaacgtacaccgaagatgtccagggataggcaaaggtccgatgatgagagccaccagacaccagcaagggggagtacagatgaggaccagcgag

SEQ ID NO: 655161 - DNA, 462 bp, Homo sapiens
  misc_feature (455)..(455): n is a, c, g, or t
tgttcctccaaaggccctcaaggaccccccccaagagcagaaaagaccagaaaaaccatttaacccagtggaatatctcttttgatgagattgtcaacattggctcgacagatgcgggccccggtccttagccagagaactcttctggaaccattaaagagatcctgggggctgcccagtcagtgggctgtaatgttgatggccgccatcctcatgacatcatcgatgacatcaacagtggtgctgtggaatgcccaaccgtaagtgacattttcattgttacagtaggggtgaaaggggggccgcccagtgtattcacaaagataagctgggaagttttggaaatggttactggtggggtgggataatccctttaaaccttttactgattttttttttctttcccccagagttaagcccaaaggaaaacctttccataaagggtcctttggccnctggtga

SEQ ID NO: 655162 - DNA, 808 bp, Homo sapiens
ggctagcttgtctcttctgtcaaacccacatcgcctttggcacgagtgaagtgggtaacctttatttgcccttctttttctctttagcctcgaggttataccaggggtgtgtctcgtcgagatgcacacaagagtgaggttgctcattcggtctcaaagatctgggagagagaaacatcgtcaaagccttggtgtcgattgcctttgctcagtatcttcagcagtgtccatttgacagatcatgtcaagattagtgaatgaacgtaactgaatttgcaacaaaccatgtgttgctgactgagtcagctgaacacattgtgacgaattcacttcataccctttttggagaccaattatgcacagttgcaactcttcgtgaagactatggtgacaatggctgactgctgtgacacaaacatgaacctgagagagtatgaatgcttcttgcaacgacaaagatgagcaacccaaatctcccccgatgggtgagaccagaggtcgatgtcatgtgcactggattctcatgaccacatgaagagacattgcgcaaagatacttatatgaacttgccagaacacatccttacgttttatgccgcggaaactcctttactattgcctcacaaggcataaacgcttgcgtttagagcagcactgtttgcaacgcattgttgatcacaggctggccttacctgttggcccaaaagctcgacatgaaacttcacggactgcacggggaagggctacggacgtgggcaaaacaggacaactcaagtggtgcccccctccacaacattggaccaagaact

SEQ ID NO: 655163 - DNA, 630 bp, Homo sapiens
cagcttacactgaggcgcttggaaaccaccgtcaatatggaccgcactgggaaacacagatgaacaaagtcaacaccgctttgtccttcaacaaaaacaaaaaaaaaaaaaaaaaaaaaaaaaaaaaaaaaaaaaaccacaaaaaacaaaaaaaaaacagagaaaacaacaacacaacactcacaccaaaccacacagcgcgcgcgcacaaccccccactttatactacactcagacgcaaccgcgccaccctcaccaacaaacaacaacaacatcaccaccctccacactcccccctcacaccacactcatacaactaatcacctcctccacccactcccctctctcactcctcacaccacaacatcactctcccaactcatcaaaaacaccaaccgccaaccacatcaccacccaccctcaataaccacatccctacctaaaaccaatccactacatctccccccaccatctcaacccacaccccgcaaccaacacaacataacacccttcactccaacgcaccacctataccaataatcatactcaaaactactaacctctctatctactccctgccacaaacccaccacaatcacacaaacacaacaatacccactatctcaccta

SEQ ID NO: 655164 - DNA, 883 bp, Homo sapiens
  misc_feature (7)..(7): n is a, c, g, or t
  misc_feature (65)..(65): n is a, c, g, or t
  misc_feature (78)..(78): n is a, c, g, or t
  misc_feature (92)..(92): n is a, c, g, or t
  misc_feature (133)..(133): n is a, c, g, or t
  misc_feature (141)..(141): n is a, c, g, or t
  misc_feature (154)..(154): n is a, c, g, or t
  misc_feature (163)..(163): n is a, c, g, or t
  misc_feature (188)..(188): n is a, c, g, or t
  misc_feature (192)..(192): n is a, c, g, or t
  misc_feature (202)..(203): n is a, c, g, or t
  misc_feature (222)..(222): n is a, c, g, or t
  misc_feature (226)..(228): n is a, c, g, or t
  misc_feature (258)..(258): n is a, c, g, or t
  misc_feature (272)..(272): n is a, c, g, or t
  misc_feature (305)..(305): n is a, c, g, or t
  misc_feature (353)..(353): n is a, c, g, or t
  misc_feature (357)..(357): n is a, c, g, or t
  misc_feature (504)..(504): n is a, c, g, or t
  misc_feature (548)..(548): n is a, c, g, or t
  misc_feature (558)..(558): n is a, c, g, or t
  misc_feature (664)..(664): n is a, c, g, or t
aaaattnaaaaacaattgtttcattaaaaaatattgattttaaaaactaattaatttattaattnctacacgcaaaanataataattaaatnttgtccacaaaacattctcctttccttctgaaggttttttnttgctttntttttattaaccngttttttantactaaacttaaatggccaattganacanacagttctgnnaccgttcttccaccactgntttnnngtggggtggcaggtattagggataatattnatttagccttctgngctttctgggcagacttggtgaccttgccagcnccagcagccttcttgtccactgctttgatgacacccaccgcaactgtntgtntcatatcacgaacagcaaagcgacccaaaggtggatagtctgagaagctctcaacacacatgggcttgccaggaaccatatcaacaatggcagcatcaccagacttcaagaatttagggccatcttccagctttttaccagaacggngatcaatcttttccttcagctcagcaaacttgcatgcaatgtgngcggtgtggnaatccaatacaggggcatagccggcgcttatttggcctggatggttcaggataatcacctgagcggtgaagccagcggcttccattggtgggtcatttttgctgtnaccagcaacgttgccacgacgaacatccttgacagacacattcttgacattgaagcccacattgtccccaggaagagcttcactcaaagcttcatggtgcatttcgacagattttacttccgttgtaacgttgactggagcaaaggtgaccaccataccgggtttgagaacaccagtttccactcggccaacaggaacagtaccaataccaccaatttt

SEQ ID NO: 655165 - DNA, 577 bp, Homo sapiens
  misc_feature (83)..(83): n is a, c, g, or t
  misc_feature (119)..(119): n is a, c, g, or t
  misc_feature (162)..(162): n is a, c, g, or t
  misc_feature (179)..(179): n is a, c, g, or t
  misc_feature (283)..(283): n is a, c, g, or t
ctgccccttaagttgttgacggaaaactgttttgacacgccaaaactggatgggtggggattggggtgtgttgttctacaaanaatgttggtggcgaagtccccattttcccagggatnataggagagggttttggacagcatgtcaacggagaaggtttgntacccccgcttcctgtnggcggaagccatcggcatcatgagaaggctgcttcggaggaacccagaacggaggctgggatctaagcgagagagatgcagaagatgtgaagaaacagcccttnttcaggactttgggctgggaagccctgttggcccggggcctgccaccgccctttgtgcccacgctgtccggccgcaccgacgtcagcaacttcgacgaggagttcaccggggaggcccccacactgagcccgccccgcgacgggcggccccttacagccgcggagcaggcagcctttttggactttgactttgtggccgggggctgctagccccctcccctgcccctgcccctgcccctgcccgagagcttttagtttttaaaaaggcctttgggatttgccggaaaaaaaaaa

SEQ ID NO: 655166 - DNA, 212 bp, Homo sapiens
  misc_feature (27)..(27): n is a, c, g, or t
  misc_feature (34)..(34): n is a, c, g, or t
  misc_feature (59)..(59): n is a, c, g, or t
  misc_feature (129)..(129): n is a, c, g, or t
aagactctgtctctacaaaaagttttnaaaaatnagcctagcatggtggtgtgcacctntggtctcagtctcctgagtagctgggattagaggtgcacgccaccatgcccggctaatttttgtattttnagtagagacggggtttcaccatgttggtcaggctggtctgaaactcctgacctcgtgatccaccggcctcggcctcccaaagt

SEQ ID NO: 655167 - DNA, 154 bp, Homo sapiens
agactcctgaagctggacgggacgcaacacttaaatctgcggacagggcgcgcgagccgctcgtgttcttgtcgtagttgttgagccagccatcttcaaagtccatgttgtaggcgttgttggcggagcgctgcgacctgtcgagctatctaca

SEQ ID NO: 655168 - DNA, 179 bp, Homo sapiens
agaggatcccccgtccgtcgaccgcttgctggacagtgtttgtgccacagtgtccagtaccaacctgaagatgcttcttgagcatctcgtcacttatccctaggtgcctctggcaggccccagtgttacagaagcagccggttcgcacatggatgttgtgaagaagcggtcgacggacg

SEQ ID NO: 655169 - DNA, 579 bp, Homo sapiens
  misc_feature (245)..(245): n is a, c, g, or t
  misc_feature (250)..(250): n is a, c, g, or t
  misc_feature (252)..(252): n is a, c, g, or t
  misc_feature (254)..(254): n is a, c, g, or t
  misc_feature (256)..(257): n is a, c, g, or t
  misc_feature (262)..(262): n is a, c, g, or t
  misc_feature (297)..(297): n is a, c, g, or t
  misc_feature (310)..(311): n is a, c, g, or t
  misc_feature (313)..(314): n is a, c, g, or t
  misc_feature (319)..(319): n is a, c, g, or t
  misc_feature (328)..(328): n is a, c, g, or t
  misc_feature (339)..(340): n is a, c, g, or t
  misc_feature (345)..(345): n is a, c, g, or t
  misc_feature (365)..(366): n is a, c, g, or t
  misc_feature (369)..(369): n is a, c, g, or t
  misc_feature (371)..(371): n is a, c, g, or t
  misc_feature (374)..(377): n is a, c, g, or t
  misc_feature (379)..(380): n is a, c, g, or t
  misc_feature (387)..(388): n is a, c, g, or t
  misc_feature (400)..(400): n is a, c, g, or t
  misc_feature (406)..(406): n is a, c, g, or t
  misc_feature (417)..(417): n is a, c, g, or t
  misc_feature (441)..(441): n is a, c, g, or t
  misc_feature (445)..(445): n is a, c, g, or t
  misc_feature (447)..(448): n is a, c, g, or t
  misc_feature (456)..(456): n is a, c, g, or t
  misc_feature (462)..(462): n is a, c, g, or t
ggggtggcaacccccacctgtggccttatatccctccctctccactcccctggccctagagcctgtgcccctctggccccatctcacatgactgtgaagggggtgtggcatggcacgggggctcatgaaggcacccccattcccaccctgtgccttccttgcgggcagagagggagagaagggctccccagatctacacccctccctcctgcatctcccctggagtgttcacttgcaagctgccnaagcngncnanncctgnacacccacctccccagacacaactcccttccccangcacacatctgcnngnngctgncccctcagncccttcctacnncccancacgcgcctactatccccannggnanctnnnncnnacccacnncgcaccccctgnactgcnttacagcatantctcatctctggccccgaggctgnctgngnngcgagtgnagcctnccatcactgagacagagcacagaccacgagtgcctttaccggacctggacgttgcctccagagcacgcaccagctctgtccctctctagacagagatatatttgtggttctgcggcg

SEQ ID NO: 655170 - DNA, 214 bp, Homo sapiens
  misc_feature (24)..(24): n is a, c, g, or t
ctaggtcccatttccaacatgggngattacaatttgacatgagatttagagaggacacctatccaaattatatcacattgaaaatatatacatcatgtactatgccgagttaaacattacacgcacacacacacacacacacatccttgttcatgaagatagtatttgatgctgtgacaaagagaaagagaaagagagaaagcaggcacaggtg

SEQ ID NO: 655171 - DNA, 575 bp, Homo sapiens
  misc_feature (413)..(413): n is a, c, g, or t
  misc_feature (437)..(437): n is a, c, g, or t
  misc_feature (441)..(441): n is a, c, g, or t
  misc_feature (443)..(444): n is a, c, g, or t
  misc_feature (452)..(452): n is a, c, g, or t
  misc_feature (458)..(458): n is a, c, g, or t
ggggtggcaacccccacctgtggccttatatccctccctctccactcccctggccctagagcctgtgcccctctggccccatctcacatgactgtgaagggggtgtggcatggcacgggggctcatgaaggcacccccattcccaccctgtgccttccttgcgggcagagagggagagaagggctccccagatctacacccctccctcctgcatctcccctggagtgttcacttgcaagctggccatgatggcctctggatggtccgtggaactccttgaacgtttagaccctgcacacatctggaaggagctggcccctcagtgccttcctacttcgcaacaaggggctcactatcctcgaaggagctgttgaggacccacgacgcaggccctgtactggattaccgcatantctcatctctggccccgaggctgnctgngnngcgagtgnagcctnccatcactgagacagagcacagaccacgagtgcctttaccggacctggacgttgcctccagagcacgcaccagctctgtccctctctagacagagatatatttgtggttctgcggcg

SEQ ID NO: 655172 - DNA, 1214 bp, Homo sapiens
  misc_feature (528)..(528): n is a, c, g, or t
gccagcactgagttctgcccgggagaagccgacccctcccgcaatgcccgccccgaccgtgcgcctcctgccatgctgcacgcggccgccctcccgccctgtccgctctctgggccaagctgctgtgcggtgcctgtcttcttgcgcctggccattcgatggcctgacgtgtgcattgctacactgtgatgctctgcctgtgcctgctcatgcattgtcctgccctgtgcagccgggttgtgtggcctgtggggcggcctccggtgcaggcgaatggagctccgacggtgcttggtcgctacgttgctgcgccgctgctgagccgctcgttgccatggagcatcgtcacctgtcacgctctgttggcctgtcggatgatgggcgatcgcgtggctacctgggagcgcgtgctgtttggcggtcctgtgcgtgcgcctagggcgagtgcggtctgggaagctgctcggctcgaccgggtctgtggcactactgtaacgaccttcttttgggcgcgcgctttggactganttgcgactcgcctgtggccccgcaaggcagctaggccagcgctctcggagcctgctagtccggctccttgcttgcaccattctcgtgcgagttgcgttgctgtgctgcccgagcgccgccttggatgctgaaagggtgcgccgcggcccggcaggttgtgcgaattgcccattgccaaccatcctggtggacccatgcgttcgaccaaagctgcctgcaacttaaccaattgggccgggacagatgcgctagtcttccattgaacacctctcacttaacgaggtggcttgaccaggcggtgcgcccgtggcctttgtggccccgtgtgtgcctcgtgcgtgttggccctttgggggccgtccttcccgctggtgcttgaacgtgtgcgaggggactggcactccttgcttcgggccgtcagtttgccccgtggccccggccttgcccaaggttttccgggcgcttcggggccacggaccagggggaagtcgctcgggtttgcgttcgttagcccgcctggccagacattttcccccgcgctgggccgttcctgtgaggttaatcttctccggtcacgcgaacgggggaggtttgccacggttcttaacttgctccccccctggtggtgtcctttcctctggcgcgtcgcaccggcccccttgggagacaccctttcgcttcacgcg

SEQ ID NO: 655173 - DNA, 128 bp, Homo sapiens
  misc_feature (110)..(110): n is a, c, g, or t
tgcctagaggatctccggtgcatgatgtaacacagtgcatataactattggtggctgatattttcagagcattctttattccaaacattatgttagcaaagtcctggtgngatctacaaagttcttat

SEQ ID NO: 655174 - DNA, 160 bp, Homo sapiens
atgctggctagtcatgtaaagaacaggaggatgtcagagtgggtccttgggcaacctctgtgactcagaagtcaaagagggctactcctagttttattgctatagccattatgattattaatgatgagtattgattggtagtattggttatggttcatat

SEQ ID NO: 655175 - DNA, 1763 bp, Homo sapiens
  misc_feature (619)..(619): n is a, c, g, or t
  misc_feature (845)..(845): n is a, c, g, or t
  misc_feature (1525)..(1525): n is a, c, g, or t
  misc_feature (1620)..(1620): n is a, c, g, or t
cttacagctgcgtgattgctgtcctcttttccatcgtctatggatatgtctctcttgtctctcctgctctgtggtcttctttttttctgactcctggtctctgtctgtgcgcttcgttgttgattcatcctactctggtaggtgatctgcgctggtgtgtcgctgctctcttcctctcgcggtcgcttttttatacacagcggtgttgattattcatcatctatctggttttctctgtgttcatctattccctcctctcttgtattgatgtggtttttcctctatccgtgcatatgtgaacaaccggggcccttctctttgggttatacacaattcgccgggggttgtccactggtgtgagttgaataatgggcgctgtggcccacacgtctccccttgattgtgtggggcctccgatgtatcctcctggcagcggtccctccttgtagattgtgtcctacgtgatgttctggtgaatcccctcttctagtgtttttattcccacgggggcccccctttctgttgaattggaaggtttgctacctcccactactgctttctattgttgtgtcctagcccacaccgccgcacaatgctgtgccaataggtgttaacatangctggtatctctcacagtgggcgattatccccacttcgcgctaagtaattgctctgatatgattggataatggccgcggtgcacacctccgggggggattgatgttctccccttcctctgagtcccttttctcatccacgggcccccgggaattctctccctgtgaacatgccccttgttgatatgtaaccttgtgtggttcccaaaccctaggggtacctcccangttttgtagcatatcctctcgcgccctacatcaccacattggggggccaccagacccagttttggaaccccctctctcccctcttcttggtggccacaccccctgtgaggcgtttccgctcatttggggggcttgtccctctattatgagggtaccaccccctcctctcggggccgctttgtgttttgtggccgctcttgtgcgccccccacacaatagggcgcagtctcccacagacagttgctgcttgtgtgtgtaaaggtgaatttctgttgctcgccccactgccgcgccaccaattggtctccccactgggtctcccccacaaggagcactcgtggccccaccccccttgttgggcccacacacacacacgcgcacccaaacaggacgcccacgatgtcttcctcctggtgcgccaaaaacacagggctataagcccctcgagaggccggagattatagtgggagccccaccgccccaagtggagccccaagtgtgtgaagcccccgcgtgagaggaggcttcttccaaacggcactctggccgccatggggcacagagagggcccccggaaaactccctctggaaccccagagagtgttgttgtgaaggagaggcacatctttgttgttgtgtgtgcccctgtgcacactgtcacaaagaacttgggtctccgnggctgtctcacaggagaggcgcggaagggggccacagcgcctgggacctccgctgtcggcttgtcgctcgtgccgctcctcgtgggcgcttctgnccctcgtggtcctctcgcgttcctccgttaaagcacagacaagaaagtccacgtaagtgtaatttctcccactgaaacgtttttgtctgtgtaccagtttttagaaccattaccaaggatctgtttgcttagctgtcccacca

SEQ ID NO: 655176 - DNA, 437 bp, Homo sapiens
tggacccccgccttcatcatacctaccatgaccttatttttctccctctgtttcttccaattgtagcacactttttaattaaatcagtaatatttacatgattatgactatgcaaattctattcactgctaagtcatatggtgttttcgctgtgcctctgcattatatgtccttcattccttctctgaaacagttctgaaatctgagcatttctgcactttttctgggtcatctctttttccctagcctatgttgctttacccagacaaatgcaataagtagccactggctggtctgtttgctttcacatccattattttttagcatgaagctaattttctgactatatttgtttgcctgttttctaacagctgttttcccttcaagtgttgtagcatttatcacatgcctttcaaagatactttccatctgctaaa

SEQ ID NO: 655177 - DNA, 312 bp, Homo sapiens
tggggcgttcatgcacaaaaaaaaaaaaaaaggggcctccctgtttaacaaccccgggggggggaattttttaaaaaaaaacattggcttctcccaaaattgggccgggaaataaaatcgttttttggaaacccctcccaggtttggcccttgggtttaaaaaggcggccgtttccaaagggcttcctttaaaagggggggccctttaaattggcggaaaagggaaatttttttttttttcaaagtttgggggtctttccttttggcgggctaaaatttggcaaagcccctggttttttttaaaaggttttt

SEQ ID NO: 655178 - DNA, 202 bp, Homo sapiens
  misc_feature (28)..(28): n is a, c, g, or t
  misc_feature (35)..(35): n is a, c, g, or t
  misc_feature (91)..(91): n is a, c, g, or t
  misc_feature (106)..(106): n is a, c, g, or t
  misc_feature (139)..(139): n is a, c, g, or t
  misc_feature (148)..(149): n is a, c, g, or t
  misc_feature (167)..(167): n is a, c, g, or t
  misc_feature (171)..(171): n is a, c, g, or t
  misc_feature (201)..(201): n is a, c, g, or t
ccccaacaggcatcaccccgactaaatnccctagnaagtccccactcctaaacacatccgtattactcgcatcaggagtatcaatcacctngagctcaccatagtnctaataggaaaacaacccgaaacccaataattnaaggacctnnttattacaattttacctngggnctctattttacccctcctacaaggcctcang

SEQ ID NO: 655179 - DNA, 681 bp, Homo sapiens
  misc_feature (271)..(271): n is a, c, g, or t
  misc_feature (318)..(318): n is a, c, g, or t
  misc_feature (321)..(321): n is a, c, g, or t
  misc_feature (336)..(336): n is a, c, g, or t
  misc_feature (346)..(346): n is a, c, g, or t
  misc_feature (348)..(349): n is a, c, g, or t
  misc_feature (363)..(363): n is a, c, g, or t
  misc_feature (366)..(366): n is a, c, g, or t
  misc_feature (368)..(369): n is a, c, g, or t
  misc_feature (374)..(374): n is a, c, g, or t
  misc_feature (378)..(379): n is a, c, g, or t
  misc_feature (401)..(402): n is a, c, g, or t
  misc_feature (413)..(413): n is a, c, g, or t
tctttggctttgagcactgatctccggactcacagccaggacaagctcttttctctgtctgtcttccaccactggcagatggtgcctggtgatcccctggactagatgcatgtcatccggccctaggagcgcttacagctcgagactcctcatctggctccgggaattcactgatcataaacccgtcgtaggaagggcgctcagttgaagatgtgagcatcagcaaattcttcgatgatcctatgttgctggaacttgcaaacaggatgtngtgctcaattaccccatgtgagtgcgtggactcctgggagctcctgntcnctacagtgggctgcnactcctgtantnnaagctgagacctcntantnncgtgncctnncgtgttgtcagagagtgtctgnnaagctgctgtngcagtctcgaacaatctaccatactccaacccagagccaccagtgagagaggagcagttgggccctccgtgtcttccttctgtggcctctgccgggctccacttcccacaggaaatagagaggagcttgggctcacagaaagagacggggatgaaaccccaaggggtccctactctttgggatttacatggaattctattttctacaagttgaccttagccactggttgtagagtgagcaagaacgttctgaataaatgaaagaaatg

SEQ ID NO: 655180 - DNA, 107 bp, Homo sapiens
gaaagaaggccaagggaaagaaggtggctccggcccagctgtcgtgaagagcaggagctaagacagttgtgaatccctctctgagacaaggcctaagaatttcgcat

SEQ ID NO: 655181 - DNA, 405 bp, Homo sapiens
  misc_feature (89)..(89): n is a, c, g, or t
caatcctttcacagaaagaatagtcctaacctggtcaaacccagaaccagagcaggtttcagtcaactcgctcacccaggtgatcaccnactacttcgtgatagcttcacttccaggtaatttctaaaatacacccatgtcttaaactagaaggcaaacattattgttgagaattttccgaactgaccagtgtatgtaaaaggcttaaaaggcaacgtcaacttcagcctcctatggcatgaagtggtgagttgtacattaatacttcctccagttcccgaaaccttttggtgaggttagcaatatggcctttaaaacctcctgatgaaaactgtacttaaatatatatatatgtatatatatttacttatttgttcccacatatacagatcttggacgtaaggt

SEQ ID NO: 655182 - DNA, 106 bp, Homo sapiens
aaggtcggacagggctataagaggaggctgtcggagcaggacttctggtaagctcaccactggggcatcctgggataactggcttgtggcggccaagcgttcatag

SEQ ID NO: 655183 - DNA, 264 bp, Homo sapiens
  misc_feature (54)..(54): n is a, c, g, or t
  misc_feature (216)..(216): n is a, c, g, or t
  misc_feature (245)..(245): n is a, c, g, or t
  misc_feature (247)..(247): n is a, c, g, or t
  misc_feature (251)..(251): n is a, c, g, or t
acagaagccagaaacaagagccctgttatgattgtgcctttgtgaacaagctgntctaatacgttaagtaaagtacagaagtgcttagtatcatgactgtcagaaccattctgcaactgagtatgaaatcacagaccagtgaggtgagctaattcatgttaaactgttaggccactgctttgttaatgactcctctaaatgcatagtgtgatgcgntcctctggcatatgctttaataaatggantnaaanatgagcaaaaaaa

SEQ ID NO: 655184 - DNA, 129 bp, Homo sapiens
gccggcacgtttcccgccggcccgtgtcaactgcgcggccgtgtccccgtgcgggcccgtgtcccccgccggcccgtgtcccctgcgcggcccgtgtacaccgcgggcacgtgtacaccgcgcggcccg

SEQ ID NO: 655185 - DNA, 210 bp, Homo sapiens
gtgccgtgcactccagaggctgtggcccatgctactcaggaggctgactgagtgtgggaggatctgtttgagcccaggctgacagaggttgcagtgaaccaatgatctgcaccactgcactccagccattagtgacaaatgtgagaccttgtctctgaaaaaacaaaaatacatttcataaactctacagcttccacagacagtgattcc

SEQ ID NO: 655186 - DNA, 948 bp, Homo sapiens
gattgatgtatttcacaggcttgttgcagaatctgaaggcgaggccttcatcgagctggtccagattggagtgtggggatcatggttacatgggatcaacgctgcggaaaagcagaatagagtgagtgttccgatgcctgccaggcgagtattgtggttgcgagccgtgtaacgtatgtcaagtccgatgagcaggctcccctcaccaggacagtcacgccccatatcgtgacccccagacatttcaatggcacagaacgggtactggaaagcttatgttcaaaggctgaagctatttgtaatacatgagtattgactactaagtggggacagaaagatccagtcctgagcttgtggatacattggtccatgccgtgagccagtctgcctgtggacacgatgagcttcccgggctcagctgggcttatatcacacatcccgtgaacactcagtgaagtcagcctcgtttgcgccatgtgggcatcagccactgctgtctaagggaggacactgtatcctgttctggtctatttcccacttcatccgtagtgtctcttaacgttagaacgtgctcagatgatttggaaactatctgtcctctttggatgagatcagtgtgccacaagtgggccgacatggaacatgctgagcagcggctcctctgaatgttcactttattagtcatgtatattgttaaatgctaacatctggatgaatgtaagtttccacattgtggctgtttctgcatttgaacataaattgggagacaactgacattctctagtcgactgccagggccttagactccacatgtccatttcttgttcaggtatcgctatttatagacaagggctgcatctagcttcttttattagaagtgtgtgtgctaaattccttattaatgtgtaatccagtttacattataactcgtctgaggaaggtgatgtt

SEQ ID NO: 655187 - DNA, 385 bp, Homo sapiens
aggaaagatgcgcagactgtacgtggcctcagcctaacacagttaccttcttagtagtatttgcatgagaggcttcggaaggaactgtacgtaggtctatgcaggggttaagggtcctaccaggcccccagagaccagcacctgtggaaagcccctactgacctcagggtgcagggggcaagacagcagctgtcaccataagcagtgaaagtttggagccacggaagaggcctgcccggcaggagctgatgtacagatggggacaaggggctaaggcaggtaggacgaaagtactcagaattctccatcttgttcctcagtctccatgccagtggccttaacccacattaagccctagtgcaagagagccaagtaacagcccaca

SEQ ID NO: 655188 - DNA, 1118 bp, Homo sapiens
  misc_feature (1118)..(1118): n is a, c, g, or t
agcgtgctctgccactctcgcttcctgatggtcccctgctgccatgatgactgcagcctgctgctcccgaccactccacacccacctgctgccctctgttctgccgtcttctcctgtggatgccatgtcctgctgcctacctgccttgcctgctccatgcctgatctgccactcctcctgcagccaatgtccaaccaaggtcctgtgatcctcatttccttccttacctgcatgggactgttctggctgtgcccgagtgcacctgcaggatgcctggccatgaagcatcacaagaccttggaagcttactgttgacttatcgttccacacacagtcgatccattatcaggtgcagcttgttggggcaattgcctggcctggctttgggtggccccccacatggctcaaaccgcatgttgctctatatgtatgtacctcttcttaacgtgacccatacagatacaccctctgtgggccaggagccagcttggtaatttgccccaactagcagggccttcagcattacatagacccgtgggttggacctcgcccccttggccttgtaggatagccatgatacggtgatttggcgcacccctggtggggtgcttgggcagtgtgggcattaccaccattttggccaatcctgctgtaaaatctttcctgcgcatatggggatcctattcaacatccatcgactctttggggacccaggaatcagtggccacaaaatttcgtatgtacgcagaaccgccctggacatcgagctttaccaacagtagaaacaagcgtaaaccaccccttggtacataatccgcaaaaagcttgtaactgcagcacgcggcggtagggcgaacgcgccataggacacatcgcgaaaggtcactttgcgacgcacttcggtaaccccaacggtactttattccgtggatcgcacaataagcccgttacacccaatttcccagtgagcgcacagactgtggtatcggcacgagcgccattcacaccactattatgcgtgcaactgccccatatggcagcatgtgcgaaacacttttatgcgtgccgaaatttcactccatttggacgctttaggcggcaccgcagtgacatgcgcn

SEQ ID NO: 655189 - DNA, 1198 bp, Homo sapiens
  misc_feature (283)..(283): n is a, c, g, or t
  misc_feature (293)..(293): n is a, c, g, or t
ggagggagtgactcgatgcatgaagatgatgatgaggaaagaagaagaagaagggggctcatggtggccgtggagaacccaagggttccagtagtccttcaggcactcccccatgatggaaatttggcgttctggcgttcagcgttcagcgcgcatggaggatgggactacggtatccaatcgataatcgttcgcgcgtttgagtcgatcgctatgtacgatgatttcaataggcactcgttcagcgatataggagggcctggacctatgcctcttccacatnctctcctganacttaccaggttcctagacgttcatggagacaactctgcgtgaggatgactagcggagaggggacatgacgacttcggtgactcaattgcttcaagtatccaggatagtcaggcaggcgcaggatctttgagagggggtcttggagaagtcgagtagcaatgaagtgaatcccacccaaccagcagcagactggaggctcccagaggccattgtcataggtttgatcgatagtatggcctatggagcacccattctagaagccagagaggagcaagtgatcttgattacacaggttatcccaggacgcggtcttgagccgcgggttctacagcccccagaccaaattcctatttcaaagagcattctcgtgtgaccaaggatcacgaaagccagatgggatagtggaccgtagacccggactgtggtggtacagctgagggccggatagagacttaagtaacccgataccgaagcagatagcagccgtaagggtgatcaagattcacatagcccttccagccctgggtgcatgccgttgcaatccgtgattattcctgggcacgctggattcggtaccggagaaggcttgagtaagacccctcaggaagggcccacaaaggaccaataccaccgcaacacccaattggccacgagattaataaggtaagacatacacggaacacacctcgaggggttggccctacaggcgaaccactcgcgacagggggcccagcaccgcggagaactacccccccaaggcggccaaaaagcgtagactgactgcccgaaaacagaaacggcgcggcacaacaaaaccaagagcggcgccacagcgacccccacaccgagaggacctcgagaaggagaaccagagaaagccaaacgccggagagacgcgaaaccg

SEQ ID NO: 655190 - DNA, 118 bp, Homo sapiens
aaacagagagggcaaagacaaggaaattggctccgtatccagcagtgagacaccaccaccaccaccaccaccaaatgaaattaatcgtcctcgacatacatggaagaggaggaggatg

SEQ ID NO: 655191 - DNA, 197 bp, Homo sapiens
ctacttactgttgtgtgctccaggacttcaccccggtaccggactcttacgacgtgatctggatcctgtgggtgatagtgccacctacaccgatcagcaccttgccgagtacctgcggcgctgcaggggcggcctccgccccggtggcttcatcgtcatctaagacaccttggcccatgagggcgtgacttcttgac

SEQ ID NO: 655192 - DNA, 554 bp, Homo sapiens
taccccggatccacctctcgcggtcttttacagcgctgttcgcccccatatggccgttgcttttccccgccgtttcgtctctgttggttactctggatttgcgcgggttccaccgtctgtgaaaaccccaaaggggtgcggctcacgagtcaatacgcacgttggtgcccccttcttccccccagtgatctctgccacacccgtattgccccgtgccaccgcctcttcgcccatatttgttcggtctttacggctgcgcccacggagatagggaatagatccccccacattgttgggtcgaggcgaaataattgtggggagggcaaaaaatggggtggtgggccgcccctcgctgtaacttttagagcagagaccccccccactgcgcgcccctatatttcttcttcacgccactttacatccgcctgtctataccaagggtccaccttattttttatttttctcgcaaaagagagcttttaattatctgttgcagaagccccaatttttctttaatatatgccaaatacaaaagttttcaaaccacaatacca

SEQ ID NO: 655193 - DNA, 663 bp, Homo sapiens
  misc_feature (422)..(422): n is a, c, g, or t
  misc_feature (449)..(449): n is a, c, g, or t
  misc_feature (494)..(494): n is a, c, g, or t
  misc_feature (497)..(497): n is a, c, g, or t
  misc_feature (500)..(500): n is a, c, g, or t
  misc_feature (503)..(503): n is a, c, g, or t
  misc_feature (508)..(509): n is a, c, g, or t
  misc_feature (514)..(515): n is a, c, g, or t
  misc_feature (521)..(521): n is a, c, g, or t
  misc_feature (523)..(524): n is a, c, g, or t
  misc_feature (528)..(528): n is a, c, g, or t
  misc_feature (530)..(530): n is a, c, g, or t
  misc_feature (541)..(541): n is a, c, g, or t
  misc_feature (546)..(546): n is a, c, g, or t
cttagtagtaatttacaatggtccagcttccaagattgctactggcatttccttcttactatttgaacaattacagatttattgatgacttttaaattcttactaaatgaattaaactccaggacacaattttaaggtgtctcttataaaagatacataacagcattttggaattaagaataaatcagctaaaattcaattcaacaaatagttattgagcagctattctgctgggtactttctgaggtgttgggagtaaataggaaaacaattttgagaaaatctcttcttttatagagcttaactataaaggatgtttccaaaatttcagtttggcttttctaaagaaatattgatttagatattttattaacgcatttttggttcttaaattccttaggcgtcctttcttttgaagttanccgcaccttaaaaacctggctttatgntttgtgctcaatatcccttggccttatatatcaaatattatggcntgnaanacntatgnnttcannaaactntnncttnantttcattattntggantgttctaggctggttcattttggaatcatgtacattgacaatttctgaacaagcaaaaaaaaatgctctcaaagaatagcaaggcacaagtgcattcccctattgaagcttttaccg

SEQ ID NO: 655194 - DNA, 280 bp, Homo sapiens
atggcggacattcagaactgaagcgttgccttaaccaaaaagcaagccgaaccaatcttttcaaaaacaaggaaggaggggttcctgcttgggagaaaacttgacaagggaggaagtcttcccgcgggttacttacaaggaaacaatcgggtcttgggctttcaagcacacccaagggagggctatttgaggggcacctacaattcacaaggaaatgccccttcactgggtaatgtgttccattcgagggcggatcctctcttggcggtggtgaccaaga

SEQ ID NO: 655195 - DNA, 150 bp, Homo sapiens
gtagcggcgctaccagagcaagactcccccttccttagcaaaacaacattgaaattagaccaactaataacccagcaatgacctccatgtgtacaagtgaaaggcacagtcacacatctctcactttaaataaaaagctagaaatgatta

SEQ ID NO: 655196 - DNA, 95 bp, Homo sapiens
ggggtttttttggggggcttttttttgggtttccaagcccgggggttggggcccccccctgggttttccaaaaagggtttttctttttttcccca

SEQ ID NO: 655197 - DNA, 115 bp, Homo sapiens
ggctcggtacccacggtcccgcgtgtcacttgagcttctgcgcaagcgtctggaccagctcggccccgggggcagccgccagcagttggagtaactggccaaggatggggattcg

SEQ ID NO: 655198 - DNA, 141 bp, Homo sapiens
tacttggagtcaaaggtggtagtaccgagctatcagctggtgtagccagtagcaagaagactggagaactgcaagggagaagacgaaatacagacttaccggtccgaagagaaaagaaaacacttaactgttccacagaga

SEQ ID NO: 655199 - DNA, 393 bp, Homo sapiens
  misc_feature (29)..(29): n is a, c, g, or t
  misc_feature (372)..(372): n is a, c, g, or t
aattcggaacgaggagaaataattttggnggctttatctaaataatatgaggttaattaagacaaattcttaatctgttcttaattatttaaacaattcagatggaagtcatgttctcacgtaattataatgtgaactacaggataaacacatctatttgtgtgtcccagccagattttatgactgataaatgttgccctagccatattgattgtgcagtgatccacatcagtcaataaagctacagctttaagctacatgcgtagaacaaagctccaatgaaacactcaataaatagtgattgatttatttctggatttcctggtttgcttttatttgtgggctatataaatgcagataggtaattggccnagagctattttgacaattgtg

SEQ ID NO: 655200 - DNA, 423 bp, Homo sapiens
  misc_feature (63)..(63): n is a, c, g, or t
  misc_feature (224)..(224): n is a, c, g, or t
  misc_feature (337)..(337): n is a, c, g, or t
  misc_feature (355)..(355): n is a, c, g, or t
  misc_feature (368)..(368): n is a, c, g, or t
  misc_feature (400)..(400): n is a, c, g, or t
  misc_feature (407)..(407): n is a, c, g, or t
ggaaagtgtttaattgactgaagagttcagcatggccagggaggcctcaagaaacttacaatnatgggggaacgcaaaggggaagcaaagcaccttcttcacaaggcttcaggagaaagagtgaggagttaaaggggcagagccctttataaaaccatcagatcttgtgagaactcacccactatcaggagaacatcgtaggggaaaccacccccatgatccantcacctcccaccaggtctctccctagacacatggggattatggggattacaattcgagatgaaatttgggtgaggacacagacaaaccgtaccagccatttatgttatttctnattaacccattgcccccntttttttttaaantttttttcaattttctaaaacttgttagtctnggttttngacccccgtaatttaa

SEQ ID NO: 655201 - DNA, 423 bp, Homo sapiens
cgtagagtcctagtaagggcggagccccctttgggccgaggggagaagaaaccagttgtgcctcgtaaaaaaaatttgagatcatctattcacatatgagtgacccacgacacagaaatttacatactttaaaacgcacaaggccgggcagggatgtctacctggaataaaggacttgagccaaaggcaggaatacggtcagaagccaatatcttaagaccttttatgggaggggaatttttccccgcaatcttttacactggtccaggactgaatgtttggtgacaagcggggaccttgaacaaagatcctcgtagctagtttatccctgaggaatgattgacctctattttttcgtccaaatcccaaaggaagaataagattggcctggaaaacttaaaaaattaactgcaactttagatt

SEQ ID NO: 655202 - DNA, 256 bp, Homo sapiens
gggtccccccaggggtccgggggggggggggggaaaccccaaagggggggggggaaccccccaaggggtttccccccccgtttaaagggggggggttggggggtaaatttgggggcccgggttccggttttccccccgggtttttttgattttttattccgggggggggaattggtttgggaaggggggaaaagggtccctttttaagggggggccttttttttaaccgggaaggggggtttttttttttccccca

SEQ ID NO: 655203 - DNA, 253 bp, Homo sapiens
atattcttggctgattagcttggtatcttgccaggatgttgtattaagagagaaaagggtgagggtatgaagatatttgcaaaatggtgatgagtactgattctctggcctttttatgttggcttcctagggtttagggtttgatgaggtcatcaaaccctgggccaggtgtatgccatgaagatcatgaacaagtgggacatgctgaagaggggcgaggtgtcgtgcttccgtgaggagagggtttcgatga

SEQ ID NO: 655204 - DNA, 1015 bp, Homo sapiens
  misc_feature (35)..(35): n is a, c, g, or t
  misc_feature (153)..(153): n is a, c, g, or t
  misc_feature (195)..(195): n is a, c, g, or t
  misc_feature (246)..(247): n is a, c, g, or t
  misc_feature (257)..(258): n is a, c, g, or t
  misc_feature (287)..(287): n is a, c, g, or t
  misc_feature (312)..(313): n is a, c, g, or t
  misc_feature (318)..(319): n is a, c, g, or t
  misc_feature (328)..(328): n is a, c, g, or t
  misc_feature (338)..(338): n is a, c, g, or t
  misc_feature (358)..(358): n is a, c, g, or t
  misc_feature (361)..(361): n is a, c, g, or t
  misc_feature (376)..(376): n is a, c, g, or t
  misc_feature (378)..(378): n is a, c, g, or t
  misc_feature (384)..(384): n is a, c, g, or t
  misc_feature (386)..(386): n is a, c, g, or t
  misc_feature (389)..(389): n is a, c, g, or t
  misc_feature (391)..(392): n is a, c, g, or t
  misc_feature (396)..(396): n is a, c, g, or t
  misc_feature (414)..(415): n is a, c, g, or t
  misc_feature (436)..(436): n is a, c, g, or t
  misc_feature (438)..(438): n is a, c, g, or t
  misc_feature (458)..(458): n is a, c, g, or t
  misc_feature (483)..(483): n is a, c, g, or t
  misc_feature (488)..(488): n is a, c, g, or t
  misc_feature (516)..(517): n is a, c, g, or t
  misc_feature (521)..(521): n is a, c, g, or t
  misc_feature (532)..(533): n is a, c, g, or t
  misc_feature (549)..(549): n is a, c, g, or t
  misc_feature (551)..(551): n is a, c, g, or t
  misc_feature (570)..(571): n is a, c, g, or t
atcagctgacggcctctgtgggaacaaagacaggnaaaggggaaatgagttcaccagaaaccaacaggcagcacaggaggtggtaaacccgaaaaagaaaatgaagaaaaagaaatacgtgaatctggcacagacccagatcaacttcactgnggccattgatttcactgcctccaatgggaacccctcacagtncacatccctgcactacatgagcccctaccagctgaacgcctacgcgctggnngctgactgcnngtcggagagatcatccagcactacgacangtgacaatgatgttccctgccctgnngcttnnggggccaangctgcccccnggatggcagatggtcccacngangttcccactgaatgngnaaccangngangnncccntcatgctgtggcatcgannggcatcctggaggcctaccancngcagcctgcgcactgtgcangctgtacggccccaccaacatttgnccccngtggtcacccactgtggccaggaatgcnngcgngccgtgcatgnntggctcccagtactcngntgctgctcatcattacttnntggggtcatctcggacatggcgcagaccaaggaggccattgtcaacgtcgtgccgaagctccccatgtccatcattatcgtcggcgtgggccaggccagagttcgacgccattggtggagctggatggcgacgacgtgcggatctcctcccgggggaagctggctgaacgcgacatcgtccagttggtacccttccgggactacgtgggaccgcgcagggcacacgtgcttgagcattgggcccgggcctgggcccccgaaagaacggttggttgggcagaaagatccctgtaccaacttggtggtgccttcacttgaggggccggcgatatcacacacggtatacccaacacgacaagttaaaccattgcacacctcaggtatacgaaaagagtccacgcacacaacccaagcaaaagaaaatggcaaaaaaaaatgatgctt

SEQ ID NO: 655205 - DNA, 139 bp, Homo sapiens
ttatcagtgtgtcccccctcgactccttctacaaatccgccacaccacggaggattcggggatactccccagagggtccatccggccacgctccctccccccattacacctgatccccgtaaccaacccactgtctacc

SEQ ID NO: 655206 - DNA, 157 bp, Homo sapiens
attaaacccacacaatacaagcctgttcccccacgagaaccaaattcaacagacgtagaggaaacgcttggaacggataaagaacaacgaccccaaactttaagaagttaacctcaatatatccggaatatcccatccccacctcagggcatatcag

SEQ ID NO: 655207 - DNA, 197 bp, Homo sapiens
gcggaaattcatcgtgtaccttacatggtgacacatttgcttgcttgttcatgtatcatttgtcccagcatagaggtctgcgcatctggtgaagtagtggcgtctacccattcttctacagttcacttgcatagcaggctatcaccatgcacttgtgtccttaatgtgctatttgacaagggtgtagtaaacatctg

SEQ ID NO: 655208 - DNA, 612 bp, Homo sapiens
tgccgtaggccccaattctgcatctttgacacccagatttgaagtgtgcctcctcacagattggaaggtgccaacacgctcctgtgagtctcctccttcaactccgtgccacgtccactgggccttttctacaatggggtaccataggaatttttaaagaaatactcgacagtcgcaacgacgcacttacccataacccatagtattgatgcagattccccacaaccggggtttcctatgcgccggtatcttttaaacggcgactggtgttcctaaaatctttggaactctaaaggctcctgatatccgccaaagacatctttggacgcaaccaagacaagggcgtatcgctacgagcttcgcttgtccgcacggccagcccctggggcacccctgtgtgtctgccgtgggcacgcctctgccacgcaccacccctttgtgggcgaagagagcgctccgtggccgtctcgttccctctcgaggctgtgtcgtttccgccgtgtgtcgacactctcccgcgtgctcctcccagcgtgggtgttccccttcaagagtgctcgtggctttttccacgggaacagcttcgtgcgtgggtggaccttttgtgtcgcc

SEQ ID NO: 655209 - DNA, 378 bp, Homo sapiens
catacctggaccttctcatgtccttgtgttgaggacttacactttttgaacctcaattttcttacatgtcaagtgaggttttgtggatgatatctttataagctttcaggcaatgtcaaggaataccggttagtgggtagtgtatgtgaaagtgttttaagaactgtaatgcatcatacaggttatctagtcttccttcccagatggatggagtttacagacatgggacttctttcccagcattggtggacagagaagatttggatcaacatcctgaggtcagagtgaaggcaaacagcttgacatggagctagatgagaccagcgagacagtacacaaagccaagtacttcggggccagcagagctaatgcatgagg

SEQ ID NO: 655210 - DNA, 1412 bp, Homo sapiens
gtgctgccattgctgtcatgctgggtgagtggcggcccaggcccaggaccagagctgcgagtacagcctcatggctatggctaccagtgtggacaggtcattccgaggcatgctgtgtcaagagccagagagaccggagatttggatgtcgagcgggcctccaagaaacggataagatcattgaggttgacggaggaacaagaggacccatatcatgaaatgaccgctgccgaggaggcgggccctgacaagcagcagagccgagacacggagtgacgaggtggtctgctcctgcttacgagggactaccagcatgctgtctgatggtgtctccatgtgaagatgtcaatgacatgcatcacgaggcaagccacagactgaccggacttgcgagaatcctagcatcaacacagtgggcatcttaaccgactgccagacggcgacagcaagactgcgaggacatggctatgacgctcacacgagcgacaaataagctgcaagagcatatcacgacgacgtgatgagcagtggtactccactaaactgcgctaccccggattctcatctagtcaggcaatactcctgcggaatccatacacgcaaagccaggaaccacaacgcctaaacacgaggcagcggaacatggcacataaatacacaacgcatggctcatagggccaaactgatactagcaatatccactgaacaagcgccacgagaaatacaaagacccgcgaggacacataatacgagcgcacaataaattgccattcgaacacacacacagacgagcgctccgatacgacagatgaccaacgaccgaaacaggagcgccagaacgagatcgcaacggagcgcaccacgaaattagaacgcaaggaaaggacacgcagacacgggatagacagagtgacgagcaaaggacacagggcccacacagagcacaagactccctgcggagagacaacaggaagaacaagcagaggatgaacagaaacaggagaaaaggaatccgaagaacgccaagctgacggcaggaggaaagaaacgtagagtacggggccaaggaagcaaagtaccagcagacaacgtacacgacacgagacacgcaaggcgatccagcagggcgaccgctgggggagcagacaaagtgaggagacagtaggaagcaaagacagaagagacaacgaggggagcgagagaagaggagaaggatagagaaacacaaggagagaacgacggacagaggcggaggacagcaagcaggcgagagcggaggagagaggagacaagcgaggagagtcagagaaggagagcaccacgcggagtagtacgaactaacaaacagacgacagcagacgagacggccggagatggcggtcctagtaagcgcacgcgatagcgacagcagt

SEQ ID NO: 655211 - DNA, 199 bp, Homo sapiens
gctcgacgtctgcacagaccagtgctggccctcctgttccagtcgggtgaccggggaatggtcaaacaactgcccgcccagcccgactgcggcattggccaagcctgctggtgtaggccatcgggttcaaggtaccggcacgtcggtcgagcaaggcggcacgaatctttttggtaccgatggcttgctcgcaggccgc

SEQ ID NO: 655212 - DNA, 764 bp, Homo sapiens
  misc_feature (133)..(133): n is a, c, g, or t
  misc_feature (194)..(194): n is a, c, g, or t
gacactatattacattactattcatgttatgattaacaagttatcatatattatcacctatttgtggttatagttttggccataaatatatttttaatgtatagatatagctattttgactctattttagttnccatttgcatggcatatctttttccatcattctattgtcggactatatgtgtctttgttgnagaagtgtatttcttgtaggcagggatcattggatcttgtttttttaatccactctgccactctattatctttcaattggtgagtttactccattgccattcaatgttattattgataagtaagaatttaccactgccatttttttttttctgattgttttgtggtattcactttcttctttgcttcctttctgtcttccttttagtgaagataattttctctggtggtatgttttaatttcttgctttttattttttgtgtatctgttgtatccctttgatttcaggttatcatgaagcttgaaaataatataacccattattttaaactgatgtcaacactaattgtataaacaaacaaacaaacaaacagaaaactaataaaaactccacattttaactttatgcctccactttttaagattatttttttggcttccacttacatcttcctctactgtctatgtcttgagaagttgttgtagttattattttttttcagctcatcatttagtctttctacttaaggtatgaatagtttatacaccacacttacagtgttataatact

SEQ ID NO: 655213 - DNA, 445 bp, Homo sapiens
  misc_feature (13)..(13): n is a, c, g, or t
  misc_feature (28)..(28): n is a, c, g, or t
  misc_feature (162)..(162): n is a, c, g, or t
  misc_feature (195)..(195): n is a, c, g, or t
atctagataatcntgttaaatatgatgntattacctattaatcactgtactggcatacataatgtacactagcttgccgagctctatattatgatgccggtaacccacgtgtggactccctgtatatatgaacatcactgcctaaatgttagcacagtagcncatatggaaaatttgaatgagctaggttaaganatgctaagtgcaggtaccagaatctcagaagcggactgaagtgttaaataagatgtttggcttgggaagcaatctgggcttaaattgaatgcaatttagtgactggaaatttttgaagttcaaaaattttttaaaaacagttatgttagaatagactctgtatctgaattcttgatactaatgaccttataacaagttgggtttgatcccattcacttgagccagttggttttttgtaagtgaatttccc

SEQ ID NO: 655214 - DNA, 862 bp, Homo sapiens
  misc_feature (103)..(103): n is a, c, g, or t
ctggcgttttcaccccccgtcccccctgtcatttgccccaaaccctttttccccgatctccccacaccacacatctcttcccgtttcttcgccccaaagttgnccccctgagatgcgccgccaagcgcctctttatctctctctctacttacctctcgcgttttctcccccacccctctcccttattggcccccccacgagatatccaaataccacatgccgcacacacagtggcacccgcgtttagacacatggtttttaagaagcccactcccgtgtgggtttccacagaatatgagcccccttcgggcttttgaggcggcaagactcgcactatgggtaacactctatagacttctggaacttggcacatgccaccacatgtgtacacatgtgcacagccctttggccaatagataccaccaccacatgcacataccactgagggcctccaccacccagcaccttgcgacaccacatgtggaactcctataccacttcgctaaccctgcacactggctggggaaagggtgcgggaaccccacatcgggccacaaccccttgcacaggagcgcccctttgccaaggcattatgcggtgtggccacgccctgagaaagctaaccttggaacaccacaggtttcacagctggccccacgcccccgaagtgaccccccgaaagggagggccccccctttgtccccctgcttttacccttccttctgggtgctctacacctccggttacccggcctgaggcatttcatcccagcttgtttcccgctctgaggcttgtggggtgggaacccgaatggaggtcggtgaaataaagtgatgccaattagtaaaaaaaataaaaataa

SEQ ID NO: 655215 - DNA, 184 bp, Homo sapiens
  misc_feature (54)..(54): n is a, c, g, or t
  misc_feature (72)..(72): n is a, c, g, or t
agtctagatataaatatgtctataataaatatttaatataattatatttattanttattattatattattantatatattaatatattttatataatatataatataaaatatataataaataagtagtctagtaataaaagaataccagcctgggtagtcacagaccatatgggtagtcacag

SEQ ID NO: 655216 - DNA, 368 bp, Homo sapiens
atcatcagagtcagttccagttacatttccattagtatggatagatctgccgccgctgcctctgggcaccgctcaccggcgccgcactcgtccgcgaccgtggcggcggcgccgccccggcctccgccgctcctcgggcccggcgcccggccccctgggcccaggcgcctgccgccgccgccgccgcggctctccggccccctcctccggagcaggggtccccccgcagggggatgcagagggaacctgacgcaggctccgctcgagggagcagcagcgaacaggcggcggaggccctcaaggccgcgaggcagccgtcggaggacagagctcagcaaatcgcgtcagactcccgctcgcccggcctg

SEQ ID NO: 655217 - DNA, 1599 bp, Homo sapiens
ggctggactgactgtagacccagcaacaaactaccaaccactgtagcaggagcccctggcatcttcatcagtgctcagcctcagcatgcagcgaatttatcgtagaaacatgcagcaacatgcaccgcagcagcttcgcaggcagcattcaccatgcattcatgcatcaaaccatttcaaatcatgcatcatttgaggcagcatgatggaaagcaaagctgtgcactcactcatcagcacaattgcatgcaagcaaaaccatatgcacagccagatcattatcacaatccacacgcacacacggcacattatttcccagatgcatcgtttagtcctgagggcagcatgagcggatatgtccataggtatggccccatcacacatgcagcagattggcatgcaaacaacaaaagcaatttggtccattgtcattggaacaacctgtggagcacttttgtaccatggtgggccttcttcttcaacaaggtaccaagcagcaatatcattaatggatgaacacacctgcattaccagtatattatgataatttacggacaccgtacaatctccggagggaaattcatatcacagctcaccttgcaaacattgacacgttcagacatattcgcccaggacttaaacacatccaaccaaagcttttcatatcaacgagcatcaccaattggcatacttcttctcccactatcacacttccacagacataccttcccacaacttcaaactttatttgaaaccacacccaatagacatccccccaacagtaaacaccaagaaaccaaacaacaacacacacccacacgagtcgccacagatacagacggtagataacagccgcgcagctcaacgaggagaacaacgagaaaaaaagagagagcgaagataaacaacgcaccacgacatcacgatttggggcgcaccgaacgcagaggacacccaacaatatgagagaaacactcaaacacacagctgaggacactacctagacgaccactgagagaatccacgacagaacggagcaaccacgtgacgcccaacaacaagagaagatgtgagtgcgacacttataccacaacacatgaaaaaagagaccgcgacagcagaagggacaaaagcaagatgatgcgtaagtaggaaggaaacacacacaaaagagaggaacacgaaaagaggccacgcacagggcgcccaacaccaagaggacgacaacggcacagtaccaagacacaagatccaggaagcgcagcacgagagagagggaagacgacgaggagaacggacgacgcagacgagggacgcacggaagcaagagaagcacgaagcgaagagagcagagagagagagaagagcagagacgaataactgaagagacacacggagagtcagaagacggcagacaagcaggacgacggagagacagagcacacgagagcgagcaagcagcacaagccgaccacgccgaaccagagacacaggcggagccacgggagggagacggacagagacgaacagaagggacaggacgaacgacgaagaatgcatatcggatgaggcagagcagacgagaagcgaagacgagcc

SEQ ID NO: 655218 - DNA, 462 bp, Homo sapiens
tagctcggtaccccgcttctttccgttcgggctgagcttgtcgaagccccgctcgcgccacgcgcgtcctgcgctttgagaggtgcccttcgacaagctcagggcgaacggggattcgcggcaatactcccgcgctagcgcgtcaccagcaccaccttgtcgcgcgcggtcgcgccgcgcaccagcgttagcgccgatcgcggtcgacccagcgccttggcgagcaaggcgaggatcgcgtcattggccttgccatcctcgggcgtcacggtggtccgcacgttgagcacagcgggcgctccatcggcgggcaggcggatgtcgttcgcgcccgcattgggggttgcgcggatcgtcaaatgcccgtgcgcatcgatcaatcgttcgagttcctcgcgcggggggaagctgttcttgatgcggctcatgcccgccttcttaaaagaataccgacgcgttgag

SEQ ID NO: 655219 - DNA, 566 bp, Homo sapiens
  misc_feature (551)..(551): n is a, c, g, or t
cactagggagttcctagaagagaagctggggcataggcatgggatagatatcacctgtccccaagagcccctttccttcccagtggggcttgggaaagctcagcacaacccagaagtgcatgtcagagcagagcctgtccagggctgtccctgcaactacagggctccctcctgcaaagtgacacgtaccaaatcttgcagccaacaagctatctttgttggccagaattatcctacaaggattagacagatcatagacaaggacagacagccccagaaagttgaggcatttaaggggaagatactgtgtcaaagccatccccaatccatgccccacaggaagcctgtgccacatccaaaccccacttgccggcgtcaggtcagcctggtgtgtccagccgtcccaaccagtgctaaaagccctgtgtttagtgatgtgcctttcctaactggacagaaaatgcttccaaagcatttacagggaggaaaatttccccccacaaaataattcactccttgttgagaatcttgattctccccaataaatgttncaataagaaggaaaa

SEQ ID NO: 655220 - DNA, 224 bp, Homo sapiens
tacgctaggtctagtgcatacccttagctatctcgggtgttgcgcgcgctgctgccctggatgtctcagggtgtactgacctattctggctcgatctcgggtggctttaagccacttttgtctctgagatcttggagtgacgcctatctgctcgtgggtcgcgtaattcgtttgcatgccgagtccgctgcattgggtatcgagctcgatttagtagtcgtcgt

SEQ ID NO: 655221 - DNA, 251 bp, Homo sapiens
tcggtcctgtctttaacattttcaggaggctaatgttacgacagtctcaacagtgcgctcctgatcataccaaatggttatcccagggcagtcctccataacccaattggaaaagccttaatctggggagaaaggccagcactcttcataagcaagattttaaccaagaggtgataaaagacattctgttaacggttgcctaagtggtcaccccgtcttccccatcccagtccctcttccccagtcccatg

SEQ ID NO: 655222 - DNA, 210 bp, Homo sapiens
cctggagatgacagcgtggcagaagctcacaagtgcatagagtcgtaagagctctctcctcacagagctcagcaacagcctcaccaaggactccatgtaatatcaaagccccatatccacagtgttgctagacggggcttagatgaactacaagtgcctgcagaaatatcccagtcgcaagtgtacggcgggatcctcctagacgtcgac

SEQ ID NO: 655223 - DNA, 105 bp, Homo sapiens
acggccatatattactgtgcgtcacctctgtaccccccaaaaggacccatagtggctacgacaactgactactggggccagggaaccctgctcaccgtctcctca

SEQ ID NO: 655224 - DNA, 247 bp, Homo sapiens
gcttttacccttgggcctgggcctttgcccctcccaacccagccgttgtttcccttgacagggcccctgctgtttttccccccccagtccccccccccccaaatgccccgtggtccctgtgccctgccctgttcatgtgcctttgcggggcagggcctttctggttttgttccctgctgtaccccaatgcccccccccctccctgccccatacaggggctccattaacccttgtagagccgatggga

SEQ ID NO: 655225 - DNA, 459 bp, Homo sapiens
  misc_feature (7)..(7): n is a, c, g, or t
ccgagcntaagggctacccccccaggacgagggcctcaagtccaaggattttcttccgcaacagcctgccgaagaaaagagggcgttcttgcgcgtccaacgcttccggcccgtggtcgagagccaggccttcaagaacatcctggtagacgagatggacatgatgcacgcccgtgcagccacgctcatccaagccaactggagggtctattggctccggcagaagctgatttcccagatgatggcggccaaggccatccaggaggcctggcggcgcttcaacaagagacacattcttcactccagcaagtcgttgataaagaaaacgagggcggaggagggggacataccttatcacgccccacagcaggtgcgcttccagcatccggaagagaaccgccttctgtccccgcccatcatggagaacaaggagacccagttcccttcccgtgacaatct

SEQ ID NO: 655226 - DNA, 863 bp, Homo sapiens
ggaccggagcggacggttttgtgcagactggacccgcgtgtgcgcgagccccggggcggggtcggggcgtcgagatcccggaggagtctcagcctgaatcgcctcctcctagtgccctgtccgcccctgcggcgcgtcgccgtgtggccggtgttgcgagagcgggcaggcgcgccggtgcccggaatacagcctgcggtgctggaggtggcacagggagctgctgatgaaaccgacgatctccctcgggccaccgtggtggtctgctccgccaggcgctccctggcctgtgtggctgccttgcacatcgtcggcgggacgcccagtccctgattccctgctgggcttggtcaccccttcgtacccgcggtcagccttgcgccggggaggcctcctgtcggaagcccagccgcatgccctggagtgtgcccctgggaggtcttccgcgagtgctggccgactcgctggcgggagctccttccgactcccgctctgctacccgggcgcgctgaccggcggctgggcttacgctggtgcctcgcggtggtgctcctggcggggcccccggagtgggcaagaccccagtggttgcggggccgtgggcgctgcgaggcgggcgcggacgcttgcctgcaagtcaggccccgggctgcaggttcccggcctgggagaccgaggtcaacgtgcgggggtctccagggcgcccggaagtgccagccggggacagcctctcttctgtacgagatgacgcttgttcccaggggtagtgacaccgaagcggtaatgccatggtgcccttgaggcgcaggggccccgcggtggggcctacggcggctcgacccgtgtggcggtgcccaggctgg

SEQ ID NO: 655227 - DNA, 319 bp, Homo sapiens
  misc_feature (1)..(1): n is a, c, g, or t
ncaggaacaagatacgaaatccatacacatatgaaatggtcactttcccatgaatatgtgtcagatcagttcgggaaaagaaagatacctttctatggtcggagccatacacttcataccatgtaatgtaatcctagtatttatctatacagtatagagtagtccaaagctaatttatattcaagatgtggggaatgccagcttatattattattgagattctcaagtgggaatgaggcatgtcctctagtccggctagtgcgcttgggagtcatgccagaagttgggatgtgattgttctgtcctcatgacatgccat

SEQ ID NO: 655228 - DNA, 257 bp, Homo sapiens
  misc_feature (58)..(58): n is a, c, g, or t
cgggtgacctaagatccgcaggtggtgtggtaggaataatatatgtagctctacctgngctcatcacccaaatgtagtactggcatgtctgcaggactggtctgtgaggttgcatgtgctcttctctactggaatgccttctcttgctttcctggggagccctcagctttagcgttgtctcttccgggactcctcctcccgctttccactccatcctcagctgcaggcttctccctcgtcataccacaaccacctgc

SEQ ID NO: 655229 - DNA, 145 bp, Homo sapiens
gacccaccaccccatgtctgaccatgagggccacctgaggggctggacctgggctttttaaccttacgagatacacaatgaacctgcagcggatggggagagaacagagcccagagacacgcgagactcggtgtagtaccagatc

SEQ ID NO: 655230 - DNA, 270 bp, Homo sapiens
  misc_feature (146)..(146): n is a, c, g, or t
  misc_feature (261)..(261): n is a, c, g, or t
gagctcggccccctgcctgtgtctctgcctctctctctctgtctctctttttctgtctctttgtctctcatgaataaataaaatcttaaaaaaaattaaagaatgaaagaaagaaagaaagaaagaaagaaaaagaaatgaatgtntgtgggcacagagaaaagtttacatgcacagtcctcaaattattaaaaggctgggggcaaggggatactgaaaaaatattaaatttattttttaggggatcccttggtggctcantagtttagt

SEQ ID NO: 655231 - DNA, 135 bp, Homo sapiens
  misc_feature (65)..(65): n is a, c, g, or t
ctcaagaggctgaactagagagagagacagagatgaggcgagactaggggagcaggatagcgacntggtcggggcagagactccaggacggatagagacttgggagggactcacgaagcatagcgactgtggggc

SEQ ID NO: 655232 - DNA, 928 bp, Homo sapiens
tgtggtggctcacacctataatcccagcacttgggaggccaaggtaggtggatcacctgaggtcaggagttgagaccagcctggccaacatgatgaaactccatctctacttaaagaaaaaaaaaaaaaaaaggaaaagaaattagctggggtaggggtgggtggcacggccggtcatctcagctactgggagaggtggaggcaggacgacatcaggtggaacccggggaggcggaggttggccggggggccaagacttggcaccatggcacctccagccggggcaaaaaaggcaaaattccattctcaaaaaaacaaccaaacaaaacaaaaaaaccattttataactaggtgggtgtttccaatgggagcacaaaggattctaatcatttaactctatggattaacgccctttcctagtccagaagatcgggcacacacgtattggcgaggcggttatcaataaactcatttaaattcaggaacgctttaagcggattagaaagttcctctcctggtgaagtaggtccaccaaggtcaatggcgggagtgggtcactttctacttcacggaggaggatacttagtggtgcttggattaacatccccaccagtgtcattatcttcactgctgggaagtcacaaagtctggtaaaggattttagatccaggaaaaggccggggcgggaaatccacactggtatccagtaatggggggccgaaggggggactcttgaggcaggagtgaaaacaggctggcaacaagggaacccggtcgtacaaaaaacaacatcaggggggggggggcgctggaaccagtaaacacgggcgaggacacatgtgaacgggggaatgggaggagaacctgcccacgggagagagacttaaaaaaaacacacggggggaacccatgtgcactaccgaaggca

SEQ ID NO: 655233 - DNA, 345 bp, Homo sapiens
cccccccggggattttttttttttccccccccggggggtaaaagatttttttttaaaaaggggggggcggccccctttagccccccccggggttttggggccaaaaaatatggtttttggggggccccccagtttagggggggggcgggataaatacccaaagggggccttttcccccgtgggggaaaaaagggggttcccccaaatatcaaaaccttccccccccccccttttccctttttttttttttttttgtttttttttgggggccggggccccaccccctggtcccttgggtttcccggggggggaaaaaaaaatttttttttaaaatttttttcccca

SEQ ID NO: 655234 - DNA, 162 bp, Homo sapiens
cgctcgttctagaggatcccgaaggagacacaggtgacggtgtcacacgcatagcgacggaggcagcgtgccgggacagagggagggaggagaccaggagatgaagttagagacgagattggtggccctgaacgtgccataacatgcttttcactttgcttg

SEQ ID NO: 655235 - DNA, 664 bp, Homo sapiens
agcggtttcaccatgttggccgggctggtctcggagtcctgacctcaagtgatctgcctgcctgggcctcccaaagtgctgggattgcaggcgtgagccactgcacctggcctgcttttttatttttaaaaagcttatattattctttcataaggtttgaatttcaaatgttagctgtgacttggaaaataagaatttagttggttcgcctcgtcctcttgctgtgttcacttcctctttccccatcgtacacttcttgtttcccatcctcccagtggtgattatggataaatacgtattcactgtttacattaccaggactatgcagacgtggcgcctggtagcatgcaatcattacttccccgttctccccagtatttcgttttctctggatttaagaccttgtttttttgcaattagttttctttgtatttagcactaattcaattctaagctcttctcccagttgggctcatctcctttcagtagaaccagatacctgaggtattctatccattacatcttgaggaaatctcttctggacatttctggcctgtgctaatctcgactatataatccttatgttggcagcacagctggcatcttgggatctcgagtcaggatcatcctggaggtccctctggtccctctgtctctctcatat

SEQ ID NO: 655236 - DNA, 1011 bp, Homo sapiens
gactctggagcctcagcgaccggccggatcgaggcgcaggggacgtaagccacgattactgcggggagagccaagcgtgccaggccgagctctaaaagccgctgcacgtactagagtaaccgggcgaaggcgctggtgcactttgtagggccctgtgttgctggcatgagcagtctgccgtctaatccgtgcgggagagcacaacgtgctttgcaatgcgaagtacgcactaactggtacgaaaactacgggtgatcacccacaacgaaaggctgtcgcgacagcaaagtaggcaactcgggaacctactgtgcctatgcgtttgacagaacatcgtgagaccaggcagctccacaggtatcactacagtctcgtcttggacgaacaacgggcgtttacactggcaaggtcgctgtcggcacataaaatagccactgagagatgattgcccaaggacagttgcgccaattgttcccacgtatgacctcatcgtccattggcctgaagagattgttcacaatgggaggagaaatcgccatcagctttgattgagattggccacaaggtggtataacgaacattggcgttcgcaccaagatatcaccacagacatattaccacaacctatacgtggtgtccaccctgggcgaaagtattactgtggtcgggcaacacgtcagcacaccggctactctgcccatggcttcgcgaccatgcgaggttaccatgggttcgtgtgggtccgacagcatcaataaaaggtgataaccgcttcaacaaaggtgatactggccaagactacagccagattcctatacgtcatgaaaacaacgtatcatatgaacgatgcacagagatcgatgatattcactagcgacaatgatcccgacgtcggtgtaccccccacgtgactcatacaagtggtttaccacaaccactgtagttggggtccaagctgtgccgacgtgtgctagcgggaacaccttttctcaaccaacaggcttcttcgtg

SEQ ID NO: 655237 - DNA, 639 bp, Homo sapiens
cactgcagcctcaacctcccaaggctggtcttgagctcctgggctcatgtgatcctcctgccttggcctcccaaattgctgggattacaggtgtgaaccactgtgcctggccagcatattctttttaatggcattatggtattccatgtaaatgagtattatttaacaaatcttttattaatagatatttaggttgttttcagtcttctgcttttatgaatattactacagtgaaatgccttatatatagatctctgtaccttgtacaagtatatttttaggataagttactggaaatagaattgctgggtcaaagaatatacatttaaaattttgtgtattgcaaagttgtcttaaaagaagttgtgtaccattttaaatgtcctccaacaatgtacagagtataaatacatcagattgatttctaaaagttccccacaggggaggttagatattctcatctgcagggagagtacagagaaataacaatccttttttgtggttagcaattacaagggcctttgcctccctcattgtgaatttgccctttctgtttacccgtattagtttcaaaactttctgtctctatcccagtgggaggatggaagatggacagtctctctgggtttcttcttgatt

SEQ ID NO: 655238 - DNA, 220 bp, Homo sapiens
ggggggccccccccccccccccttttttggtttttttttcttttaaaaaacccctttcccggggtggggttttatccctttttgggtttttttaacccccccttttttttggggtttttttcccaggggaaattttggcccctttacccgggccccttctgtttgggtggggggcctttttttccccctttgggggaaaaaaaaggtttgggccccccca

SEQ ID NO: 655239 - DNA, 354 bp, Homo sapiens
gaaaaagctcggagatggtgttaattcttcacttgagccaatgttagccccaccccactctggtgggtgtttttccacggttttggtgtttaattttgttatacatggagtaaatgcagagtgcttagacaacactttctcgtgtaataaagagccttaaactccacacacggagcggagcactctttaagaggtgttgaaaattatattaaggctatcattcttttagtaaagtcatatttgccaacttttttagttttggcctttaaattttaaaagcctaattttaaagtgctgcctgtgagtaacttttggattaaaaccaaatattaataattggaaaaagaaaaaaaa

SEQ ID NO: 655240 - DNA, 104 bp, Homo sapiens
gaggacgaagcgcgaagagccgcttagttcatgtccggtgttggtggcggcggcggagacttgcgggcccgtaggctgggctctgcgacggttgcaagaaaggc

SEQ ID NO: 655241 - DNA, 403 bp, Homo sapiens
ccagttacaacagctcccaggtatatctctttccttggcaagttgcagatttaggtagcaatctgaatatgccacctcttagagatggagcaagaatacttatgaaactcatgccaataggtaagaaaaatacttccccactcccttcgccaccctgtccctaataccgacaatgcatggtatatagtattgtagtatagcatacaatatcaattgtgtatgtcatccatactatctttgctgatgagaaattttccatggatgattaaagaatgtttaggagcatgtaatgtaagaaatatttttaattaactaatgcacacaatttagaaattaagaattcttcaaggctataatgaaaaacagtgttattttacccatcctcaccagctgttgtaactgg

SEQ ID NO: 655242 - DNA, 889 bp, Homo sapiens
ggggtgcttgtcacacctcgaaatgtgctttgggaagaacgttttctcccccgtaagacgcgctgtgttcacgcccgtgtgaaattgcgccagaaaattggtttctgccttcagggtgttctccccccgggcctgctgtcttgtcgtgttgggaaaaccacttggcctcttcatcagtggtctgtggtgatttacagggtgcttccaaaatagggggcagcgaattgtccaaaagagcacactagcccgggcctgtctgtctctcacatgatctctctcggcgtctgacccaccgcgccctcgcccccccggcgaagtatatctccccggcctagtgcgatggttttctttccgcgcacagatgatgggacagggccttttagcacggtccgccatcaccaaatgtatatctctccgaggcataaccccactcatgctgttaacggctatcgaccacgccaatattcacacttcgtgtgacatccagctgtcgccgcgcgacattacttccaactgtgcacgagcaacacttctggtgaataaaagattgttcttccccgcgttctttctctcttggggggttgatgcccccccgcccgattgcaaggtgcgcgagataattatgcacgctacttttctttaacccctttcttgtttgcctcacagttcgctgtggaccactcctcgaaacggactcttgtaaaaagattctgctgggataacgataacctctggtatctacctacggtcggcgctgtcgttctacaaacttcatcggacatcaaatgcttctctgaagtagggcacacaccagtggcctgccctgcccgagacgtctcccctttccaccttcacctggtcattctttccccccaccaaacaacaaaac

SEQ ID NO: 655243 - DNA, 223 bp, Homo sapiens
ggttgagcggctaaagcacagtacgacaaggatgtccattcacaccacttttattcaatatatctttggaattcctagccatggcagtcagacaagaaaaagaaataaaaggaatccaaattggaaatcagacttcattttttcagttttgctctaaagtagtaactttgcaatcaaaaacttttttaagaaatgcaaataaacatgaaaacacagttgacac

SEQ ID NO: 655244 - DNA, 259 bp, Homo sapiens
tgatagcttcgactggttagcgtcaagcatgacgcgtagtcggtacatgccataactgactgagtcgacttatggccttgtttaatacacctgctaaagaaataacaatagcttcagcaatgtgcagaaggtggtagtttgtgcgatatccctccatctttttgatgcggcacactcggagcgccgcgtcccacagcttcacggttctgcgttgacgaaagacctgtcagtgcacctacagcgatccttcgttcatcgc

SEQ ID NO: 655245 - DNA, 1231 bp, Homo sapiens
ggaggttttgactctcgtggcgccccagggccgacgggagtggcggccgcgcggaggaggccaagatggcggcagctgcggcttcgcttcgcggggtagtgttgggcccgcggggcgcggggctcccgggcgcgcgtgcccggggtctgctgtgcagcgcgcggcccgggcagctcccgctacggacacctcaggcagtggccttgtcgtcgaagtctggcctttcccgaggccggaaagtgatgctgtcagcgctgggcatgctggcggcagggggtgcggggctggccgtggctctgcattcggctgtgagtgccagtgacctggagctgcacccccccagctatccgtggtctcaccgtggcctcctctcttccttggaccacaccagcatccggaggggtttccaggtatataagcaggtgtgcgcctcctgccacagcatggacttcgtggcctaccgccacctggtgggcgtgtgctacacggaggatgaagctaaggagctggctgcggaggtggaggttcaagacggccccaatgaagatggggagatgttcatgcggccagggaagctgttcgactatttcccaaaaccataccccaacagtgaggctgctcgagctgccaacaacggagcattgccccctgacctcagctacatcgtgcgagctaggcatggtggtgaggactacgtcttctccctgctcacgggctactgcgagccacccaccggggtgtcactgcgggaaggtctctacttcaacccctactttcctggccaggccattgccatggcccctcccatctacacagatgtcttagagtttgacgatggcaccccagctaccatgtcccagatagccaaggatgtgtgcaccttcctgcgctgggcatctgagccagagcacgaccatcgaaaacgcatggggctcaagatgttgatgatgatggctctgctggtgcccctggtctacaccataaagcggcacaagtggtcagtcctgaagagtcggaagctggcatatcggccgcccaagtgaccctgtccagtgtctgcttgccatcctgccagaacaggccctcaagcccaagagccatcccaggcctgttcaggcctcagctaagcctctcttcatctggaagaagaggcaagggggcaggagaccaggctctagctctgggccctccttcagcccccatcatgggaataaattaattttctcaatgt

SEQ ID NO: 655246 - DNA, 1063 bp, Homo sapiens
ttaaattatggcaattttatattacaaaatgataaatgacacggatggagtgttactcagtgatttgtaatttgggactaggatataatctagagatgtagtatatgtgtcagtaactaatactgcgctgccatcatggtgactgtcatggttctacagaaatgccctccatgtgtccctctaatgtgcatgtctcagtgggttggaagtttgtatatcatagtattaacacacgagtgtcataacaactaaaatgctgatagactggaaacaaaaacaaaacacaaacacaaagaacaacacacaaacacagcggcgcggccccacaaaacagcatcaccaccaaaggggccccaccaccgacacgaacgcacacaccagagcacagccgacaagagcggagcgcaccaacaacaagacgcaccgccaacacacgacacgaacgaagccaccacgagcgacacacacacaaccagcgacgaccgagagcaaaacacacgagaccgagcccaacacagctaatacgacaccactcacatcggcgcgccacactaagggccaaaccgcacacaaaccaaaccagctaacagcaaggcaacacgaacaacacacacacaacaaaaagcgacaacacaccaccgtccatattacgcacgacccgaagacaactggcccacgcgcaaagcaccaacaacaccacactacaaaccgctgacgccgcaaccaccgaccgcgtcaaggcaacaccaagcagcgcgaaggcgcacgtagcggaatgcgcgccgaccaaagcaacgcaggccagccgcagcagccgccgaccgacgagacgagaggcgacagcacgacagacggacgagagagccagacgcagcgacgacgaggcgcgagcgcacggcgaccacgggaagagcccgaccgagcgcgaggcaagcctcgcggagaacaaggagacgcaaggaggccgaagatgcgcagagggcagagaggcaaagcggcgagcgaagaggaaccggcgcagcaaagatagaaaggcgaaagcccgagagagaagacatgcagg

SEQ ID NO: 655247 - DNA, 287 bp, Homo sapiens
agttgactcggagtattcacattttttttttcttctgctaatttaacttctgcgacatcattgacattaatgtacatgcgggatgaacttgaagggaaatgctaccctaaaagaattgtctttttatttgaataacgcatattcgtctccctaatgcgattcttgattatttatctttaaaaaaaataccactaattcataattattggctcgaaactcacagcctttatttttttgatcacggatttcgagttgagccgcgcgtgtttccatttttggagtgaaaa

SEQ ID NO: 655248 - DNA, 117 bp, Homo sapiens
cgtctctacagatcccttatccactttatactgctatgtcggctggatatccactttaatactccaaggtatgcaaccagatatgtgcaggcaacctcttccagaccagacgagcag

SEQ ID NO: 655249 - DNA, 478 bp, Homo sapiens
actcatgcggataagtcgtgtggatatgtggttccgatgcattcgactcgtctataacatgcttatctttttctttaccgatatatttcaataaaactaatgggaccacccgtatatcagtaggaccgggtagggatcggaagtacttggcagggcagcagcaatcttgctgtgtttgatataacatgcatccttgggcaggttgcccttaaatcttacactgtggtgaagggatgttttttttggtaatgctgcagtagagtgggagtacttagttctctggtagtccagtatatctaataagtgtttttcatattatttccacgtaagggaaataaggtagtacttttcttttaatatttctatgcttaaaattctctttcctagtcaaaaatggcccaaatctgtgttggctttctgcttgctacattggtctcccttacttttcttgagctaaagacaggctttttccaccggc

SEQ ID NO: 655250 - DNA, 468 bp, Homo sapiens
  misc_feature (336)..(336): n is a, c, g, or t
  misc_feature (373)..(374): n is a, c, g, or t
  misc_feature (423)..(424): n is a, c, g, or t
gctccccagccatggcgttcacgttcgcggccttctgctacatgctgtgcgctgctgctcactgccgcgctcatcttcttcgccatttggcacattaatagcattggatgagctgaagactggattacaaagaattcctatagaccagtgtaataccctgaatccccttgtactcccagagtacctcatccacgctttcttcgtgtgtcattgttctccttgtgttgcaagccacgaagttggacttataacaacatggggggatcctccaaagttatgtgccccactttcttgtgggccatttattcattaatctgcgcgacggctatcatcgangctacgaccccatgtagctgcacgctgggccccaagnngacgtcataagtgaagcccttaacgaagcccattccactgacattgcanngattatttcctaggcactactcggtccatgacagggacagggcg

SEQ ID NO: 655251 - DNA, 964 bp, Homo sapiens
ggcggcacaagtggtcaggtcctgaagagtcgctttatggtgtagaccaggtgcaccagtcagagccatcatcataaagcggcacaagtggtcagtcctgaagagtcggaagctggcatatcggccgcccaagtgaccctgtccagtgtctgcttgccatcctgccagaacaggccctcaagcccaagagccatcccaggcctgttcaggcctcagctaagcctctcttcatctggaagaagaggcaagggggcaggagaccaggctctagctctgggccctccttcagcccccatcatgggaataaattaattttctcaatgtaaaaaaaaagaaaaaaaaaaaaaaccaaaatatttcccccgaaaaaggggggaaattcaagatgggagctgtgcctacaccacaaaaggtagccggccctattctttccacaccaaaaagagagggtgcctggtcgtcgggagaaaattgggtagggaaaacgtcccccgggggtaccacgaaaaaactatcggccctggggcgtcaagaagcgcccacaaggaggtctatgggaggtgcccctaactttgcggacgaagaggccccctcgcatggggtattcgtgtccatcgagggggaggatcccccctctgcggggttggtgacccttgtgttaaacgactgccgagagggaaccattgggtcactccgcgggagataagatgtggatgaacattcgcggaatgatcaaaccgccggttcgaaaaagcggccacagagacctgttttgtttcccctggtcccccaggtcttgagagaacgtccagactcgggggactcggtcacccagtgggggaagatggcgggcctttgtagaaagaaggtgggcgttcacagggtgccaccagggtccccacaggggtgcgggcaccacaaagtaggtccagaagattgagagtggaatgggcccgccccaaga

SEQ ID NO: 655252 - DNA, 258 bp, Homo sapiens
  misc_feature (98)..(98): n is a, c, g, or t
  misc_feature (100)..(100): n is a, c, g, or t
  misc_feature (132)..(132): n is a, c, g, or t
acaggaaggaaaaaaaaaaaaacaccccacaacacaaaacccacccgcaaacgacaacacaacaaaaaaaagaaaaagggaggggcggggggcggggncnccccccgccccccctctttggggggttttttnccagggcctccacgctaagcccttcttctttcatctggaagaagaggcaagggggcaggagaccaggctctagctctgggccctccttcagcccccatcatgggaataaattaattttctcaatgt

SEQ ID NO: 655253 - DNA, 871 bp, Homo sapiens
  misc_feature (257)..(257): n is a, c, g, or t
  misc_feature (289)..(289): n is a, c, g, or t
  misc_feature (301)..(301): n is a, c, g, or t
  misc_feature (303)..(303): n is a, c, g, or t
  misc_feature (380)..(380): n is a, c, g, or t
  misc_feature (401)..(401): n is a, c, g, or t
  misc_feature (421)..(421): n is a, c, g, or t
  misc_feature (423)..(423): n is a, c, g, or t
  misc_feature (436)..(436): n is a, c, g, or t
  misc_feature (441)..(441): n is a, c, g, or t
  misc_feature (443)..(443): n is a, c, g, or t
  misc_feature (453)..(453): n is a, c, g, or t
  misc_feature (456)..(456): n is a, c, g, or t
  misc_feature (469)..(470): n is a, c, g, or t
  misc_feature (484)..(485): n is a, c, g, or t
  misc_feature (497)..(497): n is a, c, g, or t
  misc_feature (499)..(499): n is a, c, g, or t
  misc_feature (522)..(522): n is a, c, g, or t
  misc_feature (536)..(536): n is a, c, g, or t
  misc_feature (539)..(539): n is a, c, g, or t
  misc_feature (543)..(543): n is a, c, g, or t
  misc_feature (548)..(548): n is a, c, g, or t
  misc_feature (569)..(569): n is a, c, g, or t
  misc_feature (609)..(609): n is a, c, g, or t
  misc_feature (613)..(613): n is a, c, g, or t
  misc_feature (621)..(621): n is a, c, g, or t
  misc_feature (633)..(633): n is a, c, g, or t
  misc_feature (635)..(636): n is a, c, g, or t
  misc_feature (642)..(642): n is a, c, g, or t
  misc_feature (644)..(644): n is a, c, g, or t
  misc_feature (648)..(648): n is a, c, g, or t
  misc_feature (652)..(652): n is a, c, g, or t
ggagacctacctatggcagctctcgccggtcgggattactatgacagaggatatgatcggggctatgatgatcgggactactatagcagatcatacagaggaggaggtggaggaggaggaggatggagagctgcccaagacagggatcagatttatagaaggcggtcaccttctccttactatagtcgtggaggatacagatcacgttccagatctcgatcatactcacctcgtcgctattaaagcatgaagacttnctgaaacctgccctagagctgggatattgttngtgggcaatatntntattgtctcttgtttaaaaagtgaacagtgcctagtgaagttaggtgacttttacaccttttacgatgactactttnggtggagttgaaatgctgttntcattctgcatttgtgtagntntcggtgcttcgtnccaangnttaacgtgtnccncgaaaagtatgtnntgcatgtatttttnntacagtctaaantnttgactgctgagaagtctctatngtacaaaacttcanttnaaanggttnttctactgaatccagggtatnctgaagatcgaagcctgtgtaaaatgctaccaaatggcanacgncgcaacanctaaacagttgnannttttantncttntttnctaacatatcaatgcttagcagaactattcagatgtcatgtagtaaattctacaagacaaatggccgttttcctccagtccatgaaaacataccatacttatataacctgcaaactaagtgtttaaaattatgctctgtaactctgtacttgctagtattagaccttaaaatcttaaatacaggcagcgcttaatgcttaacaacaaaacaacaacaaa

SEQ ID NO: 655254 - DNA, 135 bp, Homo sapiens
ctctctctgtggggatggggacccacagagatgggatcaagataggagcagagagaggccagggagacggggagggaaagagcggcaggaagaaggagagagacggaagcgtcaggggtacctgacgctcgaatt

SEQ ID NO: 655255 - DNA, 1302 bp, Homo sapiens
ggaggttttgactctcgtggcgccccagggccgacgggagtggcggccgcgcggaggaggccaagatggcggcagctgcggcttcgcttcgcggggtagtgttgggcccgcggggcgcggggctcccgggcgcgcgtgcccggggtctgctgtgcagcgcgcggcccgggcagctcccgctacggacacctcaggcagtggccttgtcgtcgaagtctggcctttcccgaggccggaaagtgatgctgtcagcgctgggcatgctggcggcagggggtgcggggctggccgtggctctgcattcggctgtgagtgccagtgacctggagctgcacccccccagctatccgtggtctcaccgtggcctcctctcttccttggaccacaccagcatccggaggggtttccaggtatataagcaggtgtgcgcctcctgccacagcatggacttcgtggcctaccgccacctggtgggcgtgtgctacacggaggatgaagctaaggagctggctgcggaggtggaggttcaagacggccccaatgaagatggggagatgttcatgcggccagggaagctgttcgactatttcccaaaaccataccccaacagtgaggctgctcgagctgccaacaacggagcattgccccctgacctcagctacatcgtgcgagctaggcatggtggtgaggactacgtcttctccctgctcacgggctactgcgagccacccaccggggtgtcactgcgggaaggtctctacttcaacccctactttcctggccaggccattgccatggcccctcccatctacacagatgtcttagagtttgacgatggcaccccagctaccatgtcccagatagccaaggatgtgtgcaccttcctgcgctgggcatctgagccagagcacgaccatcgaaaacgcatggggctcaagatgttgatgatgatggctctgctggtgcccctggtctacaccataaagcggcacaagtggtcagtcctgaagagtcggaagctggcatatcggccgcccaagtgaccctgtccagtgtctgcttgccatcctgccagaacaggccctcaagcccaagagccatcccaggcctgttcaggcctcagctaagcctctcttcatctggaagaagaggcaagggggcaggagaccaggctctagctctgggccctccttcagcccccatcatgggaataaattaattttctcaatgtcaacacacacacacccccagtcaaaacacaaaaacagacaaaaaaaaacaaaggggggggttcacgggggc

SEQ ID NO: 655256 - DNA, 1190 bp, Homo sapiens
gggcggcgcgcggaggaggccaagatggcggcagctgcggcttcgcttcgcggggtagtgttgggcccgcggggcgcggggctcccgggcgcgcgtgcccggggtctgctgtgcagcgcgcggcccgggcagctcccgctacggacacctcaggcagtggccttgtcgtcgaagtctggcctttcccgaggccggaaagtgatgctgtcagcgctgggcatgctggcggcagggggtgcggggctggccgtggctctgcattcggctgtgagtgccagtgacctggagctgcacccccccagctatccgtggtctcaccgtggcctcctctcttccttggaccacaccagcatccggaggggtttccaggtatataagcaggtgtgcgcctcctgccacagcatggacttcgtggcctaccgccacctggtgggcgtgtgctacacggaggatgaagctaaggagctggctgcggaggtggaggttcaagacggccccaatgaagatggggagatgttcatgcggccagggaagctgttcgactatttcccaaaaccataccccaacagtgaggctgctcgagctgccaacaacggagcattgccccctgacctcagctacatcgtgcgagctaggcatggtggtgaggactacgtcttctccctgctcacgggctactgcgagccacccaccggggtgtcactgcgggaaggtctctacttcaacccctactttcctggccaggccattgccatggcccctcccatctacacagatgtcttagagtttgacgatggcaccccagctaccatgtcccagatagccaaggatgtgtgcaccttcctgcgctgggcatctgagccagagcacgaccatcgaaaacgcatggggctcaagatgttgatgatgatggctctgctggtgcccctggtctacaccataaagcggcacaagtggtcagtcctgaagagtcggaagctggcatatcggccgcccaagtgaccctgtccagtgtctgcttgccatcctgccagaacaggccctcaagcccaagagccatcccaggcctgttcaggcctcagctaagcctctcttcatctggaagaagaggcaagggggcaggagaccaggctctagctctgggccctccttcagcccccatcatgggaataaattaattttctcaatgt

SEQ ID NO: 655257 - DNA, 539 bp, Homo sapiens
  misc_feature (324)..(324): n is a, c, g, or t
cggatccccgattgtgaaataggtaggtacagaggacagttaagaccagttaggaggctgctgctgtagcccagctgggatagcagtgccctaggcaaagataacgacagtgaagttaaagagagtggacaagttgggtaaagtttagaatcacaggacttgctgactggagaagagggcaaaagcagagttagcacaacacatgagttatgaccaccttgagcagctcagcagggggtggtgccatttacagaacagagatggcatggacagagcccatggagaaggaggaggaaaaagagagtttggttttgggtttttttnttaagacagggtctctggctctgtcacccaggctggagtgcattggtgcgatcatagctctttacagcctcaaactcctgggctcaagtgatcctcctgcctcagcctcccaagtagcaggattacagatcctacagatgcacttcaccatgcctagctaattttttttttttttttttttttggggctccactctcctgttcccagcaatctcc

SEQ ID NO: 655258 - DNA, 1080 bp, Homo sapiens
gcaagtacaggaacccgagatctgcgcagggagttcccgttgtgccgatttctcatcaccatcacctttcaaaccataaacatcgcagccgtgcgtgttcaccggccatagcatgtgctcatcgccagtggctctcagcgatgctgacgtgcacaaagccagatcacagcaatatgcatggctttccatggcaaccaagaagccaaattgagaaaagcaagaagcaaatgagatgcacaaggcagaagcaagcagttcaaacatagcagcaacagggtcgcgctagttggcacacaccccccaaaggcatcaacagcattcagtggggccaatcatccatggcaagcaacagccacccagcagcagccaccgcagcatttggcaggccagccagacaaggcacaactcccaagtatgctcccaagttgggcactgcacgtccaagcggagcaatccacacagacagctccctctcagcaggccacacgacatactggacatctgtcacttcacacgcacggacccccttacgtcccaacttggcagagtgccaaaaacacccacggacgaccttcccaggccacacggcggcatcgggcgtgacacagcggattcaccacacacagggatcacacaaggtggcctgggattgggggaatggggaacttggggtttatctaacaaggagggattatagggatcaaccaagaatatgggcatgtggacggacactggaaagtggaatatgggatcaggattggacgggaaacaaccaatgaattatccccctccatggagatataaaagagattgggccagtggacagaaagggggaaaattgaccaatatatgttagactacagacattaggacgcaccccaacaccacgggcactggtcaggatgagtaccccacaaattgggaacccagaggcagccccatacaccagtggacttggaaggaacctatcgcctggatcagcaagtcaggagaccctactaaaggggcagccacggcaacaactcacagggtttagccagagacgcccgcggaaagggagggcggggaattatgccagag

SEQ ID NO: 655259 - DNA, 1355 bp, Homo sapiens
ggaggttttgactctcgtggcgccccagggccgacgggagtggcggccgcgcggaggaggccaagatggcggcagctgcggcttcgcttcgcggggtagtgttgggcccgcggggcgcggggctcccgggcgcgcgtgcccggggtctgctgtgcagcgcgcggcccgggcagctcccgctacggacacctcaggcagtggccttgtcgtcgaagtctggcctttcccgaggccggaaagtgatgctgtcagcgctgggcatgctggcggcagggggtgcggggctggccgtggctctgcattcggctgtgagtgccagtgacctggagctgcacccccccagctatccgtggtctcaccgtggcctcctctcttccttggaccacaccagcatccggaggggtttccaggtatataagcaggtgtgcgcctcctgccacagcatggacttcgtggcctaccgccacctggtgggcgtgtgctacacggaggatgaagctaaggagctggctgcggaggtggaggttcaagacggccccaatgaagatggggagatgttcatgcggccagggaagctgttcgactatttcccaaaaccataccccaacagtgaggctgctcgagctgccaacaacggagcattgccccctgacctcagctacatcgtgcgagctaggcatggtggtgaggactacgtcttctccctgctcacgggctactgcgagccacccaccggggtgtcactgcgggaaggtctctacttcaacccctactttcctggccaggccattgccatggcccctcccatctacacagatgtcttagagtttgacgatggcaccccagctaccatgtcccagatagccaaggatgtgtgcaccttcctgcgctgggcatctgagccagagcacgaccatcgaaaacgcatggggctcaagatgttgatgatgatggctctgctggtgcccctggtctacaccataaagcggcacaagtggtcagtcctgaagagtcggaagctggcatatcggccgcccaagtgaccctgtccagtgtctgcttgccatcctgccagaacaggccctcaagcccaagagccatcccaggcctgttcaggcctcagctaagcctctcttcatctggaagaagaggcaagggggcaggagaccaggctctagctctgggccctccttcagcccccatcatgggaataaattaattttctcaatgtaaaaaaaaagggggggtaaattcccagggccagtcgtccgtttgcaaggccaaggggtaaaaaggccgcaggggggaggggattggagacttgggagggcccaagcggaattgtgacgggtgtt

SEQ ID NO: 655260 - DNA, 1227 bp, Homo sapiens
taaaatacggagtttaatttcacatgtatattttggtctccccaccatttccatgtctgaccaccgggtactactagtgtcctatcataacattccatacatacttaaaaccaagcaagaggggtggagttccatctttaaaaactaaacaggcatttgggacaacacattctgggcaatagaaccgggacaactattttatcaaacacgggtaagggaaagttctccagtcggctattctaaaacagggcacagccagattatcacactggtgtcaccgaatatggacaataagacggaaaatttttacacacaaattggtgtataaactaatattcctataaagagaagaatatcctaccactggcgcaagaagatacttggaatagcgcctctaggggtacaagtcataccgggaacagcaattccttacaccataatgggagtgcgaatatcgggcttaccatattgggcgaagaggaaccaacctattgtcgctaataacatagggcttgggcatattagaggctcttacaatgagtgcttctaacaggaactgagggtacctattaggggggtatcaaagagagttaaataacccatgggaaccctggaaaaaggagcaaaaacatggggaccctatcgggaacacctggggagggctcgaaggaaaagggaacggacagatactgaagacccaaaaccgggaatagagaacaacacagaacgcaccaacttaggggacaagaaagaaatccgcgagcaagtaacatacactcacacacaggggcgggccgatatatacatcaaagactaacccggacagtcgaactaaagaagacaagcgagaacaaacaataaaatgaagaagacaagtaaaaccccctgataaaaaaaagcacaacgggcaccaaactggactaacacaagagaccaagggttatgcatgcactccggcgcggcacccgggaaaccacacaccaggggaggacaaacggtttcaacaagaatgtgatcagaaaggtaacaagatcgacggacaccatgaaagagcgagacaacggcatttacttacaagaagacaaaagcggcgccgcaaaataaaccgggcccaagaacaagagaacgacaacaaaccggggcagttaatacaagcccccgaggaaacaggtgcacagcatcaaagaggagacaatagggggggagaaaagagcagcaaagagcacg

SEQ ID NO: 655261 - DNA, 1606 bp, Homo sapiens
ggaggttttgactctcgtggcgccccagggccgacgggagtggcggccgcgcggaggaggccaagatggcggcagctgcggcttcgcttcgcggggtagtgttgggcccgcggggcgcggggctcccgggcgcgcgtgcccggggtctgctgtgcagcgcgcggcccgggcagctcccgctacggacacctcaggcagtggccttgtcgtcgaagtctggcctttcccgaggccggaaagtgatgctgtcagcgctgggcatgctggcggcagggggtgcggggctggccgtggctctgcattcggctgtgagtgccagtgacctggagctgcacccccccagctatccgtggtctcaccgtggcctcctctcttccttggaccacaccagcatccggaggggtttccaggtatataagcaggtgtgcgcctcctgccacagcatggacttcgtggcctaccgccacctggtgggcgtgtgctacacggaggatgaagctaaggagctggctgcggaggtggaggttcaagacggccccaatgaagatggggagatgttcatgcggccagggaagctgttcgactatttcccaaaaccataccccaacagtgaggctgctcgagctgccaacaacggagcattgccccctgacctcagctacatcgtgcgagctaggcatggtggtgaggactacgtcttctccctgctcacgggctactgcgagccacccaccggggtgtcactgcgggaaggtctctacttcaacccctactttcctggccaggccattgccatggcccctcccatctacacagatgtcttagagtttgacgatggcaccccagctaccatgtcccagatagccaaggatgtgtgcaccttcctgcgctgggcatctgagccagagcacgaccatcgaaaacgcatggggctcaagatgttgatgatgatggctctgctggtgcccctggtctacaccataaagcggcacaagtggtcagtcctgaagagtcggaagctggcatatcggccgcccaagtgaccctgtccagtgtctgcttgccatcctgccagaacaggccctcaagcccaagagccatcccaggcctgttcaggcctcagctaagcctctcttcatctggaagaagaggcaagggggcaggagaccaggctctagctctgggccctccttcagcccccatcatgggaataaattaattttctcaatgtaaacaaaaaaacaaaaatccaacgaaataacacgccaacacgaacacaaacacgcacaagaacgaccagtacaacacacctccacaagaaccaccgcgcgcgccgcccatcaaacacccagcccacgaggaagccagcacaaccgaacgacgacacccacccacagtagagacaggcacgccccggacgggagggcagaacgcaaaagaaggaggtaggcaacgactcaaacgaccgggccggtggcgacatgcgcacccgtgaggaggatcacgcaggcacgcagccccccagaggggaggaaaaccagagacgcgaacaccgacaatgcagacccaggcagcaacaaccacgagaccggggatgcacagcaaa

SEQ ID NO: 655262 - DNA, 1751 bp, Homo sapiens
  misc_feature (477)..(477): n is a, c, g, or t
  misc_feature (728)..(728): n is a, c, g, or t
aattgttactatctctatcctctctcactgtcgtgtagcttgtttgtatctctccctctgctctggagttgtaaataaccatgtcgctgtgccacttttgtatacagctatgctcgtgtgggtggagacaaccccttctgtatgttgccgaggcgctcctctactaaccgactaaatgctcgatcgtcctgtgtcccgcccgcttgtatattaagcgcccacagttgggggggttgcgcggcccgcgcctcctcatttgggctgtcgccccctcggtacgaaagttttttgaatgtgggttggcctcccctcctgaacaatgtgtggtgtggacccccggtgacgccaaggagaatgtttgtgtctcctgaaggaagccacgaagacccgcgtgggggtgggcccccccctgtataacgccggcccgcggggccaatagcacgaaagaagctgaccaccccttatatggggggccgnccaacacaaaattaaagtggccccccccctgctcggccccaaatagcggtgccccccccccttgggggggaaccaccccccgttgccccccatttggacacccagccgtgtgtcctctcctacagcccccatgtaagagattctcccccccccgtaaatagccgttgttgggcccttttgtgggagcccccaccccccccccccccccacggagatttggggtggtataatattaggtcgtaaccaccccntctccgctcacaatttggggtacaaaagtacccaacattgggccgtatagacggtcgccccccctgaggtgggtgacccacacgatggcgtgggacccaacgttggggttttccccccccccaaacagagaggggtctcaaagatatgctctcgccaccccacgtcgccccccaccccagatctgcagagagccccaccacagcgcgctaccagcaactatccacacacgggtgcttcctgcgaaatttgggttgtccccccacctcctggcgcttttcacacaggtcttttggcaccttctcacacgctgtctcacggcgctcttctccgcacccgctgtgttggggtgtctcttctgtgtgtgtgagagagactctcttgtgctcacacagagatacacacagacagacagctctggtgtatgctcacatgtctttgacggcctcacacactctcaccacagccgccctctcgccctcgagagtgcccccctgcgcgcatctctcccgtggagacacacacacacagagtgtgtgacgacacctgtacatgtgacactctccacagagcgggtcccctctctgtgtatcacctcggtgaacactgaggttgaagcgcgcgagtggtaaggatatagccccgacgctctctctccacagaggtgcacaccttcgataagaataataggcctgtcccccctcgaagaatggtaattcactcgacgcgcaacgcgttatggttcgttggagtcttctggtatgagaaggaagaagggctgagaggagaagacacagcgacagagaggagaatatctagagtataatccacattcctctttggcccctgcacagcacacgctcacatgctctccacgaatttcacgcgtgtcacgcttaacctgacacgagcgttaaagctttctgggtagatatgttttcccctggtgcatcaagtcttttcccaagtgtaccctgtcaaaaatttgtcccatcataatctccaagtataagtccattaaccat

SEQ ID NO: 655263 - DNA, 1210 bp, Homo sapiens
ggaggttttgactctcgtggcgccccagggccgacgggagtggcggccgcgcggaggaggccaagatggcggcagctgcggcttcgcttcgcggggtagtgttgggcccgcggggcgcggggctcccgggcgcgcgtgcccggggtctgctgtgcagcgcgcggcccgggcagctcccgctacggacacctcaggcagtggccttgtcgtcgaagtctggcctttcccgaggccggaaagtgatgctgtcagcgctgggcatgctggcggcagggggtgcggggctggccgtggctctgcattcggctgtgagtgccagtgacctggagctgcacccccccagctatccgtggtctcaccgtggcctcctctcttccttggaccacaccagcatccggaggggtttccaggtatataagcaggtgtgcgcctcctgccacagcatggacttcgtggcctaccgccacctggtgggcgtgtgctacacggaggatgaagctaaggagctggctgcggaggtggaggttcaagacggccccaatgaagatggggagatgttcatgcggccagggaagctgttcgactatttcccaaaaccataccccaacagtgaggctgctcgagctgccaacaacggagcattgccccctgacctcagctacatcgtgcgagctaggcatggtggtgaggactacgtcttctccctgctcacgggctactgcgagccacccaccggggtgtcactgcgggaaggtctctacttcaacccctactttcctggccaggccattgccatggcccctcccatctacacagatgtcttagagtttgacgatggcaccccagctaccatgtcccagatagccaaggatgtgtgcaccttcctgcgctgggcatctgagccagagcacgaccatcgaaaacgcatggggctcaagatgttgatgatgatggctctgctggtgcccctggtctacaccataaagcggcacaagtggtcagtcctgaagagtcggaagctggcatatccagtgtctgcttgccatcctgccagaacaggccctcaagcccaagagccatcccaggcctgttcaggcctcagctaagcctctcttcatctggaagaagaggcaagggggcaggagaccaggctctagctctgggccctccttcagcccccatcatgggaataaattaattttctcaatgt

SEQ ID NO: 655264 - DNA, 298 bp, Homo sapiens
  misc_feature (36)..(36): n is a, c, g, or t
  misc_feature (53)..(53): n is a, c, g, or t
  misc_feature (120)..(120): n is a, c, g, or t
  misc_feature (123)..(123): n is a, c, g, or t
  misc_feature (168)..(171): n is a, c, g, or t
  misc_feature (235)..(235): n is a, c, g, or t
  misc_feature (290)..(290): n is a, c, g, or t
acacacagcaaatgctgacatcctattggcaaagtnaactgacattggctgcnatatttcacatgatcatttctgccaatcccattttttgaatactaatatttcacatggttaattctnatnaatttgttggcattgtttattgttaatgatgcaaatagataattnnnnattatacacaagtcacatttcactgttaatggtttgacataggtgataagcaaaccaatttganataaaatataaacatgtgccattgtattataacactatacactttcttgacagtnaaatttca

SEQ ID NO: 655265 - DNA, 184 bp, Homo sapiens
tcatcggctcggcccggctttttgggtggctcttggtgggtggtgagatcatgtggagatggacgctgccccaggcgtggacctgagccgcattgatctcaccacccacctggcctcgcagggcggttcatctcctccacgcgcccccacggaagaagccactccaagcgccgccacaaagggc

SEQ ID NO: 655266 - DNA, 125 bp, Homo sapiens
  misc_feature (93)..(93): n is a, c, g, or t
gccccgccagtttgatggcatatctgccagcacattcggcttcattgccacgcttcggttcatgtggtcagccatcagtgttcagcatcgtcngttccagcacatcgcatggcagtcccacccat

SEQ ID NO: 655267 - DNA, 1328 bp, Homo sapiens
ggaggttttgactctcgtggcgccccagggccgacgggagtggcggccgcgcggaggaggccaagatggcggcagctgcggcttcgcttcgcggggtagtgttgggcccgcggggcgcggggctcccgggcgcgcgtgcccggggtctgctgtgcagcgcgcggcccgggcagctcccgctacggacacctcaggcagtggccttgtcgtcgaagtctggcctttcccgaggccggaaagtgatgctgtcagcgctgggcatgctggcggcagggggtgcggggctggccgtggctctgcattcggctgtgagtgccagtgacctggagctgcacccccccagctatccgtggtctcaccgtggcctcctctcttccttggaccacaccagcatccggaggggtttccaggtatataagcaggtgtgcgcctcctgccacagcatggacttcgtggcctaccgccacctggtgggcgtgtgctacacggaggatgaagctaaggagctggctgcggaggtggaggttcaagacggccccaatgaagatggggagatgttcatgcggccagggaagctgttcgactatttcccaaaaccataccccaacagtgaggctgctcgagctgccaacaacggagcattgccccctgacctcagctacatcgtgcgagctaggcatggtggtgaggactacgtcttctccctgctcacgggctactgcgagccacccaccggggtgtcactgcgggaaggtctctacttcaacccctactttcctggccaggccattgccatggcccctcccatctacacagatgtcttagagtttgacgatggcaccccagctaccatgtcccagatagccaaggatgtgtgcaccttcctgcgctgggcatctgagccagagcacgaccatcgaaaacgcatggggctcaaggtaaaagggttgggaggccatggtgggtatcagagaagggctgggagctgggcagggctcctccccactcccttctctgagccttccttgtctgcagatgttgatgatgatggctctgctggtgcccctggtctacaccataaagcggcacaagtggtcagtcctgaagagtcggaagctggcatatcggccgcccaagtgaccctgtccagtgtctgcttgccatcctgccagaacaggccctcaagcccaagagccatcccaggcctgttcaggcctcagctaagcctctcttcatctggaagaagaggcaagggggcaggagaccaggctctagctctgggccctccttcagcccccatcatgggaataaattaattttctcaatgt

SEQ ID NO: 655268 - DNA, 975 bp, Homo sapiens
  misc_feature (901)..(901): n is a, c, g, or t
  misc_feature (934)..(934): n is a, c, g, or t
  misc_feature (939)..(939): n is a, c, g, or t
ggaggttttgactctcgtggcgccccagggccgacgggagtggcggccgcgcggaggaggccaagatggcggcagctgcggcttcgcttcgcggggtagtgttgggcccgcggggcgcggggctcccgggcgcgcgtgcccggggtctgctgtgcagcgcgcggcccgggcagctcccgctacggacacctcaggcagtggccttgtcgtcgaagtctggcctttcccgaggccggaaagtgatgctgtcagcgctgggcatgctggcggcagggggtgcggggctggccgtggctctgcattcggctgtgagtgccagtgacctggagctgcacccccccagctatccgtggtctcaccgtggcctcctctcttccttggaccacaccagcatccggaggggtttccaggtatataagcaggtgtgcgcctcctgccacagcatggacttcgtggcctaccgccacctggtgggcgtgtgctacacggaggatgaagctaaggagctggctgcggaggtggaggttcaagacggccccaatgaagatggggagatgttcatgcggccagggaagctgttcgactatttcccaaaaccataccccaacagtgaggctgctcgagctgccaacaacggagcattgccccctgacctcagctacatcgtgcgagctaggcatggtggtgaggactacgtcttctccctgctcacgggctactgcgagccacccaccggggtgtcactgcgggaaggtctctacttcaacccctactttcctggccaggccattgccatggcccctcccatctacacagatgtcttagagtttgacgatggcaccccagctaccatgtcccagatagccaaggatgtgtgcaccttcctgcgctgggattgagncaaaaagaacatcgaaaagcaggggccaagaangtganaaaaatagtctggtgtgcccgggttaaacccataaa

SEQ ID NO: 655269 - DNA, 327 bp, Homo sapiens
  misc_feature (27)..(27): n is a, c, g, or t
ctggggggaaaaaaaaatccaattttnctgttaatagtaatgctcccaatgaattaatggcccctctgttccataaataaaaagcttaattatccccaccctatagaatctggggcgccacaacctggggttcttttcttttgaaaagctcccccaaaaaaggttttaaaggtaaaagttttgagtaatgtcctccccataagctcttgtttaaaattctttttttttatggataattagggttatgtttcctgtcttttttaacccctataaaaaattttattttcccctctttttttccatgtggaaaaatttaatattgttggt

SEQ ID NO: 655270 - DNA, 734 bp, Homo sapiens
aaatgtaaaagaacagaaattataacaaactatctctctgaccacagtacaatcaaactagaactcaggattaagaatctcactcaaaaccgctcaactacatggaaactgaacaacctgctcctgaatgactactgggtacataacgaaatgaaggcagaaataaagatgttctttgaaaccaatgagaacaaagacacaacataccagaatctctgggacacattcaaagcagtgtgtagagggaaatttatagcactacatgcccacaagagaaagcagcaaagatccaaaattgacaccctaacatcacaattaaaagaactagaaaagcaagagcaaacacattcaaaagctaacagaaggcaagaaataactaaaatcagagcagaactgaaggaaatagagacacaaaaaatccttcaaaaaaattaatgaatccaggagctggttttttggaaaggatcaacaaaaatgatagaccgctagcaagactaataaagaaaaaaagagagaagaatcaaatagacgcaataaaaaatgataaaggggatatcaccaccaatcccgacagaagatacaaactacatcagagaatactacaaaaccgtctacacaaataaatagaaaatctagaagaaatggataaattcctcgagaaaatacacgtttactaagactaaaaccaggaaaagaagttgaatctctgaattagaccaaataaagaatctgga

SEQ ID NO: 655271 - DNA, 1718 bp, Homo sapiens
  misc_feature (286)..(286): n is a, c, g, or t
  misc_feature (426)..(426): n is a, c, g, or t
  misc_feature (537)..(537): n is a, c, g, or t
gcggagtgagatccgcggactatgcatgacattcgtctatactaccgtgatgaccgttacataggtctcacagaagccttctctcatccgggtgcacagatcggtcacagcctctttacacgcgaaagaagaacttcagtgtgaccactcagtttaggacggaaaagtacaggaaggagccacatctaggtgtgcacagacaagtacacgatcgactgctacgttgggagtggtgaggcacgaacgttgtaggctcagtggtgacggtgttggctcactcccatgnccattgttcttgggagaaggacgattctacttgcgtctagcctagtgacacatctgcctactatgttcgctgatagattgtgtggccacaagatgagagtcgtgttagagtggagaagagatcgttagagttctacctgnaacgccaacattagggttgagtgcattgaagaatgctcttgtcaaggaaagcacactcgtcacaaacaatttgtgtggcgcacagcgaatcacatccgatctgaatgactntgggtttgaccccgggcggtctatcgatcacatcactcctccgatcaagtaagcgttcacaccatagttagagagaaggttcccggactaggggtagatgcacacgtgtgcatgtacgttcagggcctccctacatactcgggtgggcgacgaaaggaaaaagtggctataaaagtttgttccctttctcgacaatttagcattgtcactctaacccttggatgaaactacgtaaccacgtagtaaccagggtaaccatagagttggccggttgactattccatttggttgagcttctcttcacatctcccgagcctgtgggcacatatctgcgctctcacagtcttaaaggttttaacccctgtggacaatacatcttaatacgttgggtagtttgaccgcgaaacatgacccggatccgtgaaaataggggtacccgcatgggccattgatccagtgccaagcggcgaatttgcattggggtacggaattcccacgggtcgcaacccgttttaggtaggagactttgggcaagatacctttgagaggtagggttccgaaatgaaccccacgtcggagttggtgggtgcatctcggagaatgagggagcctccctccaagaggggcggtaaacagaccacttgtgtcccgaccggaagcattaagcgttggggtggggccatagtcccgtttttaaacccttggtataggtggagggcagagacttttcgcgaaagggggctggtgcaaaacacctctccgtaggttaatccagcgatggttacacttgggggaagttgtgccgaaaggaaggcggcgtggacacggaaatggctgtgcaagaccccttttcaggatattgcggggacaactaagcgcccgcagcggaggggggaactccggctctttccaacaggggcgcaccgtgagatgaaaccccacaattgaggaacggagtgaacagggggggtgttatcccccaggggggggcggcggagtcgtcgggtgttccaaccctgtcgacgctgtagagattaacccccggggtaccccgctcgtgtacacaacgcgaatgctccggcacacaagcgtcctacgccgggcaatacagccacggtggaagaaagcggctcttactgcgccccgagcaaaacgaggacactctcccgaggagcaccagt

SEQ ID NO: 655272 - DNA, 467 bp, Homo sapiens
gaaacacactgatcctacatttggaatatggagacacagaaaggttttggtttcaaaggtagccaaggcagaattaccaggaccctacttaaaggtttcactgtgaggaaaccaaccttaaagaaaaaactctcccttaaactgatatcaagccattgtcaagtgcattgttttatctctttaatgtctcacgaaaccatcaacttctctccaaattcaagaaaaccatcacctgtctggaatacttaaatgaccttttaataatccaaatgtgtttttctaacatgtcctcctgctaatctctacatttgagccaatgtcatcttggcaaaatgccagattgctgatgtcactactgctcagacccatcacagcatctccacttaaactctcaaacagcttcgaatgactcttataaggaaaatcaaaagccttaggccctcatattcaataatattctacacaaa

SEQ ID NO: 655273 - DNA, 582 bp, Homo sapiens
tattttggtattggaaatatccccagtttgatgggcaactttgaaaatgctgtggactacttccacacagcccttggttttaggcgaaaagaaacattttttgttacaaaggttggtcattgcatcgaaaaggacattggtgattttgaagcttaaattggagcagacattaaaggccaattaaaatgttatgactttgatgggcaaacaaagaagacactaaaaaacattatttcacctccgtgggatttcagggaatttgaagtaaaaaaacagactgcagaaaaaacggggcttacgccattggaaacctcaaggaaaactccagattccagaccttccttggaagaaacctttgaaattgaaatgaatgaaagtgacatgatgttaaagacatttaagtcagaccccaggacgtgactccagtcagtggttctggtccccctgtcccagggtaggaacaaaaacccgccttaaaagaatggattgcacacctttgcaacaaatgtgttttgattttttgaacctacaaaaaagttaaacaaagtggaataaagaaggttaaccctccaaaaaaaaaaa

SEQ ID NO: 655274 - DNA, 113 bp, Homo sapiens
cagtaaatccaaaacaataaaaattttaaactacaaaagatagagtatagtattacagcaaatataaagaggtaatttatagactgtgtgaacgtaatatcaggactatttac

SEQ ID NO: 655275 - DNA, 763 bp, Homo sapiens
cttttttaaagaaaacccctgggtctgggaaggaatatttttgacctaaatagagcccggggacccctggaactgataatttcaaccgaacccagaagggttattaagcctttttaccccttcagagcaacatggcttatcggccaaaaccctccaagtttttagacaaccagacgcttgctcctcccacaacacctggttagcaatccatggtaagaaggatacatgtcttttagtcagccttatagtttcacatagtgtgcctcttatagagagctcatccccaagtggtgtggcaagaggagcacaatttcctttcatactcctgttaagcagtcacttacggtgctggtctcatgaagaaaagtccttctggcccaatctctgccatatcagtgaacatgtacagcgtataacactgagaaattttcttcagtagttaggattatatcgttacgctgttgtctacatgcaatcttcaaacagagaaagtttcgttatattaaaacacttaggccaccattgggtctttcccatttctacctaagtcagcattcatctttgtgtatggtgtctccccgagtaaataaggaaataacaaagcccgtgttctcagttttttgggaccacactcttactatgagttccagttcgtctttggtgaacaactgtgtaggtaatccagtcgcctctgtcttaagcatcgtcataagtggtcaataaaacacagtggtggtcgcgtaacattaaaggcataaatgac

SEQ ID NO: 655276 - DNA, 106 bp, Homo sapiens
ttggagctcggtaccatgctgctgtctagtttttatatgaattcccgcttccaacgaatcctcaaagcaatccaaatatccacttgcagaatccacaaaaagagtg

SEQ ID NO: 655277 - DNA, 641 bp, Homo sapiens
gtgccacttggcctgcctccgtcccgcgcgcgccacttcgcgcgtgcctccgtcccgccgcgccacttcgcgctggctccgtcccccgcgcggcggccaatgccgtgatggccggtcctcggataacttacgacgtccagcgaaccttgcaccaccgtcgcacaaagaacggtgacgccgtacgactcagcgttcggcgcactcgaaacgcattgcatcaacagtcggcacgatccaacaattcctccgctgccggctgtccagagaaggaccagacactgaccgtgtgcaccaggcaccctaaaaagaatacggacatgcaggcacgctaacacaccctgaagagatgaaatcccatctgctgagcaaaccaacaccgtggctgtctgagaaacgggagtacataggaggagcatcgctagtggttaatcaagggaatccacaaaatgcctacaaagaccattggaacaaacccacagcgccacgctgaacaactctagccgcctgcacacaaggcatcccagaaaacccacagcaccagcctgggcaataccaaccacaaagaaaaccaaccgcgcaaaaggaacaccagataacaggcacccaagcgaagacaacaagggcgcacaatacagcaaaaa

SEQ ID NO: 655278 - DNA, 471 bp, Homo sapiens
  misc_feature (75)..(75): n is a, c, g, or t
  misc_feature (111)..(111): n is a, c, g, or t
  misc_feature (432)..(432): n is a, c, g, or t
  misc_feature (434)..(435): n is a, c, g, or t
ccttcctgtacgagaactgggtggtgggaaaagggggcttgtttttcctttctttgtattcactgtaggtgtganatgtttgacaatttgacagtctgtgacatggttcanagatgtggttcctgcatgttatcagggcttggccaggttcaggcaggcctgcaggctgtccctacaacgggcagattgaagtgtgcacagatgtccgtgacagggctgtgaccagcctgtgatcaggctgtgaccaggttgctgcctggaccaggcagagctttgtcccataataggggtgctgccagggagtctggcacctggagcacagccactggcttggacatgagccatcaaacagcatggaataaaaatagaactgcttcagccggagaggagacaggctgagctccttgctgggaggcctttaaaacaagaacngnnttcattgatctgagactagtaaggaagttgctaggg

SEQ ID NO: 655279 - DNA, 409 bp, Homo sapiens
  misc_feature (15)..(15): n is a, c, g, or t
  misc_feature (22)..(22): n is a, c, g, or t
  misc_feature (125)..(126): n is a, c, g, or t
  misc_feature (138)..(139): n is a, c, g, or t
  misc_feature (265)..(265): n is a, c, g, or t
tctggtccttcgggngtgaccnctgtatgaagctgctgacgcactgtgactccagccagagcccccccacgaaattccttgagctcataggcattgctcaggggtcagactgacagttcgtgagnnactcacgtgagnnttgctggaacgaggggagaggctgccacggcccgacaaatgtccctgtgaggtctatcatctcgatgagagaacctgctgggacgacagaggcggtcgcggtttcgccccaagccgtgtcggaggnaagccgtcgatacccagttctgaagacagtccatgagaagtacaaggccaggccccttcagtgttgcagcagtgtgctgacggcagcgaatggcagccactgcctgggagacggactgggaaccaaaaggcagttgggcatggg

SEQ ID NO: 655280 - DNA, 871 bp, Homo sapiens
gcgacggctcgtcgagcccaccaggagtggaacatacaagtacagatcagctattgaaaagatagatgactaggtggagtgtaccattgagtcatactctgcaagatgatacatgtcacatcaagacaatacgactgcgtgatagacctggactataccatcggagatacccgatagacaatgaactcacggatgtcacgtcacgtcaatggacggaatcaagttctagtgtagtcctcatgtagacctggacggaagccatatccacctgcaaagcatacaagtttaaccactcttttcttgtgctacatacgccagtggaaggacaaccgcgcacagggctccgattcgctcactcgtgagtcgtcagtcacgtaggccgatatggagaaccattgaaatgagtgcttataccatgaactcaggggggaccacttattttggcccatccggggctggtgcacgtccacgtctctcctagggcatgagacttctaaattaggaactcaactagttgagttaaacagatacaacttggcgacgtgcaccgctttggagcgaagggccctccaacctaggcttgtagacttattcacagatacattcctttcaatgacaggagatcggcggacacattgtaaaaagctgcgccatttgctgggtcgcaggcgcacctagaaatagctctggacattcacattacctactcggagtacgtgacgaccattgttggggcttttctaggtgttcgggaccttggcaaggggatagggggggcctttggagtctaccaactaccagaagattgaaccgtgtgagccagaaaacctcatttctaagttccctagggaaagagacacacatgaccatg

SEQ ID NO: 655281 - DNA, 267 bp, Homo sapiens
cagtggctcatgccgataatcccagcaattcagaaagctgaggcaggaggattacttgaggccagactgggcaatatagcaagaccccatctctaaaaaattaggcatggtggtgcatgcctgtattcccagctactcaggaggttgaggtgggaggatcacttgagcccagaagttcaaggctgcaatgagccatgattacaccacggcactacaaccttggtggcacagtgagaacctgactcttaagaagataaaaagtcgacg

SEQ ID NO: 655282 - DNA, 953 bp, Homo sapiens
cgcaagtggcgggagctgtagtcccagccacttgggaggctgaggaggagaatcactagaacccaggaggtgaggttgcagtgagccgagatcgtgcaatcgactccagcctgggcgaagagtgagaccctgtctcataaaaaaaaaaacaaaaggaaagcaaagcaaaacaaaaatgacgcaaaacaagaaaaatcagccacagttccgctagattcacagtcaaccaaaacccaaaacagagcccaaaaccgctacaggttccactagattcaccagccatatttcctaagcaggagcccaacattagccacatgttcaacgtagatcacagctcaaccaaaccccaagagaggcccaaacctgccaccggttcccaggtagactcacaggtcatacacaaaaccaccaaaagaggcccaatctaccgccaaagttcccacttagtaattctcaacgccaaagtcccaggagcccaaccacagccacccgcttcccactaagcattcacagtcaaaccaaatccccaaaagaagccccaaaaccacccacagtttccacttaacatcacagtcaaccaaaccccacagagaccaaaaaccaaacgtttccggttcacaaaccaaatcccctaggtacattgacccatccggtactcagcattcacggacaggccacacccctgaggccaaatgcggatgacttgttgcactccttctgaatccaccgtgtgttttctacacaccactgatacctgaaaacagacgagagcagcgaggtgagagcagcgccatggtagccacgatgcctcagctacctctgtgcttgcccaggcaactgtgggaactttcagggtacttatagcatcggtgccagcgatgtattaagaaatgaagcagcggttaataaacccggggcgggccatgacacgggatcatatcggaaataccgag

SEQ ID NO: 655283 - DNA, 375 bp, Homo sapiens
  misc_feature (149)..(150): n is a, c, g, or t
aacggtcgcgccaaaaagggccgcggccatgtgcagcccattcgctgcacgaactgcgcccggtgcgtgcccaaggataaggccatcaagaagtttgtcattcggaacattgtagaagccgctgctgtcagggacatatctgaaggcanntcttcgacgcctacgtgcttcccaagctctatgtcaagctgcattattgcgtgagctgtgccatccatagcaaggttgttaggaatcgatcccgcgaggcccggaaggaccgaacacccccaccacgattcagacctctggcgctgcacctcgacctccaccaaagcccatgtaaagaggccgttttgtaaggacggaaggaaaattaccctggaaaaataaaat

SEQ ID NO: 655284 - DNA, 776 bp, Homo sapiens
agcggatactctccagtgacgcggccgtcgccgcacctgcgcggcggggcgggaaggagactcccagcgccggggggaagggagtctacgactcgggagggaggtgggggagcacgggagagagagacgggaacaagggagacacggacgagacggccggacaggcggacggggcggaggggcggaggggcggaccgggcgcgaggggcggtccttcccggaggttcttaggtccttcacttcctgtgttgccggcacttcaaaatccgggtcaaagggtgtcgctatcgcgtctcattctccaccggctgatcccagacactctccgtgacagcgcctcctgactcagcccaggaccggcttccttctcacgacctgctggagactggacgaccacacctgacccggaactcggcaggcgtgcttcctcaccaccacgacggctcaccagccccgggctctgaaggcgtccccagcacgtacaggacacagacacataggagagagagagcccgaaacagggacacccttcggtgagtcactgtatggcctgaaactgcgggaaatcgcagaggcacccagtggcgcccgtgacgcgccgatgagtatacacggggaccctacatgaggacgcctcttaaaaggccaagcacatgcaagggtggcagggaccacattcacagagaatactgcccagcgacgaccaaatagactcacaccggcacacgggcaattggacaatcggggtaatcccgtgacgtccaataaaaatggtg

SEQ ID NO: 655285 - DNA, 286 bp, Homo sapiens
agaattatttggctcgctatgtctctttcccagctacagtcattaactttgcagttctgtaagcctcattgatgccatggatattaatgtggcctttatccatgaaacaggaagcttggagttggcttaatcagcatgagtcagccacgctcacctgcaatgtgccttttaacctctgttgtcatttgcctctggatccctcagatccagttttttttcctagggctttgacctgaaattcggaattgagtctgggacaacgatgtgtctcaggggagttgcatgg

SEQ ID NO: 655286 - DNA, 576 bp, Homo sapiens
ttcatatccagtgcttcactgcttagttcatagctccatctaatcctctgtgctaagtgaaagctcaaggtgattgactattgtagcgcacgaactactatgtactaaaaagcagatcatttcagtgtcttacactttcagcatataaaataaaggcttcattaggatagtaaaagtgctgtggagttaaaattcatggattaacaatagcatgtcatgtcttatttccccatcaatttcttgctttcgctcctaaaatctaaaagcaaaacagggccacatcgtttagaatgcattctctctaaaaaatgctatagtgctatagatcatatctgcctcatccaacacgagtaagctactaaattaaacgtctgttctagctgatgtcgtgaaaggccattacctcatagttgattggcaagatatgagttcataaagaatttgcctttctgcttaggaggataaagcaatacaataattaaaggatatctaatatgcaaaagtctatattaagggaaatattacatattctctttacaatgtccagtgtcataatatgttatgtatccatgcttt

SEQ ID NO: 655287 - DNA, 254 bp, Homo sapiens
ccgaatcaactctgcccattctataatctactgtgaaatatcttctatcttgatacattcctctattacttcttcatagtcttatctctggcctgcaaggtattttattttcttcccaaaagggtcccatctttgctatctgttgatcagccgtagaaaatctaagtatgatcaataaattttaatggttgatggcatcctgtgtcagctggagtagttggttgtgaatattaaaacctagtactattttccct

SEQ ID NO: 655288 - DNA, 1011 bp, Homo sapiens
  misc_feature (36)..(36): n is a, c, g, or t
aattccatccgttagtacacacacatacaaggaacntagacgcagaccctacaatgaaaagcggcagcatgaaacagttaaactatatgacacacttgatcgaatatgacagacactgaaaatcacgattcatacccctccagcacctctacctgttgtccgtcgatcacagacggaatgcacatcgaaagattacctggggtcatgcttcaactgcccactagcggactatgtagactctaaattcgtatgaaggattcgactgtgaagcatagaatacatggcagcgaatgtgaaatacctaaattgcacaagtacctcatttctatatataagccataccgtttcccttgctatttatcttgataggtactcatgatttacaccgccgtaataatacaattagtagctatctaggttaaataaaattatccaaaagatcactcattatgtcatactacacatacatttcactttcagcgcaagaaaaagtcacaccacaatgatttccaactttgttatcgtatattaaatcaaaatcctcatatgccgcatactaagtatagctccattcgacttatactgtacaaccatcgattatcataatacctcataattaatgtcatagataatgctatgttatagtaacactacatattagagagtcatacactctctactatgcgacattaacctcccaccttccatttataatacacacatatattatattctctatcataccattgaccaccaccatccagaaaagacgctaccaaaccgcagatacctgattaagaaattactatgaagtatagactatttattagaaaaccacactagtgcggaaagacgtgatcaatttccacaacatgtccctctccacgctttgtaccattatacaacctatatcgaacctctcatatacacccaccatcgtagatcctatatttatcctacatatattctccgcaacgccccaccacaaacaaaatcatattatatttatta

SEQ ID NO: 655289 - DNA, 282 bp, Homo sapiens
agtccggtatggctcgcgcatctgtaccggactttttcgcggtgggccgtcgctcggcttccttgatgtccagggtgatcacgccccatttggcggtgggccgcggtggtgggcgcgttgcttccaggtcgataccgatgaagtcgaaggccaggcccagccctcctctcggtcaacgcttttgggcaccacttgcaggcctagactgatcagttgcgccaccaacgcggccgctatgcgcggggggtttttctcaaacccttgacgccagcgttcggggtt

SEQ ID NO: 655290 - DNA, 151 bp, Homo sapiens
tgccccacacctggacatcctgaaaatatgctaaggccatatagacacggtcgccctgcagctcagaagctgggcagtgtaaccagccagcactcacaatggctccaatgttgcatgcaactgtggaggctacgtgtccaccactgccttg

SEQ ID NO: 655291 - DNA, 342 bp, Homo sapiens
ggtcgacctgtgactgccatagatggatctgagcagagtacattgaaaaccttctggaaagaattcaccattctaaatgccattcatagaaagaggtcaaaatatctgacactggctgggcatggtggctcatgcctgtaatcccagcacattgggaggccgaggcggatggatcacttgaggtcaggggttcgggactagtctggccaacatggtgaaacccgtcctcactaagaatacaaaaattatctgggcatggtggtgcatgcctgtaatcccagctactggggaggctaaggcaggagaattgcttgaacccaggaggcggaggttgcagtgagc

SEQ ID NO: 655292 - DNA, 449 bp, Homo sapiens
cacgaggggctgtcaccggcttgggctcgagaatggtcagcttaagcgtgtagaagatcaccgagtcgatgacgaaagtcgtcgcgcccacgagggcgaacttgatgagctcatggtgccgctcggcgaagggccggatcgggcggggtagccgcgcaatcgtggcatcagcgaaggacacgaggagcaagtctacggaaacaccctgccgaaggtgaacctgtgcaggtcaccgccggtaccggtcggcccggatgcgggtcgcgggaggcatgacaacatatgtgccgtgccccgaacgcccagtgactcccgagcgcccatcgtcgcgatgatcggcgggggccagctcgccagaatgacccatcaggccgccatcgcgctcgggcagacgctgcgagtgctggccgccggacccgacgatcctgcggcacaggtcacacccgatg

SEQ ID NO: 655293 - DNA, 1800 bp, Homo sapiens
acagtgtgatgtcctttatgaatccgttgtgtcactgctcgttttgtcctactcggctgtcgactcgtctaccctgctatcgtcgctgagactcacgtgcatggtgctgcggtgactagacgtcgggtggcattctgctgggccctgcttgcgtcatgctgttactatgtctgttgctgcgattgtcatgtctctgtgtcttgttccatcctttgtctgtgttccgctgtgtgctgtggtgtcgctgttgttaggatagttctcgctgtgatgttatcggcctgtacacctgttcagcttgccactgggtatatagttggtttcgcctgtactgcccctatcatcctcgtttgagtgggatgtgcttccgtactcggtattcttatctcgctctctcatcgctaattgtgttggccgctggtggctgatatgatcgtgcgcgtggtgccgctgcgtgtgtcggacgtggtgtgtgttcgagctggccctttgcgggccgattgccgttgtttcgttgttggcgcgctggagtgtgtccggtatatgtggcttgcgatgtgtccgtctgtgtggtttgacctatccgtgtgtgcgtcgtctgtggggaggtctggtctgcgtgcttctgtgcttagattttgttgtcggtgttgcggtgttcgtctcgtctcgtgaggtgtttgttcggcgtacgaggctggcaaggtgactgtgggtgggttgttgcttgtgtcaaggggttggtggtggcaaggcggttggttgtgtcccgcccgtgtctcgttgtcgtgttagccgtttaagctggtgcctagttgtgtagtcctagagtgtgatactccgctttgaagtgtggatgcactgggggttctgtccgtcgcctatggcttcttctaagtggggtgccacttttggtcgtcgatccgtctctgtgtctgtgggcctttgcctctgttggtttgtcttttgtggcggactcgatagaagcctgttaacgcactggtgcgtcgggcgaatctaatgggctctcgatggcagtgtgtatgtgccaagtttgtccctagggtgtgacctctaggggtggcgatctcggttgtctgtcagcttgagaccccgtgagcgtgttgtgacttttatggtctggtttgggtctcagctcgctatcctaactctctcttggagatatctagtctgtagcatctggagcatgcaggtgagatcccttgtgtccgtggtccctcctgtttaggtctgggtagtcgctgtctagtgagtgtgtagggtctgtagctcttgtaccgatagcatatggtagttgtcctctgatatagcctgcagcggtctcatgtaggatcatagtgacctaactttaagcggcgtataggatcgcgaggtttatatactggcttggtagatcacatgtggagtctataattgctttgatatgagggtactctatgtggtgagcgcgatagctcgcgcatgatgtcgctcactgtgccctgtagcatgctacacgcactgtctctggtaggttggcgtgctgctagactgctgccgctacctcttgtaggtcacacagtgacttatgtcactagtaagacgatcggggtatccgctgttaggggtagccaaggtccagtaagtttgggaggtaggtagtcccgctagagtctctagaagagtgggctctttggagtacagggtccccggcctcttcctttatagattctctccccagctggaaggccgtatgactgggtggtcgggtagggagacttacagctctcctttctgtcg

SEQ ID NO: 655294 - DNA, 1062 bp, Homo sapiens
  misc_feature (10)..(10): n is a, c, g, or t
  misc_feature (85)..(85): n is a, c, g, or t
  misc_feature (172)..(172): n is a, c, g, or t
  misc_feature (176)..(176): n is a, c, g, or t
  misc_feature (231)..(231): n is a, c, g, or t
  misc_feature (241)..(241): n is a, c, g, or t
  misc_feature (250)..(251): n is a, c, g, or t
  misc_feature (261)..(261): n is a, c, g, or t
  misc_feature (268)..(268): n is a, c, g, or t
  misc_feature (270)..(270): n is a, c, g, or t
  misc_feature (273)..(273): n is a, c, g, or t
  misc_feature (446)..(446): n is a, c, g, or t
  misc_feature (448)..(448): n is a, c, g, or t
  misc_feature (450)..(450): n is a, c, g, or t
  misc_feature (452)..(452): n is a, c, g, or t
  misc_feature (471)..(471): n is a, c, g, or t
  misc_feature (476)..(476): n is a, c, g, or t
  misc_feature (521)..(521): n is a, c, g, or t
  misc_feature (525)..(526): n is a, c, g, or t
  misc_feature (551)..(551): n is a, c, g, or t
  misc_feature (571)..(571): n is a, c, g, or t
  misc_feature (637)..(637): n is a, c, g, or t
  misc_feature (1062)..(1062): n is a, c, g, or t
ttttttttcnccaaatctgggagaattttcaaaataagaaaataacctttatatgatatactatgactaggctgtgtatttcttntcagggatttctccaccctcagggtgggatgaagtgcagttactattaccatagccaacctgtagttttacataaacattttcttgnggancaatagagttccccattttacagaagcattttaaatgtagtttgaatattttccncaagatgccncaatgtgcnntatccccccntttatcncnaanaaagactaaactggttgtcagttacatctgacagaaaaaaaaaaaaaaatcactgtgtaaccaggttaagtggtaaaataatccaggcgtcagtcaaaggcatttggctgactttaatattgattatatttttaacaggaatttaagaaaatattactggaattaaaaatatntntntnttaaacaagaattttcttngctcngtctagcttaaactactactcaagctgcttaagttcttaagtatngttnntaatcaccaataaataagtgcattngtaattcatcagtcattatnagcttttattaaaagaagattacgttttacaatgtaactataatctctggaattggggtatcttantaaggagttttaaagatgtaaaacctaaccttttttaaaggctccatggtcttatggttttgagaggcttttccataaacatttttcttacatataataaacttttcaaatctgtgcaaaaaaaaaaaaaaaaaaaaaaaacaacacaaccaaagccaaagacacaccacagacaacaaaagcacaaaaaaaacaaaaactgtgttgggggggggcccgcgcccaagagaagtttcaacaaccacctgtgggggggggcggccccagtggtagaacaacgccggacaaggtgtccaaaaaaaccgcggcaaaaacggcgggggtccccccacaaaaacaagccggcggagaacgcgcggtgacaacacccaccggggggcgggggcaggggtcagaaggggccgacgagcacccgcgccgagggn

SEQ ID NO: 655295 - DNA, 1096 bp, Homo sapiens
  misc_feature (408)..(408): n is a, c, g, or t
agtaggaatcacagcttcatgagacatgcctaatgacctggtgtcaagatgctacacgtggagtccccaccagtgcctcacagttaacgtcaggttctgcagcactccatgggtcacccgagaaagacaagcttccctcataagccagctgtcccaccaggacctacagtctctgtgaacgtggagcctctgggctgccacggtactccgtgactcaacagctccaagcctcaccccccagcgtgaagcccattcgagtctatccatccatggagcacagccggtggagttgagtgaagtttgctctatcgcacgcacgcctgtgagtgacaccaggggcattctgggccgatacgggacgggtgcatagtcctttgacatgaggtcatgcatagctatctccacganggcgatgcaaggctgggaaaccacatgtggtcgcagatgcggaagctgtggacatccgcgaggagggcccgagggcaacgctggccaggtcctcatgacaccacgcccgtacattgacgtggtgtgaagcaagtgccattctccgttccccaggatggacgtcttctcggcctcatcgctcgtgcgtggtggaaagcgattcactgtataaacgtatatccctatgcacaaccaacatgggcatcaaaccacccatggattttcacaacgatcccattgtgcctttctgggagcagaaacagccattgcgggccccaggacgggcactgagtcacagctggggctctcgtgaagactctttagagcaagactctgggatcccaccctggggaaccactcaatgattgggcccaccttgtagcccatcttgcaacacgagcctccgaagaacatgtcccagttgtcaccctcgtctccagaggcattcttgccctggtcatatggcaggaaacttcaattctaataccccgcaatcagctacctatatcacggttcctagtacgaggctggggaagttcctagcaacccacttcccgtggcaacaatgcagtgggtcaacagtgttcctgtccggaatacccgcatcaaggcaccgagagtcctgcttgtctacagcacggggatcccc

SEQ ID NO: 655296 - DNA, 815 bp, Homo sapiens
ggcggatcttagctgtcgccacctcgcgccgggtccgcgcggcccacgggaccccccagtgatgctgcccggcccgcggatccacatggacgtgtggtgggcctgaagcctccggcgggtgctcgctgctgtatgcgtgataaaatctatgtcagtgaacttctaggaacatattgcaagactcgtgacgtgacataccatttgaaaagccatccacggaatggaaggacaatcgggaagaagtcgctaattgagagaccttacacgaaagcaagtgatcgaaagtgactatagactgtgtagcacagcgtggacaatttgcagacacacttctacttaccatgacacaaatactgctagagagcaccctaatctggcaggctatgctctgatagtattgtgacgaatggccgtcctcctacacggcatagtcacttaagggcttacactcgcgtccatgacggtgccggcccgtcactcctaaccagggacttcggtcttctcttgaggaaggaggatcggcaagggtggctccgcctcgtgtctcttctcgcactccgttgcctgggcagcacatgaagaaggggacgcgccggtcggtcattcggcaatggaagacgtcctcccccagaaatcacacggagcatcacccttgattctggagacttccatgaacacacaagaagctgtgagaaatgatcacacgtttgcttgttgttttgagcagccaggtctggaacgtattgtgttgtggccggtcctggggtaagaggtaatacgatatgcctcacgattttgaacagatagagtgttca

SEQ ID NO: 655297 - DNA, 335 bp, Homo sapiens
  misc_feature (335)..(335): n is a, c, g, or t
ccggtcttggtcatggttcatggcaccactcctttataacaatgccctctctcaccactcctattcaacatagtgttggaagttctggccagggcaatcaggcaggagaaagaaataaagggtatccatttaggaaaagaggaagtcaaatcctccctgctttgcagataaacatgattgtatatctaggaaatcccatcgttctcagcccaaaatctcctgagctgatagcaacttcagcaagtctcaggatacaaaatcaatgtgcaaaatcacagcattctatacacattacaacagtgggccaatactgagtgaactcccattcacaattn

SEQ ID NO: 655298 - DNA, 149 bp, Homo sapiens
gattctcgagccgcgacagcttctccggccgcacagcttctcccacacacacaacacccacgtatgtatatataataatgagatcttaatgagatctttatggacaaaatcctagacagtgacttatgagtttagcagcggagccacgc

SEQ ID NO: 655299 - DNA, 373 bp, Homo sapiens
aagccacaggaggtttagccccagattcaaaagggtgtccaccgccagctcgattgacttgcctcccttgcccccccccagctttgggaggggggttgtggccgtttttcccaaggggtcaggctgttccggcccaaggccaaggcccaggcccaggcccagggttcaacaagggcccgggttcagcccccgcttcagtttcaggtcagggttcccaaagttccccgggcccctccaagggtttcaagttgattttttttcccaccttagggcaaaagggctggttgggcccccccccccccccccttgggttccctttgccttggggtggggtcctcctttgctttttgttccaattaaccttaggccggga

SEQ ID NO: 655300 - DNA, 857 bp, Homo sapiens
tgggtgattaactcctttccctggtgtccttttcctctccgtatttgcctctctcctcccatttctggggtcctacccattcattggccttgtagactaggggctcgtggccccttgcggtggcaccatgactatccatgagggtatggtttagcctgcatctttgtcgcatctgtaacgcctgcaagacctatttgtggatcaaagctttggatccagactcatcgaagggatcccatcgaacaaggaaagcttacttgagatggtgtgtccgtattcactgggatgtacactgtagtcatactttgtcactcagttgatgtatgtcaccacgcattgaggcaccgcatgaactctatccttcaggacagctgaggtggcatgaagctgccattactatgtacttagctccatctggtcctgtcttcctcgttgcctcctcgttcctcttgcttgtctctttatgcttttctttggcttgtctttcttgccacctcctcctcctttgtcttcttcttttcttccctcctcctgcctcctcgctctctcttgttcctttcagtttcagatctgtgggagacaaatgtgctatggagactgctattcttgtgctccttgagtaatgggggggatgttccctctgcgtgctagtgcaaggagcaaagctagcactatttggtgctgaagaggagccgagatgaacgtcgaatgttcagtccctcggttcctcttagaaagcaccatgtgttcctttgaaggtgaaatgtgttcgaatgcgttccgagcagaccccgaatcaccttctacgtgtaccctgacagcgactatatgtatctggcatagagctcaaattaccg

SEQ ID NO: 655301 - DNA, 442 bp, Homo sapiens
cccatctatcttaacaggatcaccacataaactacagattgctgcctacatgagacaaccactatcgtcaatactggaaatcttcaaatatcttatgttgggaacgcgtctccccattgccagttcgagttcactcaattcttctgtgacacaggttgcaccggactcactcaactatggagatcagatgtcctcaggaaaaaaaaaaaaaaaaaaaaaaaaaatacccccttaaggctgtgtcccgggcctcctctctcttcctgacacattcccaaaagggaatttagggattgtggggaaggacaaggggtgaggaatttctaggacatttataaacgcccattgtaagcaactctattgcttgaagggccatgcacaataaacctcttgggcctgtatgcgagaagaaaatttgggtgtatgctgcctcatggtttgc

SEQ ID NO: 655302 - DNA, 540 bp, Homo sapiens
ctcggctctagttgtcctgagcacacattcggcctggtgcgtagcagatgattagttgagaacaaacgggtcagagcggtcgggaacacagcagtgtgtctcctctacttcagagaacagcgtcctaattctgcttttcagataaatctttagactcatcctcccacgactccttaacatgagatcaccgggttatatatttaatgaagaagtaacagatgttccttatggtgcagttctacttgagttaatgtatttcaccagccaatactactgtattccctattcagtaaacagtatatttaatacatatgtagtacagtaaatgctcttgcattggaatactgcatgtacaatctgatgaaaccctaaactctgtagtttagttaaatggtattgtagcattgtcctgggtcctgcaaatgtgccgtggttatgtacagatgttatcactggggaagctggatgacgggtatgaaggcacagtctgtactatttttgcaaattctcgtgagtcttcaattatatcaaattacatag

SEQ ID NO: 655303 - DNA, 1343 bp, Homo sapiens
aagtttgcccccagacaggggtcatttttgggggggtttttgacaccccccttgtgggagagagcgtgtgataaaaattggtccccctccccccagtacaaggtgtctgagtaaccagggggggcacccttctttgggtgccacacaaaggaggtttcacaccttgggcggccacaaaaaaacaaatcatttctacggggggggcccccccccaacagttatatttgaggccgagagcaacttcgtgggtcttcccgccgtgatagaaggatcccccgagagatgatggggagaagcctttataggagccccacacggttatgacccttggggtggtctacacagcgctaacagagggttgttgtaggaggaggaaggggagtggccacctcccaaccccaacacgtggggggtactaccgcaccaccacacgaccacagcgtggtgttgaacttctgaagggagttctttgagagagctttgctcttggagagagcccgaaacacgtgcgtctcaacacacagagagcctcttgagaggtgtccggtggacacacagtggtccccacagtggtgccctctatgggagagagtttctgacgacctctcggggagactcctccactctgagagagatattctctctgagaaaggggccctacacgcgttgtgggagagagacacacagctctcttgagagggtgagaagtagtgtgtgagagagcgcccggctgagacacgcgtctctcatcacacaagagttgggagcgacacagtcgtcttcacacactggcggggagattccctcctgcgttggcaacacactccttgagaggttcaccagagagcttggccgaccacagagacgctctcgggccacagagaggggagacacaggcgcgcccacagcgcgcacacagagagagtgataagagaggcggcctctctgggctgtagaacatcatctatagagggttaccaaacgctgtgagagaggctcgagagagatatgggccacactctatacgccacgcgcgcgctcgtcgcctgtgagaagatatgtggacgagagagagactctgtagtaatatctgtggtgggagatgcgcctcgtgtgagacacagcaggcgcaacctctcacatgcacaataccacatctcacaaaagagcgcacccaccaccgcccggagatatatgtgtgagatggcacaaaggtgggggttttgagagagccacaatgagacacccacaaaggttttgagggcacattaagaccccccagagagcagggtacacctttgggggaacagggaggcccaatataaaagattcaggagttctca

SEQ ID NO: 655304 - DNA, 1230 bp, Homo sapiens
gaagagacagcgccgcggccgtggggagcggacgcagtgatttgctccccctcgtgcagcaacccccacacccagcaccaggcccccagaactctccttccagctgaactccctgggaacaagtcagttgggctgatcactgaactcacatttctggacctgaggagcctgttcctctcacgccctcacctggctgagccgcagtagttcttcagtggcaagctttatgtcctgacccagctaaagctgccagttgaagaactgttgccctctgcccctggcttcgaggaggaggaggagctgctttccccatcatctggaaggctttctgcctccgagatgtggcaccatagtgcggtgccctgtggcttcaccgccctacttccacctccgcccagcctgtaatgtttatataagcagcctcaaggaccaagaaccatctgcgaaaggacacacacaggaaattcataaaagaaatctgaatggataaaaccatgaaaaaaagtatgcttcattagtaattaaagaaaggcaaatagagctggaagcatttttcccttagcaaaccataacagaaaaaaataagacccaatattggcaaagagactactgaaaaaacattcccatacattgcgtgtgggagtatacatcggtgcaggcttcctggatgacagttgggtgatatgtgtcatgtggcctaaaagcctccatgtcatttgacctacgaattctatctttgggaatttatcctaagaaaatacttaaggatttagttagtgataagatgttcatcccagcattgcaatggagaaaaatgggaagcaatggtttggttgggaatttattccttttctgctgtaacgaaagtttgcaataggggattgcttaagtaaattattgtatctccatccagatggtggagtaccgcgcagacattaaaagtcatgtaaaagaacatctgactgaaagaaaaatgctccttgaatattaaaaggttgtaaaaatagtgcatgttatgtgatttcaattttgttttttaaaatatgggtgtatgcttgtatacgtagagcagataaaaaagacggaaggcatactaaaaaatgttgagtggttatctttgtatggtggaacaaagtcactgtaattttcatctttggtttttctgtaatttccaaattttccacattttgtatttcatataataaatataatttaagaaaaaaaaaaaaa

SEQ ID NO: 655305 - DNA, 807 bp, Homo sapiens
  misc_feature (145)..(145): n is a, c, g, or t
  misc_feature (317)..(317): n is a, c, g, or t
  misc_feature (344)..(344): n is a, c, g, or t
  misc_feature (408)..(408): n is a, c, g, or t
  misc_feature (452)..(452): n is a, c, g, or t
  misc_feature (467)..(467): n is a, c, g, or t
  misc_feature (490)..(490): n is a, c, g, or t
  misc_feature (512)..(512): n is a, c, g, or t
  misc_feature (534)..(534): n is a, c, g, or t
  misc_feature (538)..(538): n is a, c, g, or t
  misc_feature (551)..(551): n is a, c, g, or t
  misc_feature (555)..(555): n is a, c, g, or t
  misc_feature (565)..(565): n is a, c, g, or t
  misc_feature (585)..(585): n is a, c, g, or t
  misc_feature (638)..(638): n is a, c, g, or t
  misc_feature (681)..(681): n is a, c, g, or t
  misc_feature (693)..(693): n is a, c, g, or t
  misc_feature (695)..(695): n is a, c, g, or t
  misc_feature (702)..(702): n is a, c, g, or t
  misc_feature (704)..(704): n is a, c, g, or t
  misc_feature (709)..(709): n is a, c, g, or t
  misc_feature (714)..(715): n is a, c, g, or t
  misc_feature (722)..(723): n is a, c, g, or t
  misc_feature (729)..(729): n is a, c, g, or t
  misc_feature (731)..(731): n is a, c, g, or t
  misc_feature (737)..(737): n is a, c, g, or t
  misc_feature (792)..(792): n is a, c, g, or t
agcggggtgtggcggggaggcgaggcggtcgttcgagcgcgctagtcagctccctgaagggagtgacggcggttgggtgcccgcggccacttttgccttcccgggagatgtccttgcttctcagatgtaaatgcactttaagttngttattcaacagtgaaaatgagtcatacagaggttaaattaaaaatacctttgtgaaataaattactagatgctgttgttggtacctaacaagagcttaacatatggaataattcttacacatggagcatcaggagatatgaatcttcctcattgtgatgtcactggcatcncatcttgcatctcatgggtttttctgncctgagatttacctgtaaaggccttaatattgtaccatagaattaaggcgtataaatcagtttngaattacctgaagacatcaggagaatacaaacttgcaggtgttntctgtggaggtcgtnccaatgggctcaagagcagctgnttctgtaatgtgtcacattgangccagatgatggtgaatgattncgtncggggtctcattngtantttcttaccnaatgaaccatccaaagcagnagaataaactcagagatgaagacctctttcgtttaaaagagcctgtactgttngtgtcaaggctcagcagatgaaatgtgtgacaagaacttgttnggagaaagtggnanagaaaangnaagtncccannaaaatcnntggatngngaaggnaatcattccatggcagtgaaacgacggtcgacaatgatgtttcaaagaaataatnccagattttgtttgg

SEQ ID NO: 655306 - DNA, 120 bp, Homo sapiens
tttataaaaagtattaataaaccaagatgtgcctaaatattagggtacttcatgctaaaggtcatagaaaatatatgcgtcgcccgagagttttggaagcaacgcacccgatgctttgct

SEQ ID NO: 655307 - DNA, 2686 bp, Homo sapiens
gaagagacagcgccgcggccgtggggagcggacgcagtgatttgctccccctcgtgcagcaacccccacacccagcaccaggcccccagaactctccttccagctgaactccctgggaacaagtcagttgggctgatcactgaactcacatttctggacctgaggagcctgttcctctcacgccctcacctggctgagccgcagtagttcttcagtggcaagctttatgtcctgacccagctaaagctgccagttgaagaactgttgccctctgcccctggcttcgaggaggaggaggagctgctttccccatcatctggaaggtgacagaaatgggctgggaaggtccgaacagcagggtggatgatacgttttgggcaagttggagagcctttgcccagattggcccagcaaggagcggttttagattagagacactggctggattgaggagtagaaggctcaaacaacccaaggttagttggtctttgtgtgacagtgggaagaagtggagagaacactctgtctccccgacttccttcttgaccctccttccgtatctttcattcttccccactggcctttccagatgaggtccaaaagtaagctcactcttcagggaaaagtgatactaaacccaggcgtgaggagtcatccttctgctcttacttttccctgcatttccttaggctggcccagactctagattcctgggcacttacctgtatctgagacccttagacctcctgtctcagtttctccacctgtgagatgggcagtcacacagatgagtgtgcatgagggaatcagaagcccatctgggttgactcagaacccgggctctccccctgctgtgggtggaaacaaaacaccttttcacagaagctgttgtccctcccccatccctgataccatcacccagaagctgggtggggaatgggaagctggaggagggggttagagttagaccaatgcgaggagctagtaagagctcgcctctccgtgacttccccccatgcaagggtggcccaaggcttcccctgatatccaaagcaggacagcagccccttggtgggattctaactgctgctactctgtttctttcctcactttgctttccaaggtggtatgtgatccccagctcaggcctgtgcagacaggaaattctcccctgcagcaagtaggggaggtgggttgtgggatgtgacctccttccagatatcaggcagtgagtgtaaacctgccacctccagccctgatccattctcacctagcggctacaggaagctgtgtctgttcgatttggtgggaggagatgtgcagggagctgtatcttgtcctccgcttgtgaaaaactcaaggatgtggagaagagtagaccgtggaaccctgctcttctgcagccaagctgaggggcaggatgcgtgtgggacagtggtagagaagcaggggatagactcataggctgcaacaaaggtgactctgtccctggacactgcctccgtactttctccttgcttcactggccacagcatctccctccagccctcgctatgtgcctctgccatcttcacccatcatggagcagaggtgaggagaggcagcctgggaatatggagaccagtgaaggaccaggcctggagagcacagggtcctacctgggcatccagcagaggagcccctaaaggccaggagcaccccaagaggagggagggcagccagcctccattgacggcgagcctccagccctctcctactttgatcaccatttctctccaggctttctgcctccgagatgtggcaccatagtgcggtgccctgtggcttcaccgccctacttccacctccgcccagcctgtaatgtttatataagcagcctcaaggaccaagaaccatctgcgaaaggacacacacaggaaattcataaaagaaatctgaatggataaaaccatgaaaaaaagtatgcttcattagtaattaaagaaaggcaaatagagctggaagcatttttcccttagcaaaccataacagaaaaaaataagacccaatattggcaaagagactactgaaaaaacattcccatacattgcgtgtgggagtatacatcggtgcaggcttcctggatgacagttgggtgatatgtgtcatgtggcctaaaagcctccatgtcatttgacctacgaattctatctttgggaatttatcctaagaaaatacttaaggatttagttagtgataagatgttcatcccagcattgcaatggagaaaaatgggaagcaatggtttggttgggaatttattccttttctgctgtaacgaaagtttgcaataggggattgcttaagtaaattattgtatctccatccagatggtggagtaccgcgcagacattaaaagtcatgtaaaagaacatctgactgaaagaaaaatgctccttgaatattaaaaggttgtaaaaatagtgcatgttatgtgatttcaattttgttttttaaaatatgggtgtatgcttgtatacgtagagcagataaaaaagacggaaggcatactaaaaaatgttgagtggttatctttgtatggtggaacaaagtcactgtaattttcatctttggtttttctgtaatttccaaattttccacattttgtatttcatataataaatataatttaagaaaaaaaaaaaaa

SEQ ID NO: 655308 - DNA, 734 bp, Homo sapiens
  misc_feature (244)..(244): n is a, c, g, or t
  misc_feature (271)..(271): n is a, c, g, or t
  misc_feature (335)..(335): n is a, c, g, or t
  misc_feature (379)..(379): n is a, c, g, or t
  misc_feature (394)..(394): n is a, c, g, or t
  misc_feature (417)..(417): n is a, c, g, or t
  misc_feature (439)..(439): n is a, c, g, or t
  misc_feature (461)..(461): n is a, c, g, or t
  misc_feature (465)..(465): n is a, c, g, or t
  misc_feature (478)..(478): n is a, c, g, or t
  misc_feature (482)..(482): n is a, c, g, or t
  misc_feature (492)..(492): n is a, c, g, or t
  misc_feature (512)..(512): n is a, c, g, or t
  misc_feature (565)..(565): n is a, c, g, or t
  misc_feature (608)..(608): n is a, c, g, or t
  misc_feature (620)..(620): n is a, c, g, or t
  misc_feature (622)..(622): n is a, c, g, or t
  misc_feature (629)..(629): n is a, c, g, or t
  misc_feature (631)..(631): n is a, c, g, or t
  misc_feature (636)..(636): n is a, c, g, or t
  misc_feature (641)..(642): n is a, c, g, or t
  misc_feature (649)..(650): n is a, c, g, or t
  misc_feature (656)..(656): n is a, c, g, or t
  misc_feature (658)..(658): n is a, c, g, or t
  misc_feature (664)..(664): n is a, c, g, or t
  misc_feature (719)..(719): n is a, c, g, or t
agcggggtgtggcggggaggcgaggcggtcgttcgagcgcgctagtcagctccctgaagggagtgacggcggttgggtgcccgcggccacttttgccttcccgggttaaattaaaaatacctttgtgaaataaattactagatgctgttgttggtacctaacaagagcttaacatatggaataattcttacacatggagcatcaggagatatgaatcttcctcattgtgatgtcactggcatcncatcttgcatctcatgggtttttctgncctgagatttacctgtaaaggccttaatattgtaccatagaattaaggcgtataaatcagtttngaattacctgaagacatcaggagaatacaaacttgcaggtgttntctgtggaggtcgtnccaatgggctcaagagcagctgnttctgtaatgtgtcacattgangccagatgatggtgaatgattncgtncggggtctcattngtantttcttaccnaatgaaccatccaaagcagnagaataaactcagagatgaagacctctttcgtttaaaagagcctgtactgttngtgtcaaggctcagcagatgaaatgtgtgacaagaacttgttnggagaaagtggnanagaaaangnaagtncccannaaaatcnntggatngngaaggnaatcattccatggcagtgaaacgacggtcgacaatgatgtttcaaagaaataatnccagattttgtttgg

SEQ ID NO: 655309 - DNA, 130 bp, Homo sapiens
ccagctccaggggctcagcaggcaaagggaatcactgagtggggcaccacccgtggactccattatctcaacctctccctccacaggttggaggtggtaggaacaacccccaccaaacccagagccgaaa

SEQ ID NO: 655310 - DNA, 247 bp, Homo sapiens
ttgacagataggaaatcaatgcctatcaccttctcccctctgaagcacagcttcataggttctaggaccaccctgatccagcaaagaaccagaaacaggtgacagttaaggcaagtaccgtctggtgaaagaccattacgtatcaagtgttatacaggaatcccttctcactgcatggttagcccatcctgactggcctgtgtcatgctggtttcgaaatattaggaatatcacctccattgacaat

SEQ ID NO: 655311 - DNA, 2632 bp, Homo sapiens
gaagagacagcgccgcggccgtggggagcggacgcagtgatttgctccccctcgtgcagcaacccccacacccagcaccaggcccccagaactctccttccagctgaactccctgggaacaagtcagttgggctgatcactgaactcacatttctggacctgaggagcctgttcctctcacgccctcacctggctgagccgcagtagttcttcagtggcaagctttatgtcctgacccagctaaagctgccagttgaagaactgttgccctctgcccctggcttcgaggaggaggaggagctgctttccccatcatctggaaggtgacagaaatgggctgggaaggtccgaacagcagggtggatgatacgttttgggcaagttggagagcctttgcccagattggcccagcaaggagcggttttagattagagacactggctggattgaggagtagaaggctcaaacaacccaaggttagttggtctttgtgtgacagtgggaagaagtggagagaacactctgtctccccgacttccttcttgaccctccttccgtatctttcattcttccccactggcctttccagatgaggtccaaaagtaagctcactcttcagggaaaagtgatactaaacccaggcgtgaggagtcatccttctgctcttacttttccctgcatttccttaggctggcccagactctagattcctgggcacttacctgtatctgagacccttagacctcctgtctcagtttctccacctgtgagatgggcagtcacacagatgagtgtgcatgagggaatcagaagcccatctgggttgactcagaacccgggctctccccctgctgtgggtggaaaccagaagctgggtggggaatgggaagctggaggagggggttagagttagaccaatgcgaggagctagtaagagctcgcctctccgtgacttccccccatgcaagggtggcccaaggcttcccctgatatccaaagcaggacagcagccccttggtgggattctaactgctgctactctgtttctttcctcactttgctttccaaggtggtatgtgatccccagctcaggcctgtgcagacaggaaattctcccctgcagcaagtaggggaggtgggttgtgggatgtgacctccttccagatatcaggcagtgagtgtaaacctgccacctccagccctgatccattctcacctagcggctacaggaagctgtgtctgttcgatttggtgggaggagatgtgcagggagctgtatcttgtcctccgcttgtgaaaaactcaaggatgtggagaagagtagaccgtggaaccctgctcttctgcagccaagctgaggggcaggatgcgtgtgggacagtggtagagaagcaggggatagactcataggctgcaacaaaggtgactctgtccctggacactgcctccgtactttctccttgcttcactggccacagcatctccctccagccctcgctatgtgcctctgccatcttcacccatcatggagcagaggtgaggagaggcagcctgggaatatggagaccagtgaaggaccaggcctggagagcacagggtcctacctgggcatccagcagaggagcccctaaaggccaggagcaccccaagaggagggagggcagccagcctccattgacggcgagcctccagccctctcctactttgatcaccatttctctccaggctttctgcctccgagatgtggcaccatagtgcggtgccctgtggcttcaccgccctacttccacctccgcccagcctgtaatgtttatataagcagcctcaaggaccaagaaccatctgcgaaaggacacacacaggaaattcataaaagaaatctgaatggataaaaccatgaaaaaaagtatgcttcattagtaattaaagaaaggcaaatagagctggaagcatttttcccttagcaaaccataacagaaaaaaataagacccaatattggcaaagagactactgaaaaaacattcccatacattgcgtgtgggagtatacatcggtgcaggcttcctggatgacagttgggtgatatgtgtcatgtggcctaaaagcctccatgtcatttgacctacgaattctatctttgggaatttatcctaagaaaatacttaaggatttagttagtgataagatgttcatcccagcattgcaatggagaaaaatgggaagcaatggtttggttgggaatttattccttttctgctgtaacgaaagtttgcaataggggattgcttaagtaaattattgtatctccatccagatggtggagtaccgcgcagacattaaaagtcatgtaaaagaacatctgactgaaagaaaaatgctccttgaatattaaaaggttgtaaaaatagtgcatgttatgtgatttcaattttgttttttaaaatatgggtgtatgcttgtatacgtagagcagataaaaaagacggaaggcatactaaaaaatgttgagtggttatctttgtatggtggaacaaagtcactgtaattttcatctttggtttttctgtaatttccaaattttccacattttgtatttcatataataaatataatttaagaaaaaaaaaaaaa

SEQ ID NO: 655312 - DNA, 2632 bp, Homo sapiens
gaagagacagcgccgcggccgtggggagcggacgcagtgatttgctccccctcgtgcagcaacccccacacccagcaccaggcccccagaactctccttccagctgaactccctgggaacaagtcagttgggctgatcactgaactcacatttctggacctgaggagcctgttcctctcacgccctcacctggctgagccgcagtagttcttcagtggcaagctttatgtcctgacccagctaaagctgccagttgaagaactgttgccctctgcccctggcttcgaggaggaggaggagctgctttccccatcatctggaaggtgacagaaatgggctgggaaggtccgaacagcagggtggatgatacgttttgggcaagttggagagcctttgcccagattggcccagcaaggagcggttttagattagagacactggctggattgaggagtagaaggctcaaacaacccaaggttagttggtctttgtgtgacagtgggaagaagtggagagaacactctgtctccccgacttccttcttgaccctccttccgtatctttcattcttccccactggcctttccagatgaggtccaaaagtaagctcactcttcagggaaaagtgatactaaacccaggcgtgaggagtcatccttctgctcttacttttccctgcatttccttaggctggcccagactctagattcctgggcacttacctgtatctgagacccttagacctcctgtctcagtttctccacctgtgagatgggcagtcacacagatgagtgtgcatgagggaatcagaagcccatctgggttgactcagaacccgggctctccccctgctgtgggtggaaacaaaacaccttttcacagaagctgttgtccctcccccatccctgataccatcacccagaagctgggtggggaatgggaagctggaggagggggttagagttagaccaatgcgaggagctagtaagagctcgcctctccgtgacttccccccatgcaagggtggcccaaggcttcccctgatatccaaagcaggacagcagccccttggtgggattctaactgctgctactctgtttctttcctcactttgctttccaaggtggtatgtgatccccagctcaggcctgtgcagacaggaaattctcccctgcagcaagtaggggaggtgggttgtgggatgtgacctccttccagatatcaggcagtgagtgtaaacctgccacctccagccctgatccattctcacctagcggctacaggaagctgtgtctgttcgatttggtgggaggagatgtgcagggagctgtatcttgtcctccgcttgtgaaagctgaggggcaggatgcgtgtgggacagtggtagagaagcaggggatagactcataggctgcaacaaaggtgactctgtccctggacactgcctccgtactttctccttgcttcactggccacagcatctccctccagccctcgctatgtgcctctgccatcttcacccatcatggagcagaggtgaggagaggcagcctgggaatatggagaccagtgaaggaccaggcctggagagcacagggtcctacctgggcatccagcagaggagcccctaaaggccaggagcaccccaagaggagggagggcagccagcctccattgacggcgagcctccagccctctcctactttgatcaccatttctctccaggctttctgcctccgagatgtggcaccatagtgcggtgccctgtggcttcaccgccctacttccacctccgcccagcctgtaatgtttatataagcagcctcaaggaccaagaaccatctgcgaaaggacacacacaggaaattcataaaagaaatctgaatggataaaaccatgaaaaaaagtatgcttcattagtaattaaagaaaggcaaatagagctggaagcatttttcccttagcaaaccataacagaaaaaaataagacccaatattggcaaagagactactgaaaaaacattcccatacattgcgtgtgggagtatacatcggtgcaggcttcctggatgacagttgggtgatatgtgtcatgtggcctaaaagcctccatgtcatttgacctacgaattctatctttgggaatttatcctaagaaaatacttaaggatttagttagtgataagatgttcatcccagcattgcaatggagaaaaatgggaagcaatggtttggttgggaatttattccttttctgctgtaacgaaagtttgcaataggggattgcttaagtaaattattgtatctccatccagatggtggagtaccgcgcagacattaaaagtcatgtaaaagaacatctgactgaaagaaaaatgctccttgaatattaaaaggttgtaaaaatagtgcatgttatgtgatttcaattttgttttttaaaatatgggtgtatgcttgtatacgtagagcagataaaaaagacggaaggcatactaaaaaatgttgagtggttatctttgtatggtggaacaaagtcactgtaattttcatctttggtttttctgtaatttccaaattttccacattttgtatttcatataataaatataatttaagaaaaaaaaaaaaa

SEQ ID NO: 655313 - DNA, 473 bp, Homo sapiens
gagaggccgatttgccctgagcagttcccagcttgaaggggcccaagatattttcctttcacaccatcctcagaggaaaccagaaggactattacagggttaaaatcagctgtttatgcttcctataattcttgaacatccacaagtatgagatggctgcagagtcaccagaggtacgtgagccctttagtctgataaacatgccaagagtaccataagaattcacaggtaggatgttttttcagttaatgataataaaaaataagagaacaggtttgcactttgaagaatgtggatttgcaaaggtaagggggaaaacatttagataaatgacaataagcactgaggcaaagaaatattggttatgtttgaggaaggctaagtattaaaaaaaaggtaggtgaagaggagtagtaagaatttcattctttaaaatgcaacagatgtttatgctgctttggttgtatttttag

SEQ ID NO: 655314 - DNA, 370 bp, Homo sapiens
  misc_feature (366)..(366): n is a, c, g, or t
aagaattaatgtcagagatccatatgcttcctacaggtatttattatataattatgagaataatatatttttactgtagaaaatataaatacacgtaagatgaaaagaagaacaaaaaattacctttaatcacaccatcctttccaagccactgttaatgttttagtctagtcccttctagacatattattgggcatcaaaaaataaacttaagccgggtgtgataggttcacgcctggtaatcccaggcattttggggagggcagagggtggagggattgcttggaattcaggaaggtttgaggacccagcctggaggcaaccaaaaggtaatacttccatctttataccaaaattttaaaattngccc

SEQ ID NO: 655315 - DNA, 659 bp, Homo sapiens
gttgccaatgtgtcatgcagactgaggtggagccggaaacttagggcgccacggtgcagtccacggaccatggtccgccactaggacatagcaccagtgaaagctccccgagacgcgccgtcgcgataagtgctgggtgtgtctgcaatcagtgacccgctatcagccttcgacgaatatccacccagtgctgcctttgggagaagattgggaatgccagcattgatcgcagctttagagagcgaaggcatcagcttctgtcgccatgtgtcaaccttgtcaagagttgtttgactttgcgtcatctcgaactgagacggttcaagatgctcgctaatgaacgaagactgagtggcctgcttcccaatcaattttgatagtgggtggctgaatcgtatcgtactatgataagttctgttgcaaaggggtacataagctcccagatacgcaatggccgtggtcaatcagatcgtaagtgccccatgaattccttcagctcgaagtagcctgtatggtagaaagtattccaagagtgttgaggggaggcctgtgtccgtggtgagcttgacaggcccagcagtgggaaggggaggttttcagtgtaaaagtagctaagctaacctttttaattagatataccctggaaccccacaactttt

SEQ ID NO: 655316 - DNA, 1884 bp, Homo sapiens
gttgatgctgaagtcgattctataggatcctcaccagtggtcacccctgctgtgggtggaaacaaaacaccttttcacagaagctgttgtccctcccccatccctgataccatcacccagaagctgggtggggaatgggaagctggaggagggggttagagttagaccaatgcgaggagctagtaagagctcgcctctccgtgacttccccccatgcaagggtggcccaaggcttcccctgatatccaaagcaggacagcagccccttggtgggattctaactgctgctactctgtttctttcctcactttgctttccaaggtggtatgtgatccccagctcaggcctgtgcagacaggaaattctcccctgcagcaagtaggggaggtgggttgtgggatgtgacctccttccagatatcaggcagtgagtgtaaacctgccacctccagccctgatccattctcacctagcggctacaggaagctgtgtctgttcgatttggtgggaggagatgtgcagggagctgtatcttgtcctccgcttgtgaaaaactcaaggatgtggagaagagtagaccgtggaaccctgctcttctgcagccaagctgaggggcaggatgcgtgtgggacagtggtagagaagcaggggatagactcataggctgcaacaaaggtgactctgtccctggacactgcctccgtactttctccttgcttcactggccacagcatctccctccagccctcgctatgtgcctctgccatcttcacccatcatggagcagaggtgaggagaggcagcctgggaatatggagaccagtgaaggaccaggcctggagagcacagggtcctacctgggcatccagcagaggagcccctaaaggccaggagcaccccaagaggagggagggcagccagcctccattgacggcgagcctccagccctctcctactttgatcaccatttctctccaggctttctgcctccgagatgtggcaccatagtgcggtgccctgtggcttcaccgccctacttccacctccgcccagcctgtaatgtttatataagcagcctcaaggaccaagaaccatctgcgaaaggacacacacaggaaattcataaaagaaatctgaatggataaaaccatgaaaaaaagtatgcttcattagtaattaaagaaaggcaaatagagctggaagcatttttcccttagcaaaccataacagaaaaaaataagacccaatattggcaaagagactactgaaaaaacattcccatacattgcgtgtgggagtatacatcggtgcaggcttcctggatgacagttgggtgatatgtgtcatgtggcctaaaagcctccatgtcatttgacctacgaattctatctttgggaatttatcctaagaaaatacttaaggatttagttagtgataagatgttcatcccagcattgcaatggagaaaaatgggaagcaatggtttggttgggaatttattccttttctgctgtaacgaaagtttgcaataggggattgcttaagtaaattattgtatctccatccagatggtggagtaccgcgcagacattaaaagtcatgtaaaagaacatctgactgaaagaaaaatgctccttgaatattaaaaggttgtaaaaatagtgcatgttatgtgatttcaattttgttttttaaaatatgggtgtatgcttgtatacgtagagcagataaaaaagacggaaggcatactaaaaaatgttgagtggttatctttgtatggtggaacaaagtcactgtaattttcatctttggtttttctgtaatttccaaattttccacattttgtatttcatataataaatataatttaagaaaaaaaaaaaaa

SEQ ID NO: 655317 - DNA, 301 bp, Homo sapiens
cctataatcccagacactgggaggctgagacaggagaatgcttgaactggggaggtggaggtggcagtaagctgagattgcaccactgcactccagcctcgtgacagagagagactccatctcaaaaaaaaaaaaaaaaaaaaacccgattttttgggtgcttgcctgcatccgcagttccccgggaggctgaggcaggaaaattcactgaaccccgggaggcagagttttgcagtgacccaaaatgtcgccatcgcacctccagccttgggttgacagagcaagattttgtctcaaaaaa

SEQ ID NO: 655318 - DNA, 1888 bp, Homo sapiens
gaagagacagcgccgcggccgtggggagcggacgcagtgatttgctccccctcgtgcagcaacccccacacccagcaccaggcccccagaactctccttccagctgaactccctgggaacaagtcagttgggctgatcactgaactcacatttctggacctgaggagcctgttcctctcacgccctcacctggctgagccgcagtagttcttcagtggcaagctttatgtcctgacccagctaaagctgccagttgaagaactgttgccctctgcccctggcttcgaggaggaggaggagctgctttccccatcatctggaaggtgacagaaatgggctgggaaggtccgaacagcagggtggatgatacgttttgggcaagttggagagcctttgcccagattggcccagcaaggagcggttttagattagagacactggctggattgaggagtagaaggctcaaacaacccaagcggctacaggaagctgtgtctgttcgatttggtgggaggagatgtgcagggagctgtatcttgtcctccgcttgtgaaaaactcaaggatgtggagaagagtagaccgtggaaccctgctcttctgcagccaagctgaggggcaggatgcgtgtgggacagtggtagagaagcaggggatagactcataggctgcaacaaaggtgactctgtccctggacactgcctccgtactttctccttgcttcactggccacagcatctccctccagccctcgctatgtgcctctgccatcttcacccatcatggagcagaggtgaggagaggcagcctgggaatatggagaccagtgaaggaccaggcctggagagcacagggtcctacctgggcatccagcagaggagcccctaaaggccaggagcaccccaagaggagggagggcagccagcctccattgacggcgagcctccagccctctcctactttgatcaccatttctctccaggctttctgcctccgagatgtggcaccatagtgcggtgccctgtggcttcaccgccctacttccacctccgcccagcctgtaatgtttatataagcagcctcaaggaccaagaaccatctgcgaaaggacacacacaggaaattcataaaagaaatctgaatggataaaaccatgaaaaaaagtatgcttcattagtaattaaagaaaggcaaatagagctggaagcatttttcccttagcaaaccataacagaaaaaaataagacccaatattggcaaagagactactgaaaaaacattcccatacattgcgtgtgggagtatacatcggtgcaggcttcctggatgacagttgggtgatatgtgtcatgtggcctaaaagcctccatgtcatttgacctacgaattctatctttgggaatttatcctaagaaaatacttaaggatttagttagtgataagatgttcatcccagcattgcaatggagaaaaatgggaagcaatggtttggttgggaatttattccttttctgctgtaacgaaagtttgcaataggggattgcttaagtaaattattgtatctccatccagatggtggagtaccgcgcagacattaaaagtcatgtaaaagaacatctgactgaaagaaaaatgctccttgaatattaaaaggttgtaaaaatagtgcatgttatgtgatttcaattttgttttttaaaatatgggtgtatgcttgtatacgtagagcagataaaaaagacggaaggcatactaaaaaatgttgagtggttatctttgtatggtggaacaaagtcactgtaattttcatctttggtttttctgtaatttccaaattttccacattttgtatttcatataataaatataatttaagaaaaaaaaaaaaa

SEQ ID NO: 655319 - DNA, 1766 bp, Homo sapiens
gaagagacagcgccgcggccgtggggagcggacgcagtgatttgctccccctcgtgcagcaacccccacacccagcaccaggcccccagaactctccttccagctgaactccctgggaacaagtcagttgggctgatcactgaactcacatttctggacctgagatctttcccattttccctccctttcccttaggagcctgttcctctcacgccctcacctggctgagccgcagtagttcttcagtggcaagctttatgtcctgacccagctaaagctgccagttgaagaactgttgccctctgcccctggcttcgaggaggaggaggagctgctttccccatcatctggaagcggctacaggaagctgtgtctgttcgatttggtgggaggagatgtgcagggagctgtatcttgtcctccgcttgtgaaaaactcaaggatgtggagaagagtagaccgtggaaccctgctcttctgcagccaagctgaggggcaggatgcgtgtgggacagtggtagagaagcaggggatagactcataggctgcaacaaaggtgactctgtccctggacactgcctccgtactttctccttgcttcactggccacagcatctccctccagccctcgctatgtgcctctgccatcttcacccatcatggagcagaggtgaggagaggcagcctgggaatatggagaccagtgaaggaccaggcctggagagcacagggtcctacctgggcatccagcagaggagcccctaaaggccaggagcaccccaagaggagggagggcagccagcctccattgacggcgagcctccagccctctcctactttgatcaccatttctctccaggctttctgcctccgagatgtggcaccatagtgcggtgccctgtggcttcaccgccctacttccacctccgcccagcctgtaatgtttatataagcagcctcaaggaccaagaaccatctgcgaaaggacacacacaggaaattcataaaagaaatctgaatggataaaaccatgaaaaaaagtatgcttcattagtaattaaagaaaggcaaatagagctggaagcatttttcccttagcaaaccataacagaaaaaaataagacccaatattggcaaagagactactgaaaaaacattcccatacattgcgtgtgggagtatacatcggtgcaggcttcctggatgacagttgggtgatatgtgtcatgtggcctaaaagcctccatgtcatttgacctacgaattctatctttgggaatttatcctaagaaaatacttaaggatttagttagtgataagatgttcatcccagcattgcaatggagaaaaatgggaagcaatggtttggttgggaatttattccttttctgctgtaacgaaagtttgcaataggggattgcttaagtaaattattgtatctccatccagatggtggagtaccgcgcagacattaaaagtcatgtaaaagaacatctgactgaaagaaaaatgctccttgaatattaaaaggttgtaaaaatagtgcatgttatgtgatttcaattttgttttttaaaatatgggtgtatgcttgtatacgtagagcagataaaaaagacggaaggcatactaaaaaatgttgagtggttatctttgtatggtggaacaaagtcactgtaattttcatctttggtttttctgtaatttccaaattttccacattttgtatttcatataataaatataatttaagaaaaaaaaaaaaa

SEQ ID NO: 655320 - DNA, 1502 bp, Homo sapiens
  misc_feature (1012)..(1012): n is a, c, g, or t
cggtgtgtgttgggggggggcccctccctcttgggggtggtgtagttgttgtgttttagtgtgcgggcggcgcgtcgtcgatacatgtgggtttgtggtgctgtgtggtgcgtccgctccgcctctgttgctggggtgggggcggttctctcgctgccgcggtgcgtgtggtggtgcgctcgctacattggtgggggggtcctcctctctgtcgtgggtggggctgctcgtcttgtttttgggttgtgggggcgcccccccctggtgttgatggtgggtgagcgtgggggggctgtcgttgttttggtgggccgctgcgtcttcgtcggtcgtcgtcacgtcactgcgcggcgtagtgtgggcgtccgcgtgtgtgggggtcgcggtgctctttcgcgccgcctcggctcgggtgggggaggagttggttttgcctcgccccccgcgcgcggacgacatctgctgtgggggtgtgtctcgtctctgtctctgaggatggcgcccctccctctgcggtgagagagagagggccgcccctctctctctcgcgcgtgtgttcttctctccccacggcagctgggtggtgtgtagagtagaggaggagtgtgtaatcatagtgcttctcgctctctgtcgtctctcgggcgccgcgcttctctctccttctctctctctctccggcgtgggtcgcgcactcgcctctcgctcgcgcgactactactagagcgcgccgacgcttctgtgtgtgtgtgtgtgttgtgtgtctcgcgcgcacactactctgttgtgtgtctcacacagcagagagagtgtgtattgtgtgtgtgcccgctctctctctctccacacgctctctctctctggcgccgacagagagagagagggggggcgaccacagaatgtctctctccgcgcccgctcgtgtgagagtgtgtctcaccacaccgtctctctcccccgctctgctgtgtggtgtgttgtgatgtgtgtgtctctgctgtgtgtgtgttgntgtgtgcgtctcttctgtgtgtgcgcaccgctgcgcggctgtgggggcgcggcgaccacactctccgcgactcctctgctctctgcggcgcgcgctgctctatatagatagagagtagtatatgtgtcgtctctcatcagctggtcgtaccacacgccctccagcacactctctcggcgagagaacaacacacacgcgcgtgtgtgtgtcttgtttttgagagcgcgcggtgtgacacacacaccagagtgttgagaggtgttgcggggggggaggggggtgtgggagccgtgggagccccctcttgttggtgtgttttttttcccccctcttggtgagacgaacacgctctcggtcgcggcgcgccccccccccggttgcgcccgcttttttttttttttacgcgtgctataaccacccttttttctccccccgcggttttccccacacacactctttgtaaaagagaaaaaaaagttgccccccttta

SEQ ID NO: 655321 - DNA, 1300 bp, Homo sapiens
gaagagacagcgccgcggccgtggggagcggacgcagtgatttgctccccctcgtgcagcaacccccacacccagcaccaggagcctgttcctctcacgccctcacctggctgagccgcagtagttcttcagtggcaagctttatgtcctgacccagctaaagctgccagttgaagaactgttgccctctgcccctggcttcgaggaggaggaggagctgctttccccatcatctggaaggtgacagaaatgggctgggaaggtccgaacagcagggtggatgatacgttttgggcaagttggagagcctttgcccagattggcccagcaaggagcggttttagattagagacactggctggattgaggagtagaaggctcaaacaacccaaggctttctgcctccgagatgtggcaccatagtgcggtgccctgtggcttcaccgccctacttccacctccgcccagcctgtaatgtttatataagcagcctcaaggaccaagaaccatctgcgaaaggacacacacaggaaattcataaaagaaatctgaatggataaaaccatgaaaaaaagtatgcttcattagtaattaaagaaaggcaaatagagctggaagcatttttcccttagcaaaccataacagaaaaaaataagacccaatattggcaaagagactactgaaaaaacattcccatacattgcgtgtgggagtatacatcggtgcaggcttcctggatgacagttgggtgatatgtgtcatgtggcctaaaagcctccatgtcatttgacctacgaattctatctttgggaatttatcctaagaaaatacttaaggatttagttagtgataagatgttcatcccagcattgcaatggagaaaaatgggaagcaatggtttggttgggaatttattccttttctgctgtaacgaaagtttgcaataggggattgcttaagtaaattattgtatctccatccagatggtggagtaccgcgcagacattaaaagtcatgtaaaagaacatctgactgaaagaaaaatgctccttgaatattaaaaggttgtaaaaatagtgcatgttatgtgatttcaattttgttttttaaaatatgggtgtatgcttgtatacgtagagcagataaaaaagacggaaggcatactaaaaaatgttgagtggttatctttgtatggtggaacaaagtcactgtaattttcatctttggtttttctgtaatttccaaattttccacattttgtatttcatataataaatataatttaagaaaaaaaaaaaaa

SEQ ID NO: 655322 - DNA, 736 bp, Homo sapiens
tattaagtaaaatctttttatttcaaaaaaaaaaacccccaaaaaaacaaaattttcccaccccccccccgggaggaattatggggatagggggaggtgtctcttgcaccactctccaccccttgccccccaccccatgtttggtgtttttggccacacataaggggtatttggggataagtgccccaaaaaaataaaagtggttgtgatgactgttgtctattgggaagaacacagagtgttcacaaagcgtggtagggaagccgcgagttaacaacggagagaaggggagaaccaacacacagaggtgttcaagaatccgtggagaaaccgcccagaaggtgtgtggaagggcccatattctcaattaaccatcttttcttgtgttgagatctcaaaaaccccccgcggtggaaaccactctattctttgcgccccctaataacgagagacgagagatcacataaacagcgtctatgtatgtgacaaaagatatgtatgaggataaacaaaaagatgacacctatgagacaacgggtgttgggggtggccccccaaacccgaggtgggaccctcttgtgggtcgtaacagcaaagagctctcccgtgtggtccataatatattccccccaaaatcctgtggagaaaaacgtaagtaaggagtctccccaggaaatacaccacgaaaaaaattttatagtgagccccccccaagagttttttttaagcccacatt

SEQ ID NO: 655323 - DNA, 152 bp, Homo sapiens
gattttgatggtgatagaactatatccagactgatggaaggatgaaatgacattagcttatggctggagtcagtagaccggtaaagattcagagggcgtgctgcacattacccaaaggtggagagttcaggcagaggaagggtaaggggatg

SEQ ID NO: 655324 - DNA, 247 bp, Homo sapiens
ctacacattctttaccttccattaaaggcactatcatccatacgtaagatatacaataattacctaggtttatatttttttaaaaagcattccattaaagtattatacaaaaatgaaaacaccatctttttaattttggcaactagggagaagaaaaaaaaacacaccaactttgtacaccaatgatttctctcaaaccgtcgtcttcagtttccctgagccagaccgaaagcggaggatcttcttc

SEQ ID NO: 655325 - DNA, 365 bp, Homo sapiens
  misc_feature (123)..(123): n is a, c, g, or t
  misc_feature (129)..(129): n is a, c, g, or t
  misc_feature (138)..(138): n is a, c, g, or t
  misc_feature (162)..(162): n is a, c, g, or t
  misc_feature (171)..(171): n is a, c, g, or t
  misc_feature (233)..(233): n is a, c, g, or t
  misc_feature (261)..(261): n is a, c, g, or t
  misc_feature (323)..(323): n is a, c, g, or t
  misc_feature (360)..(360): n is a, c, g, or t
aagaagacactctgggatgtgtcccatatgtctcaggaactgccactgggataattgattaatctgaggtggtcattaattgtttgatgtctgttgtagaggaggatagggtggtcccagggntaatcntgatatganggatagccatgtggtgaatgacangtatctctnattcctctcatgtccctgccaaggtccccggacattcaaagtgagcttggcaatatatctanagcaaagaaaagcagagacatgtggctntttccccaaatggggcgctttcattgtcccattcgtgtcccctttgtttactgggctctcanaagaaaccatgacgaaccatatttgtctctatttccntctcc

SEQ ID NO: 655326 - DNA, 222 bp, Homo sapiens
tggtgatctagaggatcccatgcgcgacgcttcatcaacttagccaaagcgccttgtcttccgagttcagctgtgtgaaggcgacagtggtgcaggtcttcctgtggactagacgtcccagtcttgcctttcccttgataatgcagtaagggacccccattttacgacacagggcaggcaagaagacaaccagcttgatggcagcgtcgcgcatgggtaccg

SEQ ID NO: 655327 - DNA, 154 bp, Homo sapiens
ctatcagctgacgcaatgcatacattaattcggtctcttcttttcttttctattaatctgtgcggtaatttgtaggtatccttaatacatgagagtcatggaagagagaaaacaataaactaaacattcattcactggatttaacaataccctg

SEQ ID NO: 655328 - DNA, 326 bp, Homo sapiens
cttgcacttcctgtacccaatcattgcctgatcacttagctgtgtgtcatcatagtcaggcttaaaaataataaactcagaatttgaaaagaaaaactggtaaaaagaagaaatagaaactgagtagagacatcgatattgccacacatcacatgggagacagattttgtagatttagtcagggcaaattactaaagaaataacacacgtgaaaaattacagtttatagttgctacaattatattatctaaaacatctagttttttaagattatgattatgtctgtaatttattatggttatgtctgtcagcgaaggttgctaggt

SEQ ID NO: 655329 - DNA, 615 bp, Homo sapiens
gggcgggcggtgccactgacctccctcgtgcggcccggcccgggcagcgcccgagcccaggcagccccgacgacgtgagggtatatacatgggccatgaggaacattgggcagcgggaggatcggagccgtaacgagggcatgcccgtctgatgagtgaagtagcgacgcgccgtataccgcggacgcaattttgtcacagtgagtgtaccgtagaggctagtcgtggtaagtcacatcgtgagtagtcgtatggcgcataacacgtacacgatggacttcacgcagcagatatctcggagttacagaatgaagggtccgtcttggactgtcagcattggacatgccactaaactctggacgcaaccagcatgcagcagcgcacagaaagaaccatcctagtaccgttcaaggcgggacgcatgccaaggcacgactcaagggggctgcaaatccagagagtcagtgcgtgttgccaggcaagaaagtggcgagcgaggagtttagacgaattatgagcctgaacagtcaagagaagttcgggaacaagaccgggagacaggggacatctcttagaaggcgaggtgaggttaagaggaaagagatgtgagagagg

SEQ ID NO: 655330 - DNA, 145 bp, Homo sapiens
cccttggtgccctcttggaggcctggctcatgaagcagtaggtgtctgtgtaggactgggctagaaaataactctctcctagtttgtctggggagggggtaaggccaggatgccaatttagtcactccaggttaagttgtaggac

SEQ ID NO: 655331 - DNA, 1186 bp, Homo sapiens
ctatagagagggacccctttttggtgtgccactctctggggatgaagcgcctttttaccccagactgggggatattggaacacattctccaacgagggtgaatcgtcaaattattctcctcatgggttctaaatattccgcggggaattttatatttatgggcgcccaattgtgtgagagaaactccgcggcacccacgaatgtttactcccctacgaatgatataatgggatgccctttataacacaacacttcgggcgaagataaacttgtgtgagcgcccccattgtgggaacctctttgaagttccctctgggggaagaaaacttttgtagaccccacacgcgccggtttttctttgactgcggccccggttaactcgtagctcggtgtttggcgaaaaattttgccgctgtcacggcttaaggaccccactttcccacgtttgattgggcgacacaaatagccgtgtctttttcaacaccgggataattcaggtcacacacatgggccacctttctgttgaaaacagggtttttataaaaaaatgggttaagattataatataataaaattggaaacgtatctcttgagaattggcagaaaattaaattgcagaatattgccacacactaatggtgttaactggggttcaaaaatagcgttgttcctttgcttgtttttatttcacacggcacacgcacaaggcacaaagtggcgcttcaaaaagtgcctttggcgtatataatatatttctgaatataagaaatctcctaaagaagcaccccttgggttaaaaagaatcgcacactcacgaaggttctggaaagtatttctgaaagcactccactttacccgtccacgcttgacacacaaggtttgagttctcctcgcttgtaataaggtgaacttgggtggcccaatgggtgaacacattaaaagggaacaatgctgtcccacgggcctgggcggacagactcaatgggcaggatagtgtgctgggtctcagaccccatagtgcctcgcttgctgggccaattagtataagggccaaaccttcctttgcggcgaacctggctgctaggcccattttttaggaaccagctgcgactcattaagacccagaagcataaataaactttccaaaatttatttggcttttttgtttaaaactgggccaaattta

SEQ ID NO: 655332 - DNA, 416 bp, Homo sapiens
  misc_feature (215)..(215): n is a, c, g, or t
  misc_feature (239)..(239): n is a, c, g, or t
  misc_feature (247)..(247): n is a, c, g, or t
  misc_feature (286)..(286): n is a, c, g, or t
  misc_feature (313)..(313): n is a, c, g, or t
  misc_feature (326)..(326): n is a, c, g, or t
gcgtcgacggcatgtccggggtcaccgtttttaagtcccgaaaaaaaaaaaaatcacttttttgtgaaaatggttaaaaattattttcggggtcctttccagaatggcgcaaattcggcatgtccggggtcacagtttttaagtcccaaaaaaaaaaaaaaaaaaaaaacttttttttgaaaatggttaaaaattattttcggggtcctttccanaatggcgcaaattcggcatgtccngggtcacngtttttaagtcccgaaaaaaaaaaaaaatcacttttttntgaaaatggttaaaaattattttcggngtcctttccagantggcgcaaattcggcatgtccggggtcaccgtttttaagtcccgaaaaaaaaaaataatgcccaccacagcacaaagacctcgtcgacgc

SEQ ID NO: 655333 - DNA, 255 bp, Homo sapiens
gacttgggctgtagctcacaaatctgtgcatgtatttggtatatttaaatcctgctacatgcatattctaaccaactagtaagtaaatcatacactgacaagtgtgcccattagaatcatacttaattattggccaactggcattccccaattaaactgtgtcgatataataattgtgcctcaggccacctgtgcgcactgtgtcacacctgttatccccggaatttgggaaggctaaggcgggggatcacgagg

SEQ ID NO: 655334 - DNA, 452 bp, Homo sapiens
tccggcgtcaaaaatgtaaaacaagaacgtggtgggtcctctggtccaaaattccgaatttccttgggtcttccgttagaagctgtaaccaattgtgctgacaacacaggagccaaaaacctgaaaatcatctccgtaaaggggatcaagggacggttgaacaaacttcccgctgctggtgtgggtaacatggtaatggccacagtcaaaaaaggcaaaccaaagctcaaaaaaaaggtacatccaacagtggtcatttgacaacgaaagtcaaaccgtaaaaaaaatggcgtgtttctttattttaaaaataatgcagaagtcaaagtgaacaataaaggcaaaatgaaaggttttgccattacaggaccagtagcaaagaagtgtgcaaacttgtggccccggattgcatccaatgctggaagcattgcataattctccagtaaatttgt

SEQ ID NO: 655335 - DNA, 1012 bp, Homo sapiens
  misc_feature (878)..(878): n is a, c, g, or t
  misc_feature (881)..(881): n is a, c, g, or t
  misc_feature (895)..(895): n is a, c, g, or t
aagtctttaagtggacagtacgcatgcgccaacttcctctttttccggctggaaccatggagggtgtagaagagaagaagaaggaggttcctgctgtgccagaaacccttaagaaaaagcgaaggaatttcgcagagctgaagatcaagcgcctgagaaagaagtttgcccaaaagatgcttcgaaaggcaaggaggaagcttatctatgaaaaagcaaagcactatcacaaggaatataggcagatgtacagaactgaaattcgaatggcgaggatggcaagaaaagctggcaacttctatgtacctgcagaacccaaattggcgtttgtcatcagaatcagaggtatcaatggagtgagcccaaaggttcgaaaggtgttgcagcttcttcgccttcgtcaaatcttcaatggaacctttgtgaagctcaacaaggcttcgattaacatgctgaggattgtagagccatatattgcatgggggtaccccaatctgaagtcagtaaatgaactaatctacaagcgtggttatggcaaaatcaataagaagcgaattgctttgacagataacgctttgattgctcgatctcttggtaaatacggcatcatctgcatggaggatttgattcatgagatctatactgttggaaaacgcttcaaagaggcaaataacttcctgtggcccttcaaattgtcttctccacgaggtggaatgaagaaaaagaccacccattttgtagaaggtggagatgctggcaacagggaggaccagatcaacaggcttattagaagaatgaactaaggtgtctaccatgatattttctaagctggtggtaataacagtactgtctcattgaaaaaaaaaaaagggggcggnaanaatcccgaggggcnattcggccccgtttggaaagaggccaagggggtaaacagagggggggtaaaggaggaaaggggatggaagctcggggatggacagaggcggaaagggtgggaatgggtctaaaaaaa

SEQ ID NO: 655336 - DNA, 888 bp, Homo sapiens
tttccaacatatacgaagtatcagtcgcggtaccgacatatgccggaatcggccatacgccgggctctttttccggctggaaccatggagggtgtagaagagaagaagaaggaggttcctgctgtgccagaaacccttaagaaaaagcgaaggaatttcgcagagctgaagatcaagcgcctgagaaagaagtttgcccaaaagatgcttcgaaaggcaaggaggaagcttatctatgaaaaagcaaagcactatcacaaggaatataggcagatgtacagaactgaaattcgaatggcgaggatggcaagaaaagctggcaacttctatgtacctgcagaacccaaattggcgtttgtcatcagaatcagaggtatcaatggagtgagcccaaaggttcgaaaggtgttgcagcttcttcgccttcgtcaaatcttcaatggaacctttgtgaagctcaacaaggcttcgattaacatgctgaggattgtagagccatatattgcatgggggtaccccaatctgaagtcagtaaatgaactaatctacaagcgtggttatggcaaaatcaataagaagcgaattgctttgacagataacgctttgattgctcgatctcttggtaaatacggcatcatctgcatggaggatttgattcatgagatctatactgttggaaaacgcttcaaagaggcaaataacttcctgtggcccttcaaattgtcttctccacgaggtggaatgaagaaaaagaccacccattttgtagaaggtggagatgctggcaacagggaggaccagatcaacaggcttattagaagaatgaactaaggtgtctaccatgattatttttctaagctggttggttaataaacagtacctgctctc

SEQ ID NO: 655337 - DNA, 657 bp, Homo sapiens
  misc_feature (517)..(517): n is a, c, g, or t
  misc_feature (528)..(528): n is a, c, g, or t
  misc_feature (533)..(533): n is a, c, g, or t
  misc_feature (543)..(543): n is a, c, g, or t
  misc_feature (578)..(578): n is a, c, g, or t
  misc_feature (590)..(590): n is a, c, g, or t
  misc_feature (606)..(606): n is a, c, g, or t
  misc_feature (608)..(608): n is a, c, g, or t
  misc_feature (622)..(622): n is a, c, g, or t
  misc_feature (633)..(633): n is a, c, g, or t
  misc_feature (648)..(648): n is a, c, g, or t
agcgggcggtcgtccgtcgccccgccctgcgcgctcgggctggctcggctgctgcggcaggcgggcaggtgggctggccggtccgctgggtgcgcggagaggctggtgccctctgtgatagtgtgggctggggtgcggttgtggcagagcggtggcttgaggccaggggctgtgcaggctgactgctcgaggcctgtggcgcgagagaggaacagtgtcgtggccacgacacatgcgacctttagacagctgaccagaatgactgagcggtacgcgtactgccgcgtgcgatcgtatacattacaaccaacggaacagtgttagcaaggtctcagcaggaaggactgaaaatgcagggtcacggactggaggaacatgacgtgcacgtcttgagagtgacgccagcgtgttgaggaaaaaccgtatcaatggaccgacggagctagagaaacagtgtcatctcatacggaagcgatgagatacaaatgacacagaatactctgaagcgtgcaaaggntcagtgaaagnggtgncagtgattgnacgaagaaacgcaagacacaccgatgatagacacncaggaagatggncgtacgacgtaacgantntgcgaccgtaggantcacgtggaangcaagacgtggcttngtgcaacct

SEQ ID NO: 655338 - DNA, 852 bp, Homo sapiens
aaacaataggctaggtacgaggcctggtgttaatcggccgagggaaccatggagggtgtagaagagaagaagaaggaggttcctgctgtgccagaaacccttaagaaaaagcgaaggaatttcgcagagctgaagatcaagcgcctgagaaagaagtttgcccaaaagatgcttcgaaaggcaaggaggaagcttatctatgaaaaagcaaagcactatcacaaggaatataggcagatgtacagaactgaaattcgaatggcgaggatggcaagaaaagctggcaacttctatgtacctgcagaacccaaattggcgtttgtcatcagaatcagaggtatcaatggagtgagcccaaaggttcgaaaggtgttgcagcttcttcgccttcgtcaaatcttcaatggaacctttgtgaagctcaacaaggcttcgattaacatgctgaggattgtagagccatatattgcatgggggtaccccaatctgaagtcagtaaatgaactaatctacaagcgtggttatggcaaaatcaataagaagcgaattgctttgacagataacgctttgattgctcgatctcttggtaaatacggcatcatctgcatggaggatttgattcatgagatctatactgttggaaaacgcttcaaagaggcaaataacttcctgtggcccttcaaattgtcttctccacgaggtggaatgaagaaaaagaccacccattttgtagaaggtggagatgctggcaacagggaggaccagatcaacaggcttattagaagaatgaactaaggtgtctaccatgattatttttctaagctggttggttaataaacagtacctgctctc

SEQ ID NO: 655339 - DNA, 848 bp, Homo sapiens
  misc_feature (37)..(37): n is a, c, g, or t
gaacggctaggtacgaggctgggtgtgtaatcggccngggaaccatggagggtgtagaagagaagaagaaggaggttcctgctgtgccagaaacccttaagaaaaagcgaaggaatttcgcagagctgaagatcaagcgcctgagaaagaagtttgcccaaaagatgcttcgaaaggcaaggaggaagcttatctatgaaaaagcaaagcactatcacaaggaatataggcagatgtacagaactgaaattcgaatggcgaggatggcaagaaaagctggcaacttctatgtacctgcagaacccaaattggcgtttgtcatcagaatcagaggtatcaatggagtgagcccaaaggttcgaaaggtgttgcagcttcttcgccttcgtcaaatcttcaatggaacctttgtgaagctcaacaaggcttcgattaacatgctgaggattgtagagccatatattgcatgggggtaccccaatctgaagtcagtaaatgaactaatctacaagcgtggttatggcaaaatcaataagaagcgaattgctttgacagataacgctttgattgctcgatctcttggtaaatacggcatcatctgcatggaggatttgattcatgagatctatactgttggaaaacgcttcaaagaggcaaataacttcctgtggcccttcaaattgtcttctccacgaggtggaatgaagaaaaagaccacccattttgtagaaggtggagatgctggcaacagggaggaccagatcaacaggcttattagaagaatgaactaaggtgtctaccatgattatttttctaagctggttggttaataaacagtacctgctctc

SEQ ID NO: 655340 - DNA, 532 bp, Homo sapiens
  misc_feature (485)..(485): n is a, c, g, or t
tatgcacagttcgaagaggtcaggaagattccgatagggcaaagtcgactaaaacagcatgtggaggcttgataattcaacccacgcctatccaacctcataccccatgtcctccccctctgcttcccgggtccacttcagcggtacttccaggctcacctcctcatggttcttatggaggcacatcagctcctccttcaggtactcaacctgggcctccaggtcagccttgcacagagtgagatcatccaggatcctgcgcaggccattgatgtcggcctccaccagctgccgcatggccagctctgcctcgtacctgcacaaggacagggtcagcaaccaagggtgaaacagaatgcagaactcagggaaggccttaaactgccggcactttccaaccctccgtgaaactaatggaaagttgccccagagcctatgaggacaggtcctccccagctccagccccccgagtgaactcacttggncctgaagtcatcggcagccagtttggcattatcaatgttcacaacca

SEQ ID NO: 655341 - DNA, 1236 bp, Homo sapiens
  misc_feature (37)..(37): n is a, c, g, or t
gaacggctaggtacgaggctgggtgtgtaatcggccngggaaccatggagggtgtagaagagaagaagaaggaggttcctgctgtgccagaaacccttaagaaaaagcgaaggaatttcgcagagctgaagatcaagcgcctgagaaagaagtttgcccaaaagatgcttcgaaaggcaaggaggaagcttatctatgaaaaagcaaagcactatcacaaggaatataggcagatgtacagaactgaaattcgaatggcgaggatggcaagaaaagctggcaacttctatgtacctgcagaacccaaattggcgtttgtcatcagaatcagaggtatcaatggagtgagcccaaaggttcgaaaggtgttgcagcttcttcgccttcgtcaaatcttcaatggaacctttgtgaagctcaacaaggcttcgattaacatgctgaggattgtagagccatatattgcatgggggtaccccaatctgaagtcagtaaatgaactaatctacaagcgtggttatggcaaaatcaataagaagcgaattgctttgacagataacgctttgattgctcgatctcttggtaaatacggcatcatctgcatggaggatttgattcatgagatctatactgttggaaaacgcttcaaagaggcaaataacttcctgtggcccttcaaattgtcttctccacgaggtggaatgaagaaaaagaccacccattttgtagaaggtggagatgctggcaacagggaggaccagatcaacaggcttattagaagaatgaactaaggtgtctaccatgattatttttctaagctggttggttaataaacagtacctgctctcaaattgaacaaacaaaaaaaaaaaaaaaaaaaaaaaaaaaaaagggggggggccaaaaaattcccccggggggccccttttctcccctttttttttacaaggggcccctaaggggctatataaagcaaaggccggcgcggtttaaccccgtcggcgggaaaccggctcgccgggcgctcttggggagaccgcctcctcgggcgcgtctccctctttggcccctccccggggattacgcctggaaatttaacttcggttttgtgtgctacccggctgctcccggtgaaatttgtccggctttgagtcgcggcgcgatacagtcgagggcgcgtgggcgtccacgttaaggctacatccgccacctgtctctttcgccgccatcctctac

SEQ ID NO: 655342 - DNA, 1272 bp, Homo sapiens
ttctactgtcaacgtggacaatgcctatcctcgtagactcctcagactctacatggattcatgtctgctgatgcaggaaggcagtccggctctttgacacatccccaagccaaaaaggatggctaaatgctcctgggagatcaggcgcagcctcacaccagctgcctccatccactcagccattcccagtggtacccaaattgtgcccatgggatagccatcgagcactttgggctcatcgcatacagccgtatggcattagcagatttattcatcaacagacatattccagtatttaaccgtccaatcatatcgtaacattgacccgtatattgcagaaagcacatatattgtacgtaacacactacttggggtccatgatcagacccatcacacgagaacacgccccagtggcttatacatgcacagccacaaggaatcctatcattaaagggtccttaatcatcatagacgactactgaggcaggatgtgaacgcacttggcaggtggcgactcggctgggacccagggatgggataacgtgatctgcaaacatcttgcctgataccactgaatattcacgcagggcattaacccaccctttccaagaccaactcacggcacaagataccccggtgggcacatgggccccgagaagaacgccaacggggcatgaccattggatatcttgggcaagtacatgtcagtcctacggatggacccatttggcccctggagaccacacatccacttggtggacgcacagagataccgtccatggacatacgcttataccttcatgactaacaccccattgggaaacatatgggcccttcaatcctacttcatttcccttggggattccagacaattgccacctcccttacaatgggtcctacgttagaaccttaccacatagtccaaggaacagtacataccacacgggttggagcagctagaccacgctcgcgactggagccacagcgcaccgtacggcgccattgcgcattgctggtcacccagtgcagatcacgcgttacatggttgggcgccaagaccgaactcagccaccacacaacttgagcacggcgtggaccatcggcatacagatccggcaccggtggacaccaccctgagtacagcgacacaccgccagaacacgcacagacgcgccaggaccatcgaacacaacaccccccgacagtgacccgcggttgagccccacaactcaaccatgtcccacggcgacgacaaccatcacacctaccggc

SEQ ID NO: 655343 - DNA, 847 bp, Homo sapiens
aagtataggctaggtagcgaggctggggttgggaaccatggagggtgtagaagagaagaagaaggaggttcctgctgtgccagaaacccttaagaaaaagcgaaggaatttcgcagagctgaagatcaagcgcctgagaaagaagtttgcccaaaagatgcttcgaaaggcaaggaggaagcttatctatgaaaaagcaaagcactatcacaaggaatataggcagatgtacagaactgaaattcgaatggcgaggatggcaagaaaagctggcaacttctatgtacctgcagaacccaaattggcgtttgtcatcagaatcagaggtatcaatggagtgagcccaaaggttcgaaaggtgttgcagcttcttcgccttcgtcaaatcttcaatggaacctttgtgaagctcaacaaggcttcgattaacatgctgaggattgtagagccatatattgcatgggggtaccccaatctgaagtcagtaaatgaactaatctacaagcgtggttatggcaaaatcaataagaagcgaattgctttgacagataacgctttgattgctcgatctcttggtaaatacggcatcatctgcatggaggatttgattcatgagatctatactgttggaaaacgcttcaaagaggcaaataacttcctgtggcccttcaaattgtcttctccacgaggtggaatgaagaaaaagaccacccattttgtagaaggtggagatgctggcaacagggaggaccagatcaacaggcttattagaagaatgaactaaggtgtctaccatgattatttttcaatttgagagcaggtactatttattaaccaaccagcttag

SEQ ID NO: 655344 - DNA, 899 bp, Homo sapiens
  misc_feature (774)..(774): n is a, c, g, or t
  misc_feature (782)..(782): n is a, c, g, or t
  misc_feature (797)..(797): n is a, c, g, or t
  misc_feature (837)..(837): n is a, c, g, or t
  misc_feature (848)..(848): n is a, c, g, or t
  misc_feature (851)..(851): n is a, c, g, or t
  misc_feature (860)..(860): n is a, c, g, or t
  misc_feature (867)..(867): n is a, c, g, or t
gtatcaacgcagagtgcccattacggccggggcctctttttccggctggaaccatggagggtgtagaagagaagaagaaggaggttcctgctgtgccagaaacccttaagaaaaagcgaaggaatttcgcagagctgaagatcaagcgcctgagaaagaagtttgcccaaaagatgcttcgaaaggcaaggaggaagcttatctatgaaaaagcaaagcactatcacaaggaatataggcagatgtacagaactgaaattcgaatggcgaggatggcaagaaaagctggcaacttctatgtacctgcagaacccaaattggcgtttgtcatcagaatcagaggtatcaatggagtgagcccaaaggttcgaaaggtgttgcagcttcttcgccttcgtcaaatcttcaatggaacctttgtgaagctcaacaaggcttcgattaacatgctgaggattgtagagccatatattgcatgggggtaccccaatctgaagtcagtaaatgaactaatctacaagcgtggttatggcaaaatcaataagaagcgaattgctttgacagataacgctttgattgctcgatctcttggtaaatacggcatcatctgcatggaggatttgattcatgagatctatactgttggaaaacgcttcaaagaggcaaataacttcctgtggcccttcaaattgtcttctccacgagtggatgagaaaagacccccatttgtagagggggatgctggcacgggggccgatcacaggtttgaagagnctagggtnccgatattcctacgnggaaaaagacgtcataaaaaaaaaaaattgggcgcccaanttaactggggnccngagagaagnagaggangggcaaacgggggacatggtgtacaaccgacg

SEQ ID NO: 655345 - DNA, 816 bp, Homo sapiens
aagtataggctaggtagcgaggctggggttgagaagaaggaggttcctgctgtgccagaaacccttaagaaaaagcgaaggaatttcgcagagctgaagatcaagcgcctgagaaagaagtttgcccaaaagatgcttcgaaaggcaaggaggaagcttatctatgaaaaagcaaagcactatcacaaggaatataggcagatgtacagaactgaaattcgaatggcgaggatggcaagaaaagctggcaacttctatgtacctgcagaacccaaattggcgtttgtcatcagaatcagaggtatcaatggagtgagcccaaaggttcgaaaggtgttgcagcttcttcgccttcgtcaaatcttcaatggaacctttgtgaagctcaacaaggcttcgattaacatgctgaggattgtagagccatatattgcatgggggtaccccaatctgaagtcagtaaatgaactaatctacaagcgtggttatggcaaaatcaataagaagcgaattgctttgacagataacgctttgattgctcgatctcttggtaaatacggcatcatctgcatggaggatttgattcatgagatctatactgttggaaaacgcttcaaagaggcaaataacttcctgtggcccttcaaattgtcttctccacgaggtggaatgaagaaaaagaccacccattttgtagaaggtggagatgctggcaacagggaggaccagatcaacaggcttattagaagaatgaactaaggtgtctaccatgattatttttctaagctggttggttaataaacagtacctgctctc

SEQ ID NO: 655346 - DNA, 170 bp, Homo sapiens
tccgtaaccttcgttaaggtcttcacagccgcagttaaaaatagaaagttaaaaatccacataatcatcctcccgccgtctcctcgtccgcgttagtacaccccttacaggccgagaggaagtataaaccgggatcacaatcatggtattcatctccagcgttcccccgt

SEQ ID NO: 655347 - DNA, 222 bp, Homo sapiens
tatttatactattttcatattatttttattttttttattagaaacaattagtaggttttcccgctgttccttcatagaacaatgactgatgttgcagattgcttgaaagttttcatgactggagcactcaacaaatggtacaagtacaatcatgatttgccagcacggataattgtgtaccgtgctggtgtaggggatggtcagctgaaaacacttattgaa

SEQ ID NO: 655348 - DNA, 917 bp, Homo sapiens
  misc_feature (915)..(915): n is a, c, g, or t
actgatccgaggatccctcctacgagcgaattccgccagaaacccttaagaaaaagcgaaggaatttcgcagagctagaagaaggaggttcctgctgtgccagaaacccttaagaaaaagcgaaggaatttcgcagagctgaagatcaagcgcctgagaaagaagtttgcccaaaagatgcttcgaaaggcaaggaggaagcttatctatgaaaaagcaaagcactatcacaaggaatataggcagatgtacagaactgaaattcgaatggcgaggatggcaagaaaagctggcaacttctatgtacctgcagaacccaaattggcgtttgtcatcagaatcagaggtatcaatggagtgagcccaaaggttcgaaaggtgttgcagcttcttcgccttcgtcaaatcttcaatggaacctttgtgaagctcaacaaggcttcgattaacatgctgaggattgtagagccatatattgcatgggggtaccccaatctgaagtcagtaaatgaactaatctacaagcgtggttatggcaaaatcaataagaagcgaattgctttgacagataacgctttgattgctcgatctcttggtaaatacggcatcatctgcatggaggatttgattcatgagatctatactgttggaaaacgcttcaaagaggcaaataacttcctgtggcccttcaaattgtcttctccacgaggtggaatgaagaaaaagaccacccattttgtagaaggtggagatgctggcaacagggaggaccagatcaacaggcttattagaagaatgaactaaggtgtctaccatgattatttttctaagctggttggttaataaacagtacctgctctcaaattgaaaaaaggaaaaaaagtcgacgcggccgcgaatttagtagtagtagtnga

SEQ ID NO: 655349 - DNA, 880 bp, Homo sapiens
aagtataggctaggtagcgaggctggggttgagaagaaggaggttcctgctgtgccagaaacccttaagaaaaagcgaaggaatttcgcagagctgaagatcaagcgcctgagaaagaagtttgcccaaaagatgcttcgaaaggcaaggaggaagcttatctatgaaaaagcaaagcactatcacaaggaatataggcagatgtacagaactgaaattcgaatggcgaggatggcaagaaaagctggcaacttctatgtacctgcagaacccaaattggcgtttgtcatcagaatcagaggtatcaatggagtgagcccaaaggttcgaaaggtgttgcagcttcttcgccttcgtcaaatcttcaatggaacctttgtgaagctcaacaaggcttcgattaacatgctgaggattgtagagccatatattgcatgggggtaccccaatctgaagtcagtaaatgaactaatctacaagcgtggttatggcaaaatcaataagaagcgaattgctttgacagataacgctttgattgctcgatctcttggtaaatacggcatcatctgcatggaggatttgattcatgagatctatactgttggaaaacgcttcaaagaggcaaataacttcctgtggcccttcaaattgtcttctccacgaggtggaatgaagaaaaagaccacccattttgtagaaggtggagatgctggcaacagggaggaccagatcaacaggcttattagaagaatgaactaaggtgtctaccatgattatttttctaagctggttggttaataaacagtacctgctctcaatggcacaacaaagggggccgctaaagacccaaggccaattaaggccaagtatgaaagggcct

SEQ ID NO: 655350 - DNA, 472 bp, Homo sapiens
  misc_feature (353)..(353): n is a, c, g, or t
  misc_feature (419)..(419): n is a, c, g, or t
  misc_feature (435)..(435): n is a, c, g, or t
  misc_feature (466)..(466): n is a, c, g, or t
gtctcaaaaaaaaaaaaaaaaaaaaagctgctgaaatcaggcagcgcttttcagattcccggcccaggtgatttcgtaactcctgggcaccctggctactgcccttcctaggccctgccattaccctcttcctccatttagcacttggcccatgtctcttacatctccttacccagtttttacagggccgtgttagagccttcacccatggaacagtacaagacatgatgctactccgagaataccgacagctccagggaacagcagtccctactacccagccttttccccccaaccattcgcccctatttcaggcaaggaaggcaggccagagggacaacgggcggcccctnttgttatttaccttatttaaaagggttgggaatgtttaggggaacaagtttggcaccaggaacccnttccccaccccattgncaggtgttcccttaaccttggattattttgnagtttt

SEQ ID NO: 655351 - DNA, 257 bp, Homo sapiens
agacatgaaagctcaatcgataagatcttctggaaaaaggagatctgagttattcacagatgtagtggaaaaggaagtgatgtcttcaaatcagagtatctcttcacccgtgcttgatgctgctcccagcatcaccagtcgtagtagaaagaagtaagtctgcatcttcttcagaaatgaaagatggtttacccagtaactcaatcaaggtgtaagcaggtctgtgtctcctccagcaatttgtgatatgactggta

SEQ ID NO: 655352 - DNA, 631 bp, Homo sapiens
tagaggaattcgccactaggggaagagtgcacgagagacgagataacgcttgcaactgcaatagtggatagtgtgatatagagaacactgctaactatagcccgtggcaaagctcgagttctggcgaaacatttcagaggccacgacactgaagatggcgacacgttcattctgaatgaatcatcttgaacataaactttttaagattaagatctatcatatacctatttcagaaacggttgtagaacactcactcacttcatatagagtgttcaaagagagaccgtctacaattgatgccacaattggtcgaatcatgagatgagagagacgcttctgcacaatctccttgtatgacaagtggcaatcgagatggattcccactttaggctgcgaggtttagaaagagatcttatcgttgaatgaccgggactactttggatgagataaagaaagtcgtaacaggaccactgtatttgatcgaacggtggccttgcaggatttgctgtcgcattttggaaccaattggttaaccaacctggtgactcaacattattgtgcgccctttgtactaccgctgatccaatggggtgtcactaatgggaatgacagtgggacttttctttatagg

SEQ ID NO: 655353 - DNA, 322 bp, Homo sapiens
atattggtaaagttcaagtttatatatttacaaataagggcaacaaaatgtgcctgactttgtttctgttgggaattctgggaatatcgcctttggcattatggcacctgaaatcatgtcacccaacaggagatgcagtttgtgtgaacaaagggtaaagcttgaaataagataggataagacaggataaagaaccaggagagctttttaaataggagaagctatttgaaagcagaaaggagaacaggttcagaggataccaaaaccggagttatcacagaatgtctgtctgcacactcattcctgctgcctgacttggact

SEQ ID NO: 655354 - DNA, 1093 bp, Homo sapiens
tatgtgttgtcgtgcaggtagaggcttactaaaagtgtgaaaacgtaggcttggattaaggcgacagcgcattctctaggatagctcagtagcaattagcaattgtgacagatgataagctgtagagggcaagcgttaatgcgtctgcatatctgctagggctggccgcttcccaattaggctcgcatgacctccgctgcccgtgcactacctgcttccgcggctccaggcgctcacgccgcccgcgccttcctcgcgcgctcgacactcgcccctcgcgcctgcacctgcgttcccgccccccctcccgtcacctcctcgcgcggactcccgcggcgctcgccccgctgctgccttcgcgcggctacccaccgctgcggcctcgcgcgccctctccctccgtcgcttcccccgccgacccccgccctccctccctcccttgccgccccgcccccctccgcgcgcgcctgcgccaccgcccctccgctcccgcccccggcgctcgcggcccgcgctcgcgcccctccctcgcgccgcacgggtgctctggctccgcccgcgcccgctgtcgctctccccgcccgcgccgggccgtcctcgcctaggcgcccccctccccccccacttctcctgcggcccctgctcctccccctcgcccctgcgcgctcggctccccggccccacgcgccccccctccctcggaccggccccgcgcccgctcccccctctctgcccccgcccgctcgctcggcctccctgcgccgctcgcgctctgcccggccggcgcgcttcgggccccccggcccgcacccgccttctgccccggtcggcgcgccccgtccgggcgctcctgctgctggcgtgccgcgcccgcgccgcgccgccttcggcggccgccctgtgcctgcgtcggccgcgcgccgcccgcgcccgcgcgtctgcgccgccccccgccccgctccacactcgcgcgcccgcccgcgcgcgcgctcctcgtcgcgatcgcgcgcctgcactctccgtcgctcgcgcctcgcgcgcgccgccccgcgctcgcgcgccacccgccctcccgctccgccgcgcccctcat

SEQ ID NO: 655355 - DNA, 443 bp, Homo sapiens
tttgaactctgctttaatccttgtctactgcatcttaaaatattccctctctcattatatacacggagatcacattgtgtataacatatctatataactattacagtacgttcttgataatacaaaattgtacaccttcatcaaataaattaggataaattaaaccaattaattatgacaagtcttcacacaacaaaatacaacaacgaaaattcacaattgaaattgcctctagcttacaaacacaatcaagtagtcatgaaattgactttatcattccagttcttgtactatattcaaatcaaagggtctttattacacaaaagagcttacataatgctcactttactatatattgctagatcatatagaggcagtgctttgtcgcggtttatactatatacatatgataaatggctgggacaatatcgagggaagccatg

SEQ ID NO: 655356 - DNA, 378 bp, Homo sapiens
atgccagagccagcgaagtctgctcccgccccgaaaaagggctccaagaaggcggtgactaaggcgcagaagaaagacggcaagagcgcagcgcaccgcaaggagagctattccatctatgtgtacaaggttctgaagcaggtccaccctgacaccggcatttcgtccaaggccatgggcatcatgaattcgtttgtgaacgacattttcgagcgcatcgcaggtgaggcttcccgccttgcgcattacaacaagcgctcgaccatcacctccagggagatccagacggccgtgcgcctgctgctgcctggggagttggccaagcacgccgtgtccgagggtactaaggccgtcaccaagtacaccagcgctaagtaa

SEQ ID NO: 655357 - DNA, 875 bp, Homo sapiens
  misc_feature (104)..(104): n is a, c, g, or t
  misc_feature (153)..(153): n is a, c, g, or t
  misc_feature (162)..(162): n is a, c, g, or t
  misc_feature (189)..(189): n is a, c, g, or t
  misc_feature (192)..(192): n is a, c, g, or t
  misc_feature (204)..(204): n is a, c, g, or t
  misc_feature (211)..(211): n is a, c, g, or t
  misc_feature (217)..(217): n is a, c, g, or t
  misc_feature (230)..(230): n is a, c, g, or t
  misc_feature (243)..(243): n is a, c, g, or t
  misc_feature (247)..(247): n is a, c, g, or t
  misc_feature (253)..(253): n is a, c, g, or t
tcttaagaaaatgatgtatcggcaagcagtgtaaacggaggacttggggaaaaaggaccacatagtccatcgaagaagagtccttggaacaagcaatggctatngaaaaggttatttgtaacatttgtctaactttttacttgtttaagcttngcctcagtnggcaaacttcattttatgtgccatttngtngctgttattcanatttctngtaatnagtgaggtgaacnattcagatttcantatnggattnggatattgaggtaaaatttcatttgtgtatatagtgctgacttttttgttgaaattaaacagatggtaacctaattgtgtggcctcctgacttttaaggaaaacgtgtgcagccattacacacagcctaaagctgtcaagagatgggacctcggcattggccttcattccttaaaattaaaaactacaaaagtgtggtgtaaatttgtatatgttatttaccttcagatctaaatggtaatctgaacccaaattgtgtataaagacttttcaggtgaaaagacttgattttttgaaaggatgtgtttatcaaaacacaatttctaatctcttctcttatgtatttggggcactagggcgcagttgtgtggcagttgagtaaatgctggttagctgttaagggtggcgtgtttgcagtgcaagagtgcttgggctggttcccggttttctccacgattggtcctgtgtaaagatgccttggtcgtgcagaaaccaatggtggtccagttattaaaatggccggagaagtgtgcttcaagtaacccggcgtggtataagaaggagaaaggggcaccttttggtgtgaaaacctttttcctcttcccaaaggggagggaattaag

SEQ ID NO: 655358 - DNA, 180 bp, Homo sapiens
tcaataaatgaaagcatttaaaaaaaaggcacgtattccttgaataggtaaaaaaagctccccatctgtcccctcccttttggagggagcagccccttagtgggaactcgtttgggataccccagaaaacatcagaaaagcaaccattaagccctctaccgtgcacgacaacacataaag

SEQ ID NO: 655359 - DNA, 948 bp, Homo sapiens
  misc_feature (104)..(104): n is a, c, g, or t
  misc_feature (226)..(226): n is a, c, g, or t
  misc_feature (235)..(235): n is a, c, g, or t
  misc_feature (262)..(262): n is a, c, g, or t
  misc_feature (265)..(265): n is a, c, g, or t
  misc_feature (277)..(277): n is a, c, g, or t
  misc_feature (284)..(284): n is a, c, g, or t
  misc_feature (290)..(290): n is a, c, g, or t
  misc_feature (303)..(303): n is a, c, g, or t
  misc_feature (316)..(316): n is a, c, g, or t
  misc_feature (320)..(320): n is a, c, g, or t
  misc_feature (326)..(326): n is a, c, g, or t
tcttaagaaaatgatgtatcggcaagcagtgtaaacggaggacttggggaaaaaggaccacatagtccatcgaagaagagtccttggaacaagcaatggctatngaaaaggttattttgtaacatttgtctaactttttacttgtttaagctttgcctcagttggcaaacttcattttatgtgccattttgtaacatttgtctaactttttacttgtttaagcttngcctcagtnggcaaacttcattttatgtgccatttngtngctgttattcanatttctngtaatnagtgaggtgaacnattcagatttcantatnggattnggatattgaggtaaaatttcatttgtgtatatagtgctgacttttttgttgaaattaaacagatggtaacctaattgtgtggcctcctgacttttaaggaaaacgtgtgcagccattacacacagcctaaagctgtcaagagatgggacctcggcattggccttcattccttaaaattaaaaactacaaaagtgtggtgtaaatttgtatatgttatttaccttcagatctaaatggtaatctgaacccaaattgtgtataaagacttttcaggtgaaaagacttgattttttgaaaggatgtgtttatcaaaacacaatttctaatctcttctcttatgtatttggggcactagggcgcagttgtgtggcagttgagtaaatgctggttagctgttaagggtggcgtgtttgcagtgcaagagtgcttgggctggttcccggttttctccacgattggtcctgtgtaaagatgccttggtcgtgcagaaaccaatggtggtccagttattaaaatggccggagaagtgtgcttcaagtaacccggcgtggtataagaaggagaaaggggcaccttttggtgtgaaaacctttttcctcttcccaaaggggagggaattaag

SEQ ID NO: 655360 - DNA, 193 bp, Homo sapiens
tggtggtgaagctaggaaaaaggattccaggaaggagcgtgtgcctatcctctttctgtgtgcttcagctgaattaagtgcttggagagctcaaatagttcaagatagccaagatgaccaattctgccaggtggcagcctgatcttgcaattttgattaaaataaagaacattccccaagaacagtttgttgc

SEQ ID NO: 655361 - DNA, 306 bp, Homo sapiens
cacgaggcccttctacgcccgcagcgagctcgcctcgcgctttgccggcgaggaggtggtggcggtgcaggaaagcctcgacatgcgccgcttcgcctcgccgcttgtgcagttcatgctgccctaccggatgccgcgccggaagggataggcagcgccgggccggcatgggagcgtcccgccgccggactgccttgtagttaacccgatggtgaagtttccgcgcccatagtatggtgcggctgtccgctcatgctctgccacacaaggacctgacgacaatcggcagaccacttgcgggaaatg

SEQ ID NO: 655362 - DNA, 1162 bp, Homo sapiens
ggatgacggagaggcaaaaacacatccagaaccttcggtcttctgctccctgacgtgatctgcttgcgtcctggtgcggtcgcggccgctgatcgttgtcgtcgtgtggtcctcgctgttgttgttccgaccccctggctgtcatctcgggttgtggacaacggctgttgtgccgtgtgcgtgacttgctcggtggggttcgttgtgtggctcgcgcggccagtttgagcctttcgttagtcagtgcagtcgcaacccgtgcggtggttctgtagttctatcttgcgtgtatttgtcgtgttgctcctatgatccggtggtatgcctggtgaataacctttgatggtcctgcagctgggccctgatccctctcctgtgtgtttttattggtctagtccttggtcgcatcttgctaggcattttccacacttgggtgaattgagtgatatccacatattgcagtgctccggggaattggtagttggacggtgaagctgttgtgcagctaacgttagttctgtgcaatcttgtggatgggtttagtagctgttggaggtgtctttgtagatatcttaatagatgctcggctcacctggagttccactaacctgtaaggcagtcgtcttggcaaggcctgctatgacaggtagctacagacagcatcacttggctcgagcctcactggggctcacacctacgctagtgtgagtatggggtaagatcagggctccagctaccacaggacgggctctcgggttatagtccgttccagtgcagggactagccgtggagagaccagggaccaggaagtcagacagtatgagctatgaaccagtggagtataggtactaggtcaatcctccagataagaggtaatggagaagaaaaagacggcacagccatggaggcagagtccgctgtccatgcgccctcacgtctgctggttgcatgctgtcaaggatgacacatgtcctgatgggagccatggcctctgcattgcatgaagaaggagacgatgcctttttcaatggtgtctccgctcgccatcgtgcagaagagcttttgattggcttctctcccgagattgtgcctgattctgtggcccaaaagcaagtcagttgttaacatcttcatgtgtatttatcctctgatctgttcatta

SEQ ID NO: 655363 - DNA, 109 bp, Homo sapiens
cccctattgggggcccccgggtttttttttccccccccccccccccccccctggggtttaattatggaaagggggggggggaatgaataaataaaggggttttttgcca

SEQ ID NO: 655364 - DNA, 243 bp, Homo sapiens
tctagaggatgccccacgcggagggacaggctcggagtgactggcttctgaaagtcggtcttgtaacaatgggatggatgccttcgaagagcccctgtccctatctatgcttgaaaacagcgtgcagtcctaaggtacaagaaccaggaccacataaaaacatggctccccttctgcggcttggaaaacgacccctaaattcggtgctgggatccgatccaggcacgggtatggctcagcgcg

SEQ ID NO: 655365 - DNA, 530 bp, Homo sapiens
tatgtgtggccgtgcaggtaaaggcttcctaaaagtgtgaaaacgtaggcttggattaaggcgacagcaattcctaggatatcagtaaaattagaatttgtgaagatgataagttgtaaagggaaggtataagggtgtgatatgtgctaggggtgggtgctctccaatatagggtgcatagattagggtggccttgcagtaagtgtatagcggtataggcgtacggccagggcatatgggtgtgaagtgagataggcgtgagtggtttcgaataatacaccttagctaattggggggcaataacgggcgggtgatagcggtgttcgcccctgtgtgtggttcaaacgacaaggctgtgcgccatagaggcgccaactcttactaaaaaacctccatataaacgacgacagacaaaccgccctaaatatatctcaaccagtgacacgcccccgtctcgatattacaggggagagatttgcgccaacctgcgctactaaagggtctacaatcagactacagtgagagagata

SEQ ID NO: 655366 - DNA, 106 bp, Homo sapiens
atctcctcctcatcttcctccttgtctcctcatcctcctcatcctcatccttggtctcatcatcctccttgtcctctgcctcctcctcctcttctgccagctggct

SEQ ID NO: 655367 - DNA, 212 bp, Homo sapiens
tatggtcggaggcctggagaggatgtcctgtccttccccaccaccaagacctacttcccgcatttcgacctgagcacggtctgccaaggttacgggcacggaagaaggtggcgacgcgctgaccaatgccgtggggcaggtgtacgacatgcccaaggcgctgtccgacctgagcgacctgcacgcgcacaaggttacgggtgggaccgggt

SEQ ID NO: 655368 - DNA, 120 bp, Homo sapiens
caggacaggggtatggttgcatggtagaaggattctattggcgaggagcccagagcatgagaggcatctctaccctaagtatccccatcgagcacggcatcgtcaccaactgggacgacc

SEQ ID NO: 655369 - DNA, 237 bp, Homo sapiens
aaaaagacgccgcagtagcctttgttatgccttctgctaaagagccggaactaagttgcaggtgactaaaaaatgggtggatgatattgatcgcacaaaacgacccgatcaattcagatttggcattgggcgcaaaagtggcgcaatcagataactgaatagcgggcagataggcagctcactagcgcggaaaattaggcaaaagactatcacccaagggatgcaagaccgggaatc

SEQ ID NO: 655370 - DNA, 242 bp, Homo sapiens
ctccctccctccaaaacccccagggtcccaggaaaccggggcctgggtggccctcctacccagggtggcccaggccgggaaaaaccccctggcaggggtccccctcttgggctttgaacccacacgccagctcctctttgaaaggactttcctgtttggaacggcaaaaaaaaaatttttttttctctttttggggggggttaaaaggggaccccaaccctttaaataaacctttcccaata

SEQ ID NO: 655371 - DNA, 376 bp, Homo sapiens
aacaatgatgtgccagatggatgacacagcccacatgacaggctcaggcatggaagggggcatcgaccatctagacatctgctcagcacagacatcttccactgaaaagagagcctcatctgaacacgctgggtgcttggttgacaattttctctcggtacattagggaagtgatacggtttagctgtgcccccagccaaatctcaacttgaattatatctcgcagaattcccatgtgtggtgggagggacccgggggaggtcgatcgaatcatggggaccagcctttcccgtgctattctcttgatagtgaataagtctcacgagacctgatgggtttatcagggtttccacttttgcttcttcctcattttctc

SEQ ID NO: 655372 - DNA, 208 bp, Homo sapiens
cctagtattatttgctggctgcaccatcgggatgtcctgatccaacatcgagcgtaaaccctattgttgatatgtgactctagaatagtgattgcgctgttatccctagtggtaacttttgttcccgttggtcaacgttatatggattcacttagagtaatagtaagttctgcttttgacttggtgcaagtctatagcattgtaactt

SEQ ID NO: 655373 - DNA, 191 bp, Homo sapiens
ggagctcggaccagattttacatgaactaggtcattttctgtcttctatcagatacctaggcagaacctaagacaggaaatgaccgtagtgtccatgttagattatcttgcgctagatcaataccagttgtaatcagtgctacctgagtagaaaacacacccacagagcctacaaggttgtaagaacgacg

SEQ ID NO: 655374 - DNA, 149 bp, Homo sapiens
tctgagcaagctgtgaagtagcccttgaaagcagactgtctaaatgctacgtggtgctgctttaggcagttagatgctcgcctgagggtgtgggtgttagtccaggctgttacatgctcacctgggtgtgcgagggttctgctacaggc

SEQ ID NO: 655375 - DNA, 1563 bp, Homo sapiens
agtgtggtgttaggatagctgtagtgctgctcgctgcgtatgggctccagtgcgtgtgtgtcggccgagttgaggcagcatgagtgcgtgcacctggtcggggtgttgggctaggggcgcggagagcggtacatgctgcccgcggtggtgccgcggttggctcctgtgccgtcggttgtggcgcgtacctcgttgtagctccattggttgtacgccaaatgggccggcggggtgttgtcggcgtcgcgggattttctcgccggtgatttgtgcgtgaatgccacatgtcgtgtcgcgcgttttcagctcgactggtttttgcatcggcctgtgccgtttgcgccgagagcgctcggtttgcgcggcgaagtgtgatcttatttgggcgcgtgttgagtgtctgttgtgagaccgcgtcgtgggcgccctcagtgaggagttatgtcgtgtcgcggccgtccatcgggggcgactgtgagcgtttgttcctgcaaggtggtgattgcttcccgcagtgcggcggttgtaggtatctgaccgccgaactgcgggcgctttcattcgccccgctttgtatggcacgtgttggtgggcgagttgaggtgggggtcgttgtatgtcttgagtggtgatatgttaggctggttgcggcaatggggggtggtcggtccccccaatgggggctttgggggagcccgccccgccggggtagattgccgcgcaggtgccgggagggcgcttataccgccgtatagggatattctgcggccgttgaacatgggtggcgtcctgccccggttgataaatgggtgggcgcgccgagaattttggtggggggcttgcgattgtttatatatggggtatagaagagggcgtagacaaaaacttcttatggctgaagggaccctgggtgtgaggatagaaacttggggttttggtgcccacacagaagataggagatatgtctgtagagtgtcatcaaccggtgtcaaataggttgtgggggcccacccttgagaaccccctgtgctttgtatatagttcccccccctctggctgtaagatagtttcaaacgtgggttttaggtcccccctaagagtgagggtgacacccagactttctctgtgtgtgacacactgtagggtgaagaaaacacccctcttgtttagaagggagatagatgtacaacaaaatgtttgtacacacccctatttagtttagggcgctttaaagccaggcgccacccaattgataggaagcggtgtctaagcggtctagtaccaccccgcgtaccttgaaagatatctccctataccattgtaacgtgatacatccttccactaccgccgattggggcccaaatttgatccaccctatagaagaactaatgttagtataagtgtaccatgggaacatgtcttcctccgcgataagcctgcggtccagagtttagaacactgaactgaccaattgaccagccccaatatttgccaatccaacccacaagtcattattaccctcactgtcaaccccacacaggcatgttcataaggaaaggttta

SEQ ID NO: 655376 - DNA, 422 bp, Homo sapiens
  misc_feature (163)..(163): n is a, c, g, or t
  misc_feature (166)..(166): n is a, c, g, or t
  misc_feature (222)..(222): n is a, c, g, or t
gctagcatctaagatcggcgtcggtgggtgtacagtcatcgatacagcatcatgagcagttcttagcacaggtgcggaacatgcagtgccctggtgcaggatgaggcgtacaagcacagagcgagcggctgtcacttgcaaggacagtgtgggcttgcgatcngtnccccagtagctctgcgcacgggacgatggagagcttggcaggatgatggcccacgnatggcgggtgccacctccttggagcacttaacacccagaccgacgtggccattgtagtccccggtagcaacaaatgccttgaacctggtgcgctggccggcacgggtctgcttctgcactggcataatcttcaaaacctcatccttgagagaggcccccaggaagaaatcaatgatctctgattccccagcccgggccgg

SEQ ID NO: 655377 - DNA, 266 bp, Homo sapiens
aagtgcgccgagcatgcgacagctgatgtgcagtggccggggtgcaacgggcaccgtgcccatcacgataatcccaaccagcgccatcggagtcaggaacacgaggtcatacatgaccagggtcggcatggcggtgtcctgtcctctctctgtctgtggggaatactattatgcgtgcagtatagacagcgtggcgcaatatacaaggtctttgccgatcggggttgagccgaagcaatgcgagcagtagagaccgatcgcggccg

SEQ ID NO: 655378 - DNA, 445 bp, Homo sapiens
tctagacgtgaactatgtgggatacaggtcatgggcagagctcctggcctcagtgatgcctcctgtatctatccataggcctggtaagatcagcactgggatgacgatgagcagaatggtcatgaggatgcccagcaatcaggtcccagatgttcaggcacttggccggtggagtgcataagccatgggctcccggtcacgtcgccaaccagtcttcctgtccctatacttcatggagtaggctaagtgctatgaagcccaggcagcaagggttcatgatgagggtgttgaacagggaccagacgacatggtccggcacgggggtcccctggcggatgtggatcacggtggacgtcgggggagcagggttgtggggcgcccccagcacagccacctcgtgctcctccttgagcatcacatagttcagcgtctgacgggtaccgag

SEQ ID NO: 655379 - DNA, 353 bp, Homo sapiens
tagctggaactaaagatgcatgcacctttacccagctaattttggcatatttttgcagagacaggcttcaccatgtgcccaggctggtctcaaacttgtgagctcaagtcatcctccagcctcagcctcctgagtagctgtgataacaggtgcccactagcacgcccagctaatttttgtatttttagtagagacgaggttttgccgtgttggccaggctggtcttgaactgctgaccacaaatgatctgtctgcctcggcctcccaaagtgctgggattacaggtgtgagccaccacgcccaacctagcttttcaccacacaatagctactttgtcttctgtcacttgactt

SEQ ID NO: 655380 - DNA, 328 bp, Homo sapiens
ctgccacacccgtcgtgtcctaccacactacactcataaacgtcacgcggagtttgaaaaaagccacagcttgctcatcttccgacaaagagcggattcacagtccgttcgatctcagagaactgagtacggcacccacttcatggggccaaccccactaaccaaaaaatggcttcgctgccccaagatcaaccaaactccgaaggcctgcgcgaccctcgattgttttgaaaactcatggctcgtggtcaaaaaagtaaatgctcttcaaaatgttttgaaaaccctcaaaaaaaaacagcacttccttaaaaagaaaagtctatta

SEQ ID NO: 655381 - DNA, 1239 bp, Homo sapiens
gcctcgcgacggccatggccctttacccctgtactcactgctgcagcgcacgccctgctctgcgtcaacgccatcgcagctgctgcacgaggagcgattcctcaagaacattggctggcggaacagaccagggcaacttggctggactttggcagcaagagccgggacacttaacactcacagcttaactgaaccttactccgactctgtaagaaccgctgactgacgagctgccactctgactacactagctaaaccttccaacttgccaactctgctgctccacctctctctactctactctctggcactgcacactactccacgctgcgcacgcacacacactgcgcacgcaccctcaacgcacacgcaacgcgaccaacttgccataccgacttacgcacaccgctctactctacccctctctgccgctccacctctacctctcgcgcaacctacctctctacttaactccctcataagccctgccgcccttgcaccccctttgccaaccttctgctccaaaaacaaactgtctacaaccgcctcgcacacaactctaaacaaccccacggcgggcaatccttccactaacttcctaccttccctcgctctctcaccactcacctctctcccaccctcgctctccgcacccatcctgcactaacccttctccccacttccaacccacaccacacccattcttcaccacactcccagttggacaccacgctggccagcactcacccctttccctcccccagggggacccctggggcaacactacctccctctcgcacctcgggccccttcccacgcgtgcctctcaaccattacgccttacggccctcctcacttgcacctgctccgccactcgaccccacccttgcgctcccacacccaatccgcggcttgcccaatcaaccaaaccacttagcccaccacgcccaacacacccatacactctcacaacctcctaccagaaactaacctctgcggccccgcctacacatccaacacccatcacaaacctacagccctaacaagagccgacactttctcacacaccacttctccctctatcccccctccaacaacacagatccactaacgaaacagacattcactcctattacgccacaaacatctcactaaacacccccaccgcatcacatcctcctcgacacacccctctcgcgtcacatcatactccccccctacacacgactcatcacaccg

SEQ ID NO: 655382 - DNA, 228 bp, Homo sapiens
agcagcggtctgtataatagtcaatgccttcacaattcacagagcaacttatccatctagtcattcttagtcatgcatttattagctgcccactgtaataaaggcctttttctaactctgtgtacaaatagacctcttcccaagatagacaagatgtatgcttttgacctggtagtggattgaagaaagctattaaatttataaccaaatatattaacaagatgattg

SEQ ID NO: 655383 - DNA, 761 bp, Homo sapiens
aggaaggaaagagtggacagaataacaccgtggggttgatccaactgaacctggcccaaggccctcaatgcactttgcgatgtgcctgattgacgatgctcaaccatgtgccctgaatgaccttcgagtgagtgaccctgtgcccttggtgtgtgccatttgtcctcaacctggctggggataagtgccttttgcagctgtgagcttgatatcaaggaaattgcagaaccttgagtttccagtgactgttactccagcaagttcttgaatgcactgggaccaacctcacccaggtcaagaagccagtcatcgctgctgtcacatggctatgcctttggctggggtgctgtgagcttgccattgatgtgtgatatcatctattgccggtgagacacggcccagctttgcacatgcctggagatcttacatagtgaaccattcccagtgttgcgtggctgtgtacccagagcactcaccactgtgctcgctaggagaaggtcgctttggccatcggaagattgggtccctcacctggttacccggtgatctcagccccaggcacgcccaagcacagcagggtcttgtcatgcaaagatttaggtccttggttgaagacacctgggtgcgagagaaacgacccatcccgtggtggccagcaacataccctttcccccgccacatttcttacacgcatccggaaccgtcagccgtaatgtgcccacaccccacatacggtgtgcaaattgcacgcatctcctgca

SEQ ID NO: 655384 - DNA, 147 bp, Homo sapiens
ccaatccccccatttccttttggaaagttgggcctctcataaagcggcttggccattttaagtgttttgtaaaatgcattaaagtgttgagttttgtttgctgtaaaaggcatttccctatgttgattaaacttatcttttttccca

SEQ ID NO: 655385 - DNA, 357 bp, Homo sapiens
  misc_feature (144)..(144): n is a, c, g, or t
  misc_feature (231)..(231): n is a, c, g, or t
cagtatccaattcctccagataacaagtatttgggagtcttaggttctccaaggatctttgggaagcggctatctttgcttagcaggggcagtttgatgtgcactcctgcccgaagtccagtgcccaggttagatggacaggtncagatgtatcccaaaacgctcattccacatgaactcccagccacgttcttggataaaatctctccaacctctttgagggccctcggnaagaatctttcaaacactctcttcatgttaccacccttctccatgggagaatcacccggtgtatgaatcctccctcacttcaaccccgaatcagggaaggctcttctacattgttgtgccacaatt

SEQ ID NO: 655386 - DNA, 191 bp, Homo sapiens
cttgcatgtaccgggaccgggcttgcatgtacccttgcatcttccgggccttgcatctaccgggtacggaggaattaattctaagacgattgtgcattaaactgtggtttgctccacagatttcagatcattgaccgtagtatacccccggatacatggggataccgagtcttcgaagttcgtaactcatg

SEQ ID NO: 655387 - DNA, 192 bp, Homo sapiens
acggggtgcggtgtctgctgctattctcgagcttcgcaattgccgcctaaggacgacaagaaggaggaaggacggttggaaagtcggccaagaaagacaaagacccagttaacgaatccgggggcaaggccaaaaaggaggaggtggtcgaaggcaaggtcgggacaagctaatacttagctttgtttgcaa

SEQ ID NO: 655388 - DNA, 791 bp, Homo sapiens
  misc_feature (435)..(435): n is a, c, g, or t
  misc_feature (614)..(614): n is a, c, g, or t
  misc_feature (635)..(635): n is a, c, g, or t
  misc_feature (660)..(660): n is a, c, g, or t
  misc_feature (662)..(662): n is a, c, g, or t
  misc_feature (665)..(666): n is a, c, g, or t
  misc_feature (677)..(677): n is a, c, g, or t
  misc_feature (722)..(722): n is a, c, g, or t
  misc_feature (736)..(736): n is a, c, g, or t
ggcacgaggggaattgtgccctcataaaagggaccccagagaactgctgcaccccctccaccacgtgggacacagtgagaaggcactggctacgaaccaggaaaccctccccagacaccagatctactaacaccttcatcttgggacttccagcccccagagcagtgagaaatacattcctgttatttgtaagcctcacggtttacagtgttttgctatcacagctcgaatggactaagacagcaggaaacagaatacagagaacatggagagaagcaaggcttttctgggtgtgaacttcccaagcatgcaaaaattttacacaatcaaaaaacaaaaaattaaattgtaacatttaaaatgaactaaaattaatgtaactgcctatcaagccagtgacacaatcacacaagcaacatttctggtgccgcgaanacaagactgggcccagcttccatgggacatgttctaaggagtgagacgctgcaaagaagcgcagatgccatccggagctggactggtgcttactgttatcggtaatatctggagtgctattttgaaactaaagattttagaaaccgaatttttattgtaagagatgcaatataaatccnagaagttggtaaaactctacnctgttaatttgaattggaatattancntgnncactttttaanatccattacttctaactctgtccctgaaaatggtcagagccctgnaccctgacagcatnggcacccgagtctcattccggtctaaaaatctttctcttccaagcccagggcttc

SEQ ID NO: 655389 - DNA, 207 bp, Homo sapiens
aaaaccttttagagagataaaaattaacaccatagtaggctaaaagcagcacaattagaaagcgttcagctcacaccactacctaaaaatccaacatatactaacctctcacaccaattgaccattctatcacctgtagagacctatgttagtatagtaacatgaaaacattctcctccgcatagcctcgtcagattaaacactact

SEQ ID NO: 655390 - DNA, 118 bp, Homo sapiens
tggtttcccagatgcttaaaggaagacatatccctcccctggacagcaaggagacaatgggagagagagagaacataagagcatgtgaataaaatggcaaaaaatactgaacgcggga

SEQ ID NO: 655391 - DNA, 263 bp, Homo sapiens
aaagctgtatatatgacaataattacccctatacatcacatctaatgatacactccccataaccatcaagtcactggtctctctcccgtacacattagcacacaggtacagcactacgaaacctgagagaccacagtttactattacaggttataagaaattagatatatctccacgtatcatatagtgttagtacttgatttcagaatccctatatcgtggagtgcgtgattctgtgggtgtaccgaggctcgatatttcgt

SEQ ID NO: 655392 - DNA, 694 bp, Homo sapiens
  misc_feature (6)..(6): n is a, c, g, or t
  misc_feature (32)..(33): n is a, c, g, or t
  misc_feature (45)..(45): n is a, c, g, or t
  misc_feature (50)..(50): n is a, c, g, or t
  misc_feature (59)..(59): n is a, c, g, or t
  misc_feature (72)..(72): n is a, c, g, or t
  misc_feature (83)..(83): n is a, c, g, or t
  misc_feature (297)..(297): n is a, c, g, or t
  misc_feature (537)..(537): n is a, c, g, or t
  misc_feature (551)..(551): n is a, c, g, or t
  misc_feature (559)..(559): n is a, c, g, or t
  misc_feature (561)..(561): n is a, c, g, or t
cggggncgtcacatgtggtaccccctgatganngagtagggaggngagcnacactaggnggcggtctcgtcntcggccccggncagcagcagagggtgctacctctgacgttcgggggaacaagtaggaaactacatctgtctcgtactggctcgctgccactgtggcagcagactgcgctaagtaccgctcctatgcaggcaccctctcgtttgcaactttgaagactgcttagaccacgaagaagtagacatcacctatcctagatccccccagggctagccgtgcccgctgcangaagtgttagaaagaggctactttgcctgctaagactctctgcaggcgagggtattacaccttggccaaggctatagccccttacttctgcagcagaaaaccaggttatgaccaagtgattacccgctggatcaaggtgtgaacctacacttaggccccgcctcctgcctcctcagttactaacaagtaggccaccagtcgtactagtaggctactagctgggtccgcacagacaccacntatttcagcacggngccgcctngntgttagttggagctagacaaagaaaatcgtcggcctgatttttttaagatccacacgccacacgtacaagggacactaaccctcccattgctacatggaccgtactctatcatgcagaaatttccacggtaac

SEQ ID NO: 655393 - DNA, 1153 bp, Homo sapiens
  misc_feature (871)..(871): n is a, c, g, or t
gccctgaacaaaaaaaaacaaaaagaaaaaaaaaaaaaaaggaaagaaagaaactgataaaaagaggcattccagcccctatgttattggatggaaaaagaaaaaaaaaaaaaagcaattcttcgcagtacatgtgtttacttgtgttcgaaaaaattctccggacaagaattaccctttgttttatgttttctcagtatttctgaaaattaccagtgtgttgttgcgcagttctcgcagaattgtttaccttaaaactgtgcttgaaactttgaaccgggcaagaaagtgtttcttgcgcggtttctcttgctctcccttcgaacaacttgtgaattgtggagggcttgtctcgaaccttcttccttccgcggtggggggcttctccccagagggtggcctatattcttctctctctgtgaaattgagtctccattggcgcagaaaggttctcaccactatatattctcccatggtggcaagaaattgtttagagtttgtgcgtaggggatatagtggggtatgtgtgggtatgtgtggtctattatagagaaaaaaaattatctatttatctacaacttattattacatatagagatatattctatatctcgcgcgatatatagagaatataatctcgcgattataattacacaattagagggggcgttattttatagagaaggagaagagaaccccaaaaaaattttctaagtggttctctcttacaacacatctatctatttttctaaatgtgggggccaatgtgcgcacacaagaggctgctttctcccgtggcaatttccccgggtgtccgtggaaaccttttttagcaaaaccgacgaaagcggatctgtggctatttttgccnacaagggacccaaaaagtctgtgcaaatgttgttcacagggtggaatccttcccgcgtgttaaaccacatttgtgtataagagcgggttttcttccgcctctttctctccttgtgaaaacttttacttttaccttttccaccaggccagtctggccctaatagggggcccaaattattacagtgggtttaagtcgtggggaaagcggttccaatttttccagggggtgtaatgggaataataagcttgttattatatacgactcgtggtttttatcaaacgt

SEQ ID NO: 655394 - DNA, 673 bp, Homo sapiens
agcggaggttgtaccccagcaccagccgctccaccaccctcggctagtcttcgtagtgcagtaatggtcccgctgtaaatgtgggaggacttaagtctccccagctggaaaacaagaccctcatggttcgacacgaagaactacgcagaaggaacagcgtggcaggggctgggaaccccggggtaccaccccatgcgcgagaccccggagaccaaaagagacgaacagtgtactcaatacaacgaatgatgcagcctcccaggaggcacccacactcgagcgaacaggtcaaagaagaacaacgcaggtagcgctagatgtgagtcctcccacacgagagaccaggcacccgaaatgacacagaagcaaggaacgattgagcacaccccccagcacctcacaaaagaacatcccacaaacacacgagaccaaccacgaggacatgcaatgatgaacgacgacagtggcacacaccgcacgcgccagcacacgcgtggagcaacaccgccacgcaaagcggcacacaaggcgggaacacaaagaaaacaacccggaaaagacgcaagcccaaaagacagcgcaccacacagacccggaacgcacaggcagatagaagagaccgcaacaaaacgcaaccaacgcggagcccgagcagagagaaacggcggacgac

SEQ ID NO: 655395 - DNA, 341 bp, Homo sapiens
  misc_feature (42)..(42): n is a, c, g, or t
  misc_feature (103)..(105): n is a, c, g, or t
  misc_feature (128)..(128): n is a, c, g, or t
  misc_feature (218)..(219): n is a, c, g, or t
  misc_feature (224)..(224): n is a, c, g, or t
  misc_feature (252)..(253): n is a, c, g, or t
  misc_feature (260)..(260): n is a, c, g, or t
  misc_feature (336)..(336): n is a, c, g, or t
agaggcttttctggaaatccaagaaaaagaaataaccattantttgttcaatgataattttctagatcttcctcgtgtccaaagctatatattttctcctcannngccgccgctcccagacctttctngccctctttttctccctcttgctggggcgggctaattcccctccgcccccacctctcttctttcagtgacactgtgtgggtgttgatggnntgggntctcaccggtgtgggggtttgtcctttnngccagcngcccccgggcggtggcgcccggggcctcaccggcccgccccccaccccggcccatccccggggcgggggccacggngctgg

SEQ ID NO: 655396 - DNA, 201 bp, Homo sapiens
  misc_feature (12)..(12): n is a, c, g, or t
  misc_feature (139)..(139): n is a, c, g, or t
cccgccgtacangtgcgtgagactttgttcgtgggcgagggcgggcctgtcagaccccgccgtcgcggctgtgaggtcgccgcgttataggccgccggcttccgacgaagcaacgcgccagccgagcgtcacgacaggngaaagatcgcgtcccccggacgttgatgcacatccgcaactggtacggcggggggtaccgag

SEQ ID NO: 655397 - DNA, 159 bp, Homo sapiens
acggacacaagtgcataaggacacagaacacaggcccaggagtcagcttcttcctcacttggtggcagtgaagaggcatcacaaataaatttaaaaacgttcctttcttacttcatcttcagtttccttgacatacctcagatcctgcaacgatatgcc

SEQ ID NO: 655398 - DNA, 525 bp, Homo sapiens
  misc_feature (329)..(329): n is a, c, g, or t
  misc_feature (405)..(405): n is a, c, g, or t
  misc_feature (464)..(464): n is a, c, g, or t
  misc_feature (484)..(484): n is a, c, g, or t
  misc_feature (508)..(508): n is a, c, g, or t
tctctctcaagttaaagttcacaaatcctatggaaggggcaaaatgctgccagtctctttgctaaaacataacaagagtcacctttactccagttcccaacaagttcctcatcttcatctgaggccacctcagcctggactttgttgtccatattgctatcagcatttggggcaaagcatttcaacaagtctgtaggaagttccaaactttcccacattttcctgttttcttctgagccctccaaactgttccagcctctgcctgttacccagttccaaagtcacttccacattttgggtatttcttcagcaggtcccaatctactggnaccaatttactgtattagtccgttttcacggtgctggataaagacatacccgaggactggggaaggaaaaagtggntttaattgggactttaaaggttccacatgggctgggggagggctcaggattcatgggtngggagggcaaaagacaattntttacattgtgggccaggaaaaantgagggaggaggcaaaa

SEQ ID NO: 655399 - DNA, 576 bp, Homo sapiens
atgacagacccagatgttcctggcccaagtgatccttacatgaaagaacacttgcactggatggtgacagacattccagggacaacagattccacatttggaaaagagttgacaagctatgagaaaccaaagcctaatataggaatccatagatatgtgtttgtccttttcaagcaaaaaagggggaacaagtactccattacatgtcctttttcgagggattacttcaacacacgaaattatcaaaatgaccttggtgtccctgttgctgctgcttatttcaatgctagaagggcaacggctcctagaagacgctaggggttaggctactatagccatccaatcagaagccgattatcatgactttatggctatgattgaaataacagctttagcttgctttagattgatttagctttcttgtgtttgtggagttgttaagaacaaagatgttagaagttaatgaaattcagaagcatggatattgttgtgaatgccatgctagctgattgatgtttgtttgtttagaaaatattggagcctttggtgtgggaaagcccaatttctttctgggtt

SEQ ID NO: 655400 - DNA, 201 bp, Homo sapiens
tcgcggcggactcggatcgctggcaagtatgtacgaggaccagcagagaaaatttctatcttagctgtgaattattccatgtccacatagaatctggatgtgttacttgtggtgttttcacttcaaaaatttattttcattgttggaattagtcttataattcaatttgctatatgtgtaaaggtaggtgttttagtttgg

SEQ ID NO: 655401 - DNA, 159 bp, Homo sapiens
aggatatgagttctgggattgaggtaacatggagcccaccagcatccatgagcattgggagttaggggcactcatgattctgagaagtcactcagccacgcagtacatgatatacattttaatcgaaacacagttgttcaccatgaaaagggaaactat

SEQ ID NO: 655402 - DNA, 102 bp, Homo sapiens
cgctctcctcttatcatcctcctgacctcctgcatctgttccagatcctcctcctcttcacaatctgtggccatcctccttgtcttcttcctcctccttaag

SEQ ID NO: 655403 - DNA, 1296 bp, Homo sapiens
  misc_feature (1004)..(1004): n is a, c, g, or t
gactcttccgggtgacgtagtctgtaggcactcataatgttccagcgtctgacgatacccgacgtattgctttcgctacaattatcgagctcctctaatcaatatactaggcgtgttcgctgaaccgcctgagtaatagaattagtgttacctttaatcctcataggaacggtttggagaatacggtcgacccatcatatcatgcatgtgagtgatgttgcaccagtgcagtagcttcgaagggtggcttctgtgccttggtaaaagatctcacatatgttcctttatcgagattggtccgatgcaaccaaagcgagcaagtggtcagcgaggggcctatggttgagttcccattagtcgtgctaaatgtagttcagtagactaggatcacatccgtgctttaccttatcgaggagcatgaacaactcggtttgtggacaacgatgtttgaatgcgcacaaaagcagcagaggttcagaacaggctaaaataacacacacaactgcaacacctttttttcgacgctacactacacaacacttgacaatacgatcggctgttatggacacacacccacataaagagaaacgagcgcaaaaacacgagccacctcacttttgtttgaggacccgggtgcgctacggagccctattgggagaaacaccttgtgatcctttacaccacccaacttgtcatctcagtatgtggccggccccaggtttggccccacaagaagaaagtgttaccgtgcggcggaccaccttccgttgcgatcatatactcgccttgttttccccataaaggcacaaaactcgccgtgtctccccttcatgaccaactatgggtgcccgctggtggatattactctcgacccgccaacattatatagagcaatatacggacccccggtgttgggtgcaaccacccgggcaaggctgttcttttggggagcacagacaaccgttgctagagtatctcgaggaccatcgtcatggagccgacanccacatccgagggggcgtaaattccattagtacgaaacgagggcaactgtatcaccaacggagggcagcacggctcgtcaatactgtatcacaataaattgttagggcccccggcggcgatcgttagcgtgagacatacctgtcgccacgtcgcacacaaaacactattgtgtacaaacgttatactagcgtgcacaaaacacggctgtagctgacatagccacaacgacaacacccgctacgcgccatgacttactagcagcaggcacgtctcatccctaactcatcaccc

SEQ ID NO: 655404 - DNA, 739 bp, Homo sapiens
aaggatccccctgatgctgaacgacagtggctcagtcacagttccatgcccaagtatatgccggcagttctccctggagcacgtccacggctcgggcccctactcggccccctccccagcctacagcagcctccagcctctacgccgcctgatgctgtggcagctctgtgacccaatcatctccgacatcaccgagctggctccgtgccagcctcctatgggctcccccggcgggagcatagacgagaggcccctatccagcagccccctgggtgcgtgtcaaggaggagccccccagcctcgcttcagagactccccgggtaaaggaggcgagtcccggggcccaatcttccgtggaacacccatctgtgtacccgaaccggcctcatgtgagctccatccatgcgggagagtgaacctgtccccgcgacctccgtgagagccctcactggacggcaagggggccaacagcgggacaccggaggggcacggggtcctcggacatccccgcagaggttccagacctcttagcaaccccgttgacccagaggtggcccccaatggtgggcctgatgtggggacaagacacttcacgcgtctagctcaaaagacctcggaaatgctaatcccggacgtccccccagggattaagctgccacaccagtggcgtgaggcaggtcacgagcgttgaaccgagtacccccgggcgccctgctaggacacaggtgagggcctgggg

SEQ ID NO: 655405 - DNA, 142 bp, Homo sapiens
tcttcatttctttccaggtacattaaattgtcatttcatcttagagggaaactgattagatgggtgtgttcgtgttctgatggagaaaacagcaccccaaggactcagaagatgatgtagccggtcagaacaggtgggctag

SEQ ID NO: 655406 - DNA, 743 bp, Homo sapiens
caactatgctaatgacgagacttgtgttatttgcgtcgccagcgaacacatcgctcagacaccatgtgggaattgtgaatggtcggagtcaacgtgatttgtgtcgtattggtgcgcctgtgtcaccagtgactgcttattaactctgtgtaaatgtgtgatatagtttgccatcaatgaccccttcatttgacctcaactacatggtttacatgttccaatatgattccacccatggcaaattccatggcacctgtcaatggctgagaactgtggaagctatgtcatcaatggaaatcccatcaccatcttccagtgagctgagatccctccaaaatcaagttgggtgcgatgcttgtgctgctgagtactgtctgttgtgatgtccacttggctgtcttacaccacacatgtgagaagtgctggtgtgctcattttgcatgtggtgtgtgatgccaaaatgtggtcatcatctctagccccctctgcttgatgcccccatgttctgtcattgggtgtgaaccatgagaatgtattgacaacagcctcaagatcatcagcaatgcctacctgcaccaccaactgcttatcacccctgtgccaatgtcatccagtgacaacttatggtatcgtggaatgtgactcatgaccacagtccatgccatcacttgtcacccagaatgactgtggattgccctccgtgaaactgttggcgtgatagcgctgtgctctccagaaactca

SEQ ID NO: 655407 - DNA, 262 bp, Homo sapiens
acatgagtggtctacactaaagcagtagcattgaatttcagaggagtggcaactaaagaagctgttgagtgtggtaaatttgacaaagtttgcgggttgattatggttggggtgtgagggatactctgtaatccccgacttgtcctagagctcttgttggcccgtggtgtagtgtgtggcttgctggttgactgcccgtattcgtggttggtggaggatccctcatagtagatcgaccttgcaaggctatggcaagctatgg

SEQ ID NO: 655408 - DNA, 446 bp, Homo sapiens
gcctactactactaaattcgcggccgcgtcgacccgcgcccggccctctacaaaaaattttttaaaaattagccagatgtggtggtacgcacttgtcctcccagcttactccataggctgaggtgggaggatcgcttgagcccaagaggctgcagtgaaccatgattatgccactgcactccagcctgggcaacagagtgagactctgtctcaaaaaaaaaaaaaaaaatgccggacaaagtgctgggattacaggcatgagccaccgcgcccggccctctacaaaaaattttttaaaaattagccagatgtggtggtacgcacttgtcctcccagcttactccataggctgaggtgggaggatcgcttgagcccaagaggctgcagtgaaccatgattatgccactgcactccagcctgggcaacagagtgagactctgtctcaa

SEQ ID NO: 655409 - DNA, 236 bp, Homo sapiens
acatgcaccatgggtgcgaactagggatgcacgtttcccgggggccccgcgcagaggctactgggaaggcactttcgtccgtaggttgacccaggggcaacttctcttcctctccatgtttttcaacaggtgcctctacctcccctttcaagacttgtcttccaatctgggccttcttcccgatttttgctgcccctggcatgtgggacacacatcgtgggtgtgaacgagggatg

SEQ ID NO: 655410 - DNA, 374 bp, Homo sapiens
tgctgcttcgtcctcctcgatgacttgccttgactgacgcaccccccgggtctgtctcctttctgaattccctcggcatggtaccatgtgaacgtgggcagaagggagtgggtttcacattcactccgtcttagtcttccccattaccctgtgagtcagttgcgttaacgtgggcatgttacaaggagagttggggctcgagcatcctggtattttggtgcctggactcctggtcgttcccttctctttgtcctgcatcgtgtagactggagctactttcatgcctgcgagtctacccttttttgtatattgctcctggggtggcaggatagatgcgtgcggggggcgaagggacatgacccttcatactttgc

SEQ ID NO: 655411 - DNA, 1052 bp, Homo sapiens
ggggaagttagatgacctccatacccacccctccctgggctgtcccctgcccacatgactccggcggttttcttcataaccagtgttggaggtaaactttaaatagcccccggactcagggagttaaccaaatgcttcttgaacctcacttaaattttcaacgcacatgaaaagcaccacaatgaaaggctacccaaagcttgcacccactgccaccttcctgccatgactggttaaggcagaagggacacattattttgtcattacacgatctgaacacccccttttgcacagagtaatggagaggctagactcttagacatccctggaatgggtcgggacagcaggggcccaggctttagagctctgggttgactctgctcccatccccaggatagaagcggctacattgacgagcatgagctggatgcccttttgaaggatctgtacgagaaaaacaaaaaggaaatgaatattcaacagctcaccaactacagaaagagcgtcatgtccttggcagaggcagggaagctctaccgcaaggacctggagattgtgctctgcagcgagccccccacccctacagcctgcacacacctgcctgcagagcaggaaacgagagatagaggatgggcagctggggggctgtcctgagccccctgcacccacccctgcccaggcagtctttgctcagtggatcacacacatggaaggtgatgggggcatgggtggagggtccctaattctcttcgctgtgatgcatgagctccctcgctgtatgatttaggcttctatgtccaacagagtggactcttccctctcgctcccctctgccggtcccccatgccaccacccaccccaaacttccaggttccatccaccaccttgccaatggtgtagctgtcctctcagaactcctgtgtgtggaaggcacccgccctttccttgccttctttactcggcgtgctccttttctctttgggtttcttgtttaccaaagaagagtttacagacaataaaatggaaaggtcctgctgtggaaacttacccaa

SEQ ID NO: 655412 - DNA, 609 bp, Homo sapiens
  misc_feature (360)..(360): n is a, c, g, or t
agtcaagaatttgattcagttttgtttcgcaggatgcaactctttctggtttagtgaatcttggctgtcaaccactgtcatccataccatttcattcttcaaattcaggctcaacaggacatctcttagcccatacacctcattctgtgcataccctgcctcatctgcaatcaatgggatatcattgttcaaatacaggacaaagatctctttcttctccagtggctgaccagattacaggtcagccttcgtctcagtacaacctattacatatggtccttcacattcagggtctgctacaacagcttcccagcagcttctcatcccttggctagttaccgctttctgggccaccatctnctcagcttagcctatgccttaccaatctcctagctcaggaactgccctcatacccgctccagccaccgaatgcattcttgacagacttcacttatgcccaagtactggccaggggggcctttctgacctttatcctttatatgtaccagttgtgtgaccagcggcatttcacttgatgggaactgttacctttaaccttgacccggagaatcagggcttactttgcacccattgtctgcagacatactt

SEQ ID NO: 655413 - DNA, 1310 bp, Homo sapiens
  misc_feature (679)..(679): n is a, c, g, or t
tggatttctattttaattggcactgtggtctgaaagtgtgtctggtattggttttgggtctcttttgtgcattctgtgcgtgattgtgcttttattgtctccgatttatgtgtggctcattttttaagagttattgttgttcatgtgtgtggcaactacaaaaaaagtgtatttttcatatgtttctttgtggatgtggacagttctcgtgttaaaggtctcttattatagaatatacatttgtggtctctatagtgtgttgtagagtttatagggtctccgtgaaattattctttgtggtataatttttctctgtggcttataaatgtgaatctctgtgtgtctctatatatactgtgtctcgcgtgtggaagtgtgtttacaaagctctctccccaatatattctattgtgcgtgtttggagacgcctataaaggttctctcatttattataaggggttttctaatagagacaaacctttgtgtctcttatatgtagagaatctctgtggagtgtgccctccctgtgtgtgtttgtggaaggtgtggacaatatatttatatatttctctacaggacactttaccgtctttagagcgactaatatctctcttgtgtgctgtaggaaaccttttgaaatgttggccttgttatccacacaattatattatcgtggttnataattggccgccccctgttgttggcctcctgtaatatttcttgctagagaaacctttgttggtggtgtctccagattatattcaaagaagcctccagtaggtatatagggttctttgggacacaaatatttctgaagagggcgtattttgacaaatatggccctgttggccaatttttgtgacacccgtggaactttctaccccaatttgttgtggcccttagtgacttaaagaaaattttttctcacctttctcaaatatcaccccttttttgtcatatttttatggggaaaggccccctatattgtgggcaatgttgctttacactttgtagcccatgttgtgtttggaaacgaaatgtgaggggactaccccctgtggaaaccaccaaccgggggcgggtttaacattcacgttggcgagaaggatctaatagtgccccgttgtatatgatataaatatccccacggtctagtttgccccgcacatatcctatatagggccccgtattttttcactaaacatataggaggggccaacatttctaaagggccctattattgttcaaacacctcttccccaagcgggggtgatcaccatacaatatctgtgggacaccacaatcgtctg

SEQ ID NO: 655414 - DNA, 600 bp, Homo sapiens
ggggaagttagatgacctccatacccacccctccctgggctgtcccctgcccacatgactccggcggttttcttcataaccagtgttggaggtaaactttaaatagcccccggactcagggagttaaccaaatgcttcttgaacctcacttaaattttcaacgcacatgaaaagcaccacaatgaaaggctacccaaagcttgcacccactgccaccttcctgccatgactggttaaggcagaagggacacattattttgtcattacacgatctgaacacccccttttgcacagagtaatggagaggctagactcttagacatccctggaatgggtcgggacagcaggggcccaggctttagagctctgggttgactctgctcccatccccaggatagaagcggctacattgacgagcatgagctggatgcccttttgaaggatctgtacgagaaaaacaaaaaggtgagcagccaagcctgaggcccggccactgtccccagggcacgggagaggcttctgcaggagaggaggggaaaggtgcctggtcctgctctctactcccctctgatctgccacagcaaggcaatagacattttg

SEQ ID NO: 655415 - DNA, 1372 bp, Homo sapiens
agcagcccccttacctgcacctggccgagctgacggcgtcccagttcctggaaatatggaagcactttgacgcagacggaaatgggtatattgaaggtaaagagctagaaaactttttccaagagctggagaaggcaaggaaaggctctggcatgatgtcaaagagtgacaactttggagaaaagatgaaggagttcatgcagaagtatgataaaaactcagatgggaaaatcgagatggcagagctggcgcagatcctgccaaccgaagagaacttccttctgtgcttcaggcagcacgtgggctccagcgccgagtttatggaggcttggcggaagtacgacacagacaggagtggctacatcgaagccaatgagctcaagggattcctgtcagacctgctgaagaaggcgaaccggccgtacgatgagcccaagctccaggaatacacccaaaccatactacggatgtttgacttgaacggggatggcaaattgggcctctcagagatgtcccgactcctgcctgtccaggaaaacttcctgcttaaatttcagggcatgaagctgacctcagaggagtttaacgcgatcttcacattttacgacaaggatagaagcggctacattgacgagcatgagctggatgcccttttgaaggatctgtacgagaaaaacaaaaaggaaatgaatattcaacagctcaccaactacagaaagagcgtcatgtccttggcagaggcagggaagctctaccgcaaggacctggagattgtgctctgcagcgagccccccatgtaaagtggggacgggggctgcttctccacctcccccaaacctgcttctgctgccctgatgcgtctacccagactcagagaccgtgagcgccccgcccccacccctacagcctgcacacacctgcctgcagagcaggaaacgagagatagaggatgggcagctggggggctgtcctgagccccctgcacccacccctgcccaggcagtctttgctcagtggatcacacacatggaaggtgatgggggcatgggtggagggtccctaattctcttcgctgtgatgcatgagctccctcgctgtatgatttaggcttctatgtccaacagagtggactcttccctctcgctcccctctgccggtcccccatgccaccacccaccccaaacttccaggttccatccaccaccttgccaatggtgtagctgtcctctcagaactcctgtgtgtggaaggcacccgccctttccttgccttctttactcggcgtgctccttttctctttgggtttcttgtttaccaaagaagagtttacagacaataaaatggaaaggtcctgctgtggaaacttacccaa

SEQ ID NO: 655416 - DNA, 453 bp, Homo sapiens
  misc_feature (207)..(207): n is a, c, g, or t
gtactctagaggtcctggtcaatgattcttgtgctagcctccgagtagctggatacaggtgcaccaccacacctggctcattttttgttttagcagagacaagttttgcatgttggcaggctggtctcgaactcctggccgtcagtgatctacccaccttggcctcccaaagtgctgggattacaggcgtgaaccactgtgtacggnctgtggttttttcttttcttttcttttcttttcttttttttttttggagatggagtctcgctctgtcacccaggttggagtgcaggggtgtgatatcggttcattgcaacctccgcctcccggtttgagtgactctcctgactcagcctctcaggtagctgggactacgggtgtccacaaccaggcctagctaatttttggtattttaagtagagacggggtttcactgtgtaagctaggatggtt

SEQ ID NO: 655417 - DNA, 513 bp, Homo sapiens
tcggtaccctataacatctatggatcaagagcgcggtgtttgatactggtatgaaaaacaccacttaaaggaggcatttgcttatcagcgacaataagcacaaagcttgaagggtatgttattctctcaatactacttctccacttcgcaggcatatctattcaggagggcatcttgaaagaggagcagggtcacccacgacttcttatatctcctgcagtgcactggccaagtgtgtgtgtattgatatgcttgaagcccctagggttctcaacatgccaaatcacaaaggggttcaatttgtggcctgcaacattgcccccaagcaagactgtcatccagtccctaaaagacttgaagcctggcattgctttggtctacctcatggatcaaagtcctttcaggcatctgtttccagaatagaaaggtttcatccatattgaaaatttgttctggcaagtgattttcctccagactcagcttatctagagtttcccaaaattcttccgctgc

SEQ ID NO: 655418 - DNA, 1282 bp, Homo sapiens
agcagcccccttacctgcacctggccgagctgacggcgtcccagttcctggaaatatggaagcactttgacgcagacggaaatgggtatattgaaggtaaagagctagaaaactttttccaagagctggagaaggcaaggaaaggctctggcatgctggcgcagatcctgccaaccgaagagaacttccttctgtgcttcaggcagcacgtgggctccagcgccgagtttatggaggcttggcggaagtacgacacagacaggagtggctacatcgaagccaatgagctcaagggattcctgtcagacctgctgaagaaggcgaaccggccgtacgatgagcccaagctccaggaatacacccaaaccatactacggatgtttgacttgaacggggatggcaaattgggcctctcagagatgtcccgactcctgcctgtccaggaaaacttcctgcttaaatttcagggcatgaagctgacctcagaggagtttaacgcgatcttcacattttacgacaaggatagaagcggctacattgacgagcatgagctggatgcccttttgaaggatctgtacgagaaaaacaaaaaggaaatgaatattcaacagctcaccaactacagaaagagcgtcatgtccttggcagaggcagggaagctctaccgcaaggacctggagattgtgctctgcagcgagccccccatgtaaagtggggacgggggctgcttctccacctcccccaaacctgcttctgctgccctgatgcgtctacccagactcagagaccgtgagcgccccgcccccacccctacagcctgcacacacctgcctgcagagcaggaaacgagagatagaggatgggcagctggggggctgtcctgagccccctgcacccacccctgcccaggcagtctttgctcagtggatcacacacatggaaggtgatgggggcatgggtggagggtccctaattctcttcgctgtgatgcatgagctccctcgctgtatgatttaggcttctatgtccaacagagtggactcttccctctcgctcccctctgccggtcccccatgccaccacccaccccaaacttccaggttccatccaccaccttgccaatggtgtagctgtcctctcagaactcctgtgtgtggaaggcacccgccctttccttgccttctttactcggcgtgctccttttctctttgggtttcttgtttaccaaagaagagtttacagacaataaaatggaaaggtcctgctgtggaaacttacccaa

SEQ ID NO: 655419 - DNA, 1004 bp, Homo sapiens
tccccccctaaaattgtttgttttgggggggggggcggaagggggtgtggcttttttttcacaaaaaaaaaccccccaccctttttaacgggggaaaaaaaaacggggggcacacccggtgtgggccccccgagaggagggggggcctctctctttattagaagagaggtgggggggggcgacggccccgtgtgaggttggttggggccaagctgcggttgacaccccctcctcgttttaagtagtgggttggtattacaacaaaagaaagtgagactctctgtggtgggagaacccccccagcgatgctacgccgttggtgggatgtgttatcttttcctctttgcagcgagcgagaggtgttgtgtttagcgaccagcgtggctctctcgtttgggtagaaatatatatcctctctcgcgtcgggcgagccatcatctatgaggtggtttcttctctcttatcttctctcgcgcgcgcccgcggagggtctctttctagtgtgggacagagagagccactttacgagagtgttcctcgcgagcgcgggagtgactaggaagagagtgtgtctcgtggcgaccccagagggttctttattaacgagcgtgggggcggcgcccactgtttttcaagacgcgggtccgatctattgagggcgtgttggtatgatgaggacgcccctcctctctctctcgctcatcacagataggtggtggctgccccgaacagagacggagagagtgggtgtatctccccgctaattaaaccagcgcgggggggggccacactgaagtgagtggggacggaacaacagaacgatctgaataagcaaagcggggcccgcacgagaggtgaagacactatctccctacactactatgtgatgggaaaaacataccctgtctgaagtgagggatggagacacacaaccatgatgggcgcgccggtgagggggaacaacaccacacagtgtgtgggagagtcaattacaacgaagatgg

SEQ ID NO: 655420 - DNA, 636 bp, Homo sapiens
  misc_feature (366)..(366): n is a, c, g, or t
  misc_feature (387)..(387): n is a, c, g, or t
  misc_feature (492)..(492): n is a, c, g, or t
  misc_feature (506)..(506): n is a, c, g, or t
  misc_feature (587)..(587): n is a, c, g, or t
gcacgagcgcctgtttaccaaaaacatcacctctagcatcaccagtattaaaggcaccacctgcccaatgacacatgtttaacggccacaataccctaaccatacaaaggtgacataatcacttattccttaattagggacctatatgaatggctccacaagggttcaactatctcttacttttaaccagtaaaattgacctgcccatgaagaggcagacatgacacaacaagacgagaagaccctatggagctttaatttattaatgcaaacattacctaacaaacccacaggtcctaaactaccaaacctacattaaaaatttcagttggggcaaccttcagacagaacccaacctgcaaacantacatgctaaaacttcaccantcaaaacgaactactatactcaattgatccaataacttgaccaacggaacaagttacccttaggataacaacacaatcctattctaaagtccatatcaacaatanggtttacaacctcnatattggatcaagacatccccattgtgcaaccactattaaaggttcatttgattaacaattaaaatcctacgtgatctganttcaaacgcggataatcccttcatttctatctacttcttcgtcctttcc

SEQ ID NO: 655421 - DNA, 105 bp, Homo sapiens
accgagctctgtacagtatcaggtatctcaaaagacagggtggggcagatgtgcttgagactcaggaaattaagcagcagaagccctaagatgagacacctgact

SEQ ID NO: 655422 - DNA, 175 bp, Homo sapiens
agtggatggtcaatcatagctgtatgagcttgatctcccgagctcaagcaatccttctgagtagctgggtctatatgccattatttttttttggaaatggggatctcactctgtcacccaggtgggaggggagtagggggacctgggttcactggcaaccttcggcctcccaagg

SEQ ID NO: 655423 - DNA, 105 bp, Homo sapiens
tagttactctgagtatcccgctccaaccaccaaatggttaagcacacggaataaagtcccctcgatctatattcctgtgtgctttaaccctttgtggtttgcgtt

SEQ ID NO: 655424 - DNA, 175 bp, Homo sapiens
tgacccctgggttcacacaatgcagtgtcgtgtgctgttggccgcaaccacttcgtgtcactggcagctgcttttcatccttgtgacagcaggggctcctctcacagttgcacctgccagtgccttccctgcttgtgccactggcctgtctgttttccccacgtctgttgcactt

SEQ ID NO: 655425 - DNA, 328 bp, Homo sapiens
cccgccccccggggctccagcgctggaagaccctcgccctaggccctgcttctgaatcgctggttttaaaatgcgccaattcctgcactttgccgatttgggtggatcacgaggtcaggagatagagaccatcctggctaacatggtgaagccccgtctctactaaaaataacaaaaaattagccgggcgtggtggcgggtgcctatagtcccagctactcaggaggatgaggcaggagaatggcgtgaacccgggaggcacagcttgcagtgagctgagattgcgccgctacactccagcctgggcaacaaagcaagactctgtctc

SEQ ID NO: 655426 - DNA, 280 bp, Homo sapiens
tcacacgtacaccgctctcttttcttctcggtgcagactcttctgcgtgattaattatggctacacgatgacaggctgctttgggagctttccctttcccagcagctttgtagtagcccgatcgcaccacatacgaatatagggagcagcgcccagtcttagtatttagcacgcattcacccgtagtctgttcactagaccaaagtccacacatttgtcaaggagtaacacgttagggcagacagctctaggtatcctctttaaaggtgggtaaatagct

SEQ ID NO: 655427 - DNA, 242 bp, Homo sapiens
  misc_feature (133)..(133): n is a, c, g, or t
tagagttgtacatgtcggcgagttaggtatgatgggcagtgaggggcgatatgatcctaggctataatattcggagtatcgtagccggtaatgtaacaacggtacctctagaatatagctagcatgcgcaaanttaaagcgctgatatcgatcgcgcgcagatctgtcatgatgatcattgcacttggatccatatatagggcccgggttataattacctcaggtcgatgtcccatggccat

SEQ ID NO: 655428 - DNA, 230 bp, Homo sapiens
cccgtcaacgctgactatgtggatgctgaggaagtgtcgcgacaggaagagaggtggcgtgacctggtgcgatgctgaccgaatgtgatctcgtgacctgcgaagataggtggcgtgacctgtggcatactgaggaagtgtcggtgacaggaagaggggtggtgtcacctgtggatgctgaggaagggctggtgacaggaagaggggtggtcacatagttcagcgtctga

SEQ ID NO: 655429 - DNA, 516 bp, Homo sapiens
  misc_feature (58)..(58): n is a, c, g, or t
  misc_feature (355)..(355): n is a, c, g, or t
  misc_feature (358)..(358): n is a, c, g, or t
  misc_feature (361)..(361): n is a, c, g, or t
  misc_feature (370)..(370): n is a, c, g, or t
  misc_feature (372)..(372): n is a, c, g, or t
  misc_feature (417)..(417): n is a, c, g, or t
  misc_feature (425)..(425): n is a, c, g, or t
  misc_feature (430)..(430): n is a, c, g, or t
  misc_feature (437)..(437): n is a, c, g, or t
  misc_feature (501)..(501): n is a, c, g, or t
gctgtgtcactgaggcaaacaggaaaagtgattttggctaggcgtggttctcatctgngaaattccacagcgcaatgacaggcgacctctctcccacccactcaagacactgtcaggaatgtcttaagacctcaggagaccacttctttagcaagcaattttgttttttgtctttttttgagatggattctcactctgtcactcaggctggagtgcagtggcgcgatctccgctcactacaacctccgtttcctgggttcaagcgataatctcacctcagcctcttgagtagctgatactacaggcatgcgccaccacgcccggctaattcttgtatttttagtagagacagggnttnaanaggctgggntnaaaccccttgacctcaggtgatccgcccaccacagccacctgaantgctgggnatacngcgtttnctaccttccatcccctggcaaggaatacatttttaaaaattagtaagaaacatacacattcaanttttccaataaagaa

SEQ ID NO: 655430 - DNA, 511 bp, Homo sapiens
taggctcattctactgtcttctcgcagggctcttctatgaaacagttacaaacctacggccatgccaggcagtggcttcacacctgtaatcccagcactttggaatgctggggcaggaggatcacttgaggtcaggagctcgagaccagcctgggcgacaaaagcaagactccgtctccaaaaaaaaaaaaaactttgcattagtgtggtacattttgtaacaactgatgacccaataatgatccatttattataagctgggtgtggttacctgatgttctcagctactccaggtggggctcacttgagctcaggaattgaagttcaagcatgggcaacatagtgaaaccccatcgcaaaacaaacagagagatactttgttatttaactataactgtaacctcatgtctatagttaaaataaggttcccctgtatgtgttgtacagtcctgattttggacaaattatccaccataacagtatcatacagaatatttccactgccttaaaa

SEQ ID NO: 655431 - DNA, 117 bp, Homo sapiens
atctatatctcctagctcagagaaatccactgattccctctgtagcatcttcaggtaccatcttgacaaattcctctaaatccccaggggaagagtatgtaatagcgactccgtgga

SEQ ID NO: 655432 - DNA, 116 bp, Homo sapiens
ctcatcaaaataggaattgtagactgggtttatgttcgatgacaggatatcgatgaagggtttcgatgaagggtttgatgacagggtttcgatgaagggtttcgatgacaggcttt

SEQ ID NO: 655433 - DNA, 82 bp, Homo sapiens
gaactcagatgttatggttttgtaaatgtctgcaatcatggataggaataaaatcgcttatttgagagctttcattaaaaaa

SEQ ID NO: 655434 - DNA, 473 bp, Homo sapiens
tacttgtggcttaagatatacttccctataatgactttatccacagattcaaaaatgtacgtttatcttaaacaacttctgtgacattttaaaatgatgtggcttagaaaattgctaggtatctaagaatggctctattgatgatgtatagtgtagcacatgaagagcttgaatataatagatcgttttgaattgtgcaaatggaaagaacactccttctaaacaattatttccccgtcccttttattgacgtatacatacagaacagatatcatgtcgtaagtgtgtagctcccgtgagttactccaaagttggatatacctggttaagcaccaactgaatgaaaaaaacagaacactgcttcatatggagaagcccctcctgcccctcctggtcattgtcctttccatccctcccacaggtagtcactgagttctaataccacagagtcttttgactatctattgagcctt

SEQ ID NO: 655435 - DNA, 745 bp, Homo sapiens
  misc_feature (1)..(1): n is a, c, g, or t
ngggaacaggtcagattttgttatattctcgaggtagagccaatataatttgccagtgagtcagacacagggtgtgagagaaagacaggagtcaggggcactccagggcttttgaccactggacagtggcactgccctcagctgagatgggcagagttgcagtagacagagccgacttggaggatctacggagtgccgcattacaggtggcgctgggagtttcttttatgtccaaacataggtgcaggtgggcagttgcaggaggcccaaggacagggcagaggcccagtgcggaggtaaatttggtgtgatattgtgtttaaagccatgagactgaatgcgatcaatgagaggaaagacacgttgggtttgggccctgggcaccccagtttctgcaggttgaggtaatgaagatggcagagcaggcgctgccgcgtgttctgaagctggtgagaaaccgagctgcgtttctcccttgagagaggtgctagctcccgaacaatttgcccatgtgtcagcgtggtctggttcaacttgatgcttatctggttcctttgagcaatgagacgcctgtgcaagcgtgttaagcaccctactttagaagacctatataggcgtatattttccccaatcttgggctttcatatgtgggcaggcctggaacttggccatcacgttcccgcgataccatggctcggaaccggcaccttacctcacccaccacgcattcggtctcctccttgcc

SEQ ID NO: 655436 - DNA, 1049 bp, Homo sapiens
tgccctcatgtacgtaaattatactagcatttaccatctcagttctaggagtagtagtatatcgctcacacctcatatcctccctactatgcctagaaggaataagtactatcgcatgttcatgtatagctactctcataacccatcaaggaccacagctcccgctctatagccagagattgtgcctatgtgccatactaggtcttggccgcctgcagaagcacaggcgggttgggcactagcccacatactatgtctcaagtctcacaacacattagtggcctaagaactacagtacataaacgctaaaacctagctccaatgctaaagacgtaaatcgtcccaaacacattatagttcagctaaccaactgaacatggagcttatccaaaacaaccagcgtacatttggcaacttcacgcagaaacgaccacagccattaattattgtcagcaatcactcccttctaactaattgtttaacacaacatcaaaaacaacctattttagcctcgttccccgaacctattccttcaggaccacaataaacaatcacccatcataatacctagcgtactggattcctaacccttcataatcactggccagcccacgcacaacttattcagtgacacaactatcagggaaaaagaccgttaaggtgtcttataaggaagtgtgccgaagagactcccagtacttatacaaggttcagcccatgaacctacaagtcgtgatcgcgtgggacccacttattccgatgtagtacaccagggacaacgaccaacgtccgccgcagcgcgatacacgaagtggaaccacataggaagatgacaaccagcgctagatccgtccgacatggcaaatatcagacgcgtggccctccctctcctcctctcttttgtttgctcgtgagctaacaaacaagaaaacgcaactcgtagacgaggcgcgacaacgcacgagcgagagaaacatccgagcacgacgcacaacatccgcagacaaaccaggagagaacaagtcagcacaagagcgacagcagcgatg

SEQ ID NO: 655437 - DNA, 592 bp, Homo sapiens
  misc_feature (592)..(592): n is a, c, g, or t
tctcattctgtcttccaggctggagtccagtggcgcaatcttggctcactgatgcctcaaccttccaaactcaagtgatttttctgcctcagcctcctgagtagctgggactacaggtgtgagccactgcaccgggctaatattttttgagacaaagtctactacaaaactacaaaaactagccaggtgtggtggtacatgcctatagtcgcagctacttgggaggctgaggcaggaggatcccttgagcccaggaggtggaagttacagtgagcagagattgtgccactgcactccagcctagaagatagagggagactctgtctcaaacaaaaacaaaactagatgtgtcactgtacaggacacttaagattccttgacatcaaaaatgtttaagaatctggataagaacttaactaagataagacaaagaatattcctgtcctcaaggtggacagtcaaaagtgaggtcctaggtcttacttcagaccctctactgaatttcgtaactacaaatcagaaaaagctttttactttaccttgattttaataaggcaaggatttaaaaattcaactctacctaaagatttcn

SEQ ID NO: 655438 - DNA, 211 bp, Homo sapiens
ctatggcgacgataacaccttgcaaagatctatttgaaccctatcctaatggaaaccctagcagattctatgtgcatgccgtcgcaaatgtccgagcatggcctgttctggcccacaacgagtaagaatgtgagaagaagaggtcgttaccgcgagttgtctccggtcgagggccaatgttgggtgggggactcctcgtagacggtcgacc

SEQ ID NO: 655439 - DNA, 111 bp, Homo sapiens
aatatttaaagcacactcagcagcatattgttaataccgttgctaggtactatgtgcgacaaagagagataaacgacgtattctctacccttgagtttaataatcagattg

SEQ ID NO: 655440 - DNA, 336 bp, Homo sapiens
cctgtgcatgctcaggtctcacccagattaggatcctcccagccaccatactctaccccaagctggctgtggtggagcctgcattccctgagacaccccagcttccttggagtcctccttagccgggtcacatgactctcaggattcacatactcctgagcgttctcctcaggtctcttcgagccaggagacatgcagtacgagctgaacaggaacaacgtgacggatccgtcactctccgagatggtggtggtggccatccagatcctgcggaagaaacccaaaggattcttcttgctggtggaaggtagggaccccgggtctgatgagaggggg

SEQ ID NO: 655441 - DNA, 134 bp, Homo sapiens
cgtcacgcgtcgacgccatcccgagccaggatcgacacgccttgcaggcaactgtctgtagaccgtagccatcgctcgggcgttggtatcggcaggtaactggcctgcgcgaatgccacgttcgacgcaatgca

SEQ ID NO: 655442 - DNA, 3076 bp, Homo sapiens
tttttgtgttcaataagatttatttcctctcaacaccttgctgggttgggtttacttcaggaattaacagaactgttgtgggtttgttttgtgttgtgtttggagagagggtagacagcagtgggaaggggacgtaactgagaagcatgaaacaccttgagtggaccatgagacctgcttagagttaggggaaagcttgagaggttcaaggatagaagaactcagggtggttcaggtgtgacatgggttatgtgggcatttctggattgctctgggaaggttgctccaccccggtcaggatcaggcgagggggaaccagcctgagtgcagctgccaactcccgccgagtgcgtctgcgaactcccggagcggagtcccgcgtgccgccacctccccgcgggacgcactctcctcgctcccccgggccccgcgtcctccccccggccacccttccccacgttgtccccccttttccaatcacatggcattttaagaatgccggaaagggcggccgggcgcagcggagcgggctgctggaagttttggtgcgggatcgctggcacaaagttctggtgaacttgagcgaggacgccctggttctgagcagcgaggagggcgctgcggcgtacaacggcatcgggaccgccaccaatggctcgttctgcaggggcgccggggctgggcacccgggcgcgggcggcgcgcagcccccggactcgcccgccggggtccgcaccgctttcaccgacctgcccgagcaggtgcccgagtccatctcgaaccagaagcgtggcgtgaaggtgctgaagcaggagctgggcgggctggggatcagcatcaaggggggcaaggagaacaagatgcccatcctcatcagcaagatcttcaaggggctggcggcggaccagacccaagccctgtacgtgggcgacgccatcctgtccgtgaacggagccgacctgcgggacgccacccacgacgaggcggtgcaggcgttgaagcgcgcgggcaaggaagtgctgctggaagtgaagtacatgcgagaagccacgccctatgtgaagaaaggatccccagtatccgagattgggtgggaaacacctccgcctgaatcccctcggttagggggcagcacctcagaccccccgtcatcgcagtccttctccttccacagagaccggaaaagcatccccctcaaaatgtgctacgtcactcggagtatggccttggccgaccctgagaacaggcagcttgaaatccactctccagatgctaagcacacggtgatcctaaggagcaaggactcagccacggcccaggcatggttcagtgccatccattccaacgttaatgacctgctgacccgagtgattgctgaggtcagagagcagctggggaaaacaggcattgctgggagccgagagattaggcatcttggctggcttgcagaaaaggtgccaggggagagcaagaaacagtggaaaccagccctggttgtgctgactgagaaagaccttttaatctatgacagcatgccacggaggaaggaagcctggttcagcccagttcacacataccctcttcttgccaccaggctggtccattcaggtccaggaaagggatcaccccaggctggtgtggatctgtcctttgcaacgcgaactggtaccaggcaagggattgaaacacatctcttcagagcagagaccagcagggacctctcccactggacaaggagcatagtacagggttgccacaattctgctgaactcattgctgaaatcagcactgcttgcacctacaaaaaccaggagtgccgtttgaccatacattatgagaatggattttctattaccactgaaccacaggagggtgcctttcccaagaccatcatacagtctccttatgaaaagctcaaaatgtcttcagatgatggaatcaggatgctgtatttagattttggaggcaaagatggagagattcaactggaccttcattcctgccccaagccaattgttttcatcattcattccttcctgtcagctaagattacaagactgggcttggtggcctgaagacaggggtgacttgcctttgagaaaagaagggctgcaatgccaccagagaacgtgatgtcagacaccatctgtagtgagcagcgcaccagatgtagcgtgctacagtcagctttagctctcaagagtcgtatgtaactgtcccagactcctctgtcagtttcagcaactacaagggataccctgcgaaagtaccatgagaaatatcagagtaaaactttctagaacagtacaaggttaaagaggtgaggtgacgggaaatacacagcatagctttgaaataatgacaaccaaggacatgaccattagaacagcatgtgcagatcttaatcatcccagttcctaggcaacttgttcaccaggtacgcaagggccgaatagttgagaaatggacattcttacctactcctcctagccccctatccccagtaacagtgatcccttttcttattgtgatttatttcctaattcttgctgagttgactttcccttgtaggaaaagaaaaatatttcaaatagaaacccaccttttatttaagtatgaagcagctgttactttttaaaaaatgaattatctttcaatggtgtagaatgattccaaagtgtctccattagcatatactgagcaggaattaaataaagcatcagatactgatctgagctgtaagctggtagaatctgagccaaagtagactgcttaaattgataagctttgctaaagagttgtatgcacaaaggatgattaattctgggactatactcacaccaaggtctgctgtcttatagccaagaattacagctttatttatagagagtgaattatgggtattttttcagaaaatattgtcatctgatatacacataaaacaactcacattgttggagttaactaattatccccatttcatggttttcagtggcaacttactgacccttgtttttgcctgtgcttgtatgcatgcattttcaagcaagtaataaagcagcctcatttaattctg

SEQ ID NO: 655443 - DNA, 1226 bp, Homo sapiens
ctgaattactcatagtcagaatcgtaaacatctattaacgcacaaagactcaggctgtgccttggggtccatgagaattcggcccaatagctattgctttctgtactttgcatccacagttcctcatccgtgaacattatcttcagattctgagacattcccgcaacagaaaccaaagaaagattagaccacagtcactggattccagttactaagaagcaaagttggacccaagcatcttgaaatgattctcagaaacaaaagttgaaataaggtagtttctgcaactctcaggcaacatgaaaataaaatttaccctcgtacatagccttgttctcacagtttctgggcattatgaacaatggggactgctttttcattcattcattcattcatcagtcaacatttataaatcatctactatgtgccaggagttataattgggacaagggataaagaggtgaaaaaaattcaaacttgtgaacctagcattatctggaacaaagtgtgttgatgtgcaggaacacataaggaaccatttgcagtaaagacaacaaaaaatgccaaactctgcctggacagtggtggaggactccttgcagtagaagtcatgttgaattgaagcctgagggaaaactcaccagaggaacaagggaagggagcccagagaggggcacgagcattccagacttagggaagatccaagcacagagctcgtgcactgctgcatggcccagttagagcaccacatacggccctggggaatgaggggaaatgaatcagatactcactaagtacccagcacttgacacaagttaccacttacaacgtgtgtatccattctgcaaggccggtattagtgtgcccattttgcagattaggtacctgaggctcaaaagagttcaggaatcaccccaggtggtgtagcttctgagagatggaggtgggattccagttccgggactgtgtgtcacttgcatacctgtgccttggtaccacagggggttgacacagaggtgggagatggggaggaagacttttcactagcgtatccttttctaccttttgaaattggaaccatggggaacagcaggagtctttggggatgataagagtcatggatgtgatctgggtagatatttttatatttggtgtcaaataacaaatgtccaaggagtgactgctgaatccaattttgcagtgatcctgattccattgtaaagaaa

SEQ ID NO: 655444 - DNA, 441 bp, Homo sapiens
ctggggcattcttgtaataacctaaggatctccaataaagcctcatttccaaaactgtcaccacctcccaaaacagctgcaccatctgcaaaccaagcgtccaaagacaagagcctgtgggggacatttacattgaaactgtaatatacactacgaagttcactttgtgcagccatcatgattatatatgtttagaacctttttatcaaaggcagcttgaacccattaagagcccttcctacacaactgccaacctgcctgttcttggtctctctagatttacttatgtctgttcttggtctctctagatttacttatgtatacttcataattaattggtgctatataatgtgtgccttttagggtcttatcttttcatttaggaaaacattttcaagatttagttatctcttagaatgaattgtgttgttctgtcgacgc

SEQ ID NO: 655445 - DNA, 1146 bp, Homo sapiens
tttttgtgttcaataagatttatttcctctcaacaccttgctgggttgggtttacttcaggaattaacagaactgttgtgggtttgttttgtgttgtgtttggagagagggtagacagcagtgggaaggggacgtaactgagaagcatgaaacaccttgagtggaccatgagacctgcttagagttaggggaaagcttgagaggttcaaggatagaagaactcagggtggttcaggtgtgacatgggttatgtgggcatttctggattgctctgggaaggtaaacaatcattataatattgttaccctggtaaaatgcaacttgaaatccaaataactaacttgcaaagcaacttttgaaatacaacccattccaactgaattcttaaatggggggcttcttatatgggaactcaggaagaaagagagatccccaggcagcatttggtgtggcactgggaaaacaaagataggtcaaaagcttaaagcatagaatgagttagagctggaagaacatttgtccctggggtctgaggcaggcatgacctgttgaaaaccccaggccagcagagacacctgtccagggctcgatagaaaacatttcttgcatttaaggacaggaggtttaagccactcgggctacgttgactcttcattctagaatcttgggacagcgtattcccttttaactcctggggagcccagggccttggtctgagtttagcttcctccagggaacccgggtggaaaggagagacaggtaagaactccgcagaggcagcgaagcctgggtttgaggaagcagagggaggagacctggatcagttacaaatgagttgttaagacccagggacaattctacgggctgggtatgaaagggaagtcggctcaggaggaccgagtgagggcaccgaggcgggacgcacgcacccggcgaaggtgcagtgtgggcgcccacggagtgggggagctgggaagaaagggggctgcggtgggctggagagaagcgggacggggaaggcgctcgggaagctgtccccgcggcgtcgtgcgctctggggacagaggaggggaggtctgggcgggcgggtggcgtgtgaccgccgaggctgcggcggctggaacaggtgagcggccgctgggttgc

SEQ ID NO: 655446 - DNA, 313 bp, Homo sapiens
ttcaacattcgtgtcccttccgattactgagcgcaatacatcatcttttcattattgcctcgacttggaggcatcgtacaggccatggtcctggcaataccatacaaaggccatgatctaaccatgatcgtgtcgttgccgaatgacatcgatggtctcccgaagcttgacgagaacctcactgctgagacattgatggaatggacaagttagcacaatatgagagaagacacgtgtcaatttcactcgttacctcggatctcaaacgtcggaagcgagctatgacctcgcggacacgtgacagaaatgttca

SEQ ID NO: 655447 - DNA, 522 bp, Homo sapiens
tttttcatgaacaatgactatatttttattttagcaagaaattcgtagctgatcgctgggactgaggaggcaagaagtgagtgattgggaaaatggattgattgccatggttcatacttgtctctttttctctctctttctctctcagcttgcacctacaaaaaccaggagtgccgtttgaccatacattatgagaatggattttctattaccactgaaccacaggagggtgcctttcccaagaccatcatacagtctccttatgaaaagctcaaaatgtcttcagatgatggaatcaggatgctgtatttagattttggaggcaaagatggagagattgtaagtgtacttttctttagacagtgtgatttcatatattaatatttcattatgcaacataatgctgccttactcttattcggcatttgactgctaatgatgtgcttgcaagcccatgttttatttgatccttgaaaaacggtgattaggttcaattatttcaaacttctgttccctcgtgcc

SEQ ID NO: 655448 - DNA, 5076 bp, Homo sapiens
  misc_feature (24)..(24): n is a, c, g, or t
  misc_feature (46)..(46): n is a, c, g, or t
  misc_feature (50)..(50): n is a, c, g, or t
ctgctccgcggctccccttgcttnggggtttgaactggctgctggntttnttcccctcccctgtctcggtctctccttcttcttttaggttgctccaccccggtcaggatcaggcgagggggaaccagcctgagtgcagctgccaactcccgccgagtgcgtctgcgaactcccggagcggagtcccgcgtgccgccacctccccgcgggacgcactctcctcgctcccccgggccccgcgtcctccccccggccacccttccccacgttgtccccccttttccaatcacatggcattttaagaatgccggaaagatggcggtagcggcggcggcggcggcggctgggccggctggcgcgggaggcggccgggcgcagcggagcgggctgctggaagttttggtgcgggatcgctggcacaaagttctggtgaacttgagcgaggacgccctggttctgagcagcgaggagggcgctgcggcgtacaacggcatcgggaccgccaccaatggctcgttctgcaggggcgccggggctgggcacccgggcgcgggcggcgcgcagcccccggactcgcccgccggggtccgcaccgctttcaccgacctgcccgagcaggtgcccgagtccatctcgaaccagaagcgtggcgtgaaggtgctgaagcaggagctgggcgggctggggatcagcatcaaggggggcaaggagaacaagatgcccatcctcatcagcaagatcttcaaggggctggcggcggaccagacccaagccctgtacgtgggcgacgccatcctgtccgtgaacggagccgacctgcgggacgccacccacgacgaggcggtgcaggcgttgaagcgcgcgggcaaggaagtgctgctggaagtgaagtacatgcgagaagccacgccctatgtgaagaaaggatccccagtatccgagattgggtgggaaacacctccgcctgaatcccctcggttagggggcagcacctcagaccccccgtcatcgcagtccttctccttccacagagaccggaaaagcatccccctcaaaatgtgctacgtcactcggagtatggccttggccgaccctgagaacaggcagcttgaaatccactctccagatgctaagcacacggtgatcctaaggagcaaggactcagccacggcccaggcatggttcagtgccatccattccaacgttaatgacctgctgacccgagtgattgctgaggtcagagagcagctggggaaaacaggcattgctgggagccgagagattaggcatcttggctggcttgcagaaaaggtgccaggggagagcaagaaacagtggaaaccagccctggttgtgctgactgagaaagaccttttaatctatgacagcatgccacggaggaaggaagcctggttcagcccagttcacacataccctcttcttgccaccaggctggtccattcaggtccaggaaagggatcaccccaggctggtgtggatctgtcctttgcaacgcgaactggtaccaggcaagggattgaaacacatctcttcagagcagagaccagcagggacctctcccactggacaaggagcatagtacagggttgccacaattctgctgaactcattgctgaaatcagcactgcttgcacctacaaaaaccaggagtgccgtttgaccatacattatgagaatggattttctattaccactgaaccacaggagggtgcctttcccaagaccatcatacagtctccttatgaaaagctcaaaatgtcttcagatgatggaatcaggatgctgtatttagattttggaggcaaagatggagagattcaactggaccttcattcctgccccaagccaattgttttcatcattcattccttcctgtcagctaagattacaagactgggcttggtggcctgaagacaggggtgacttgcctttgagaaaagaagggctgcaatgccaccagagaacgtgatgtcagacaccatctgtagtgagcagcgcaccagatgtagcgtgctacagtcagctttagctctcaagagtcgtatgtaactgtcccagactcctctgtcagtttcagcaactacaagggataccctgcgaaagtaccatgagaaatatcagagtaaaactttctagaacagtacaaggttaaagaggtgaggtgacgggaaatacacagcatagctttgaaataatgacaaccaaggacatgaccattagaacagcatgtgcagatcttaatcatcccagttcctaggcaacttgttcaccaggtacgcaagggccgaatagttgagaaatggacattcttacctactcctcctagccccctatccccagtaacagtgatcccttttcttattgtgatttatttcctaattcttgctgagttgactttcccttgtaggaaaagaaaaatatttcaaatagaaacccaccttttatttaagtatgaagcagctgttactttttaaaaaatgaattatctttcaatggtgtagaatgattccaaagtgtctccattagcatatactgagcaggaattaaataaagcatcagatactgatctgagctgtaagctggtagaatctgagccaaagtagactgcttaaattgataagctttgctaaagagttgtatgcacaaaggatgattaattctgggactatactcacaccaaggtctgctgtcttatagccaagaattacagctttatttatagagagtgaattatgggtattttttcagaaaatattgtcatctgatatacacataaaacaactcacattgttggagttaactaattatccccatttcatggttttcagtggcaacttactgacccttgtttttgcctgtgcttgtatgcatgcattttcaagcaagtaataaagcagcctcatttaattctggataatgctgggttttacatatagactgaatgctataatcaaatctattgacagtatctgcagttctttcagaattccagggaaataatataacgacctgatatctttctacaggaatattttcagacattatatagcacattactgatttaatgcttttacttttatctttcaaaacaaattcactaaaaataacacctatgattttgaagtcacttttctcaaaccttgaaaatgagctctaggatctctataaacatttctaacacttttcctgtagtttacatagacagacatctgttgttagacctgtgtgtttttaaagaatcatatgttaacaaatacccatgcaaagagcttcaaaaagtgaaaccgtgttaaaggaacacaatttttctcactcagacatatttgtttattgaattgcaaagttttattttaaatcagcatttccccaaagaatatatcatatgacgctagttccaaggggcttgactgagtggtgttttgctggggggagacaggggtttgttaatacactttactaaatactgagctgaaaaatgttaaatagatttcacgattgcctccttgaagattttaaagttcattgtggttcttcaaggcgaaatccggtgaaccattcctcacacttacctacaggactcttttctaatggagcatcttgtgaagctagtgggtttttttgttgttgttatttgttttttttttttaatgctttagaaaacacagctttaggatattgactttttgtttatttctattttcaaatgctgaaaagtcaagtcccagtttgaataccatagaaaagctttgatgcatttgtaaattatattgcactctttcactatatattttcaaaatcactggaatgttgttatacaagagaattataattgtgtattgtaaataacatattaaaatacatatattaatgccaatagttaaattcaacaatatgtaatctaaggtgctcggttctacatgaagtatgagttaactgctcataattaagttgccaagattctattatatatttatagacaaattaaaatgatcataattacaaaatatgatttctttatcacttaagctttgggctgattaatatctgtgtggggggtcaatggaaactacattctctacatttataaacatttaatttaattatttatattttaggaaaatatatttgaataaaattaatgcattttctagagtaaattaaaatgttattagcaagaaatagaaaatttgactaagataattgtgtatatgaatcatttttcccccaagttaaaatgtatcataatagagaggctctaatgaatcaatttccaatactcatttctttcttattttgaattcaagttacaatgactttacactgtagattttaatcttgtctgatgtgtgctggtgtgtatgacacaaactcataagtctggatcatgcttgggtacagtcaatgaatcaaccgagtcactttgaggaatttgtttttgtccaatttgctctgtgctcaatcccatgaattattaaatttacaatgtttgtccccaaatgaaaaccaatataaatgaatgatgttttaatctgtactttatgggaagttgcctatttgtcagtagatgtggttaagtgagtcctctggtgcagtgacatccttttaagccatctcatagggatttaaagaaggccaataggaatatagatattggtttttctttctctgacttgaactaagtaggagaaaccaaaccataaacctattacaaactacccaggcagaggcatttacttaattcatcaactagtgcaattaaaaccctgaaaacacatgatccttgttgactctgcttggttgaagcaggaaagaatggtcttgatggtcagaaagttttaaaattaatgggcagggcctttctggaccctgttttccaaacacgttagatattccgtcttgaggggattggagtaggctacagtgagggggtaatttttggatgtatctggacttttaaaaaatgtgcctatatttatagcaccatgaatattatgtaaaatttatatatgaattaaataaatattcacctctgatttccagtgcaaaaaaaaaaaa

SEQ ID NO: 655449 - DNA, 252 bp, Homo sapiens
ggaagtcagtaatatgttgtgattttaaggtagggggtgtggagctggaaggcttcttaacgggtgggcggctttaggcctactaggggtgtaaattttttactctctctacaaggttttttcctagtgtccaaagagccgttcctcttgggactaacagttaaatttacagggggatttagagggtccggggggcaaatttaaggtggacctaagattctatctggcacataagggggtagggtaccggag

SEQ ID NO: 655450 - DNA, 5181 bp, Homo sapiens
  misc_feature (24)..(24): n is a, c, g, or t
  misc_feature (46)..(46): n is a, c, g, or t
  misc_feature (50)..(50): n is a, c, g, or t
ctgctccgcggctccccttgcttnggggtttgaactggctgctggntttnttcccctcccctgtctcggtctctccttcttcttttaggttgctccaccccggtcaggatcaggcgagggggaaccagcctgagtgcagctgccaactcccgccgagtgcgtctgcgaactcccggagcggagtcccgcgtgccgccacctccccgcgggacgcactctcctcgctcccccgggccccgcgtcctccccccggccacccttccccacgttgtccccccttttccaatcacatggcattttaagaatgccggaaagatggcggtagcggcggcggcggcggcggctgggccggctggcgcgggaggcggccgggcgcagcggagcgggctgctggaagttttggtgcgggatcgctggcacaaagttctggtgaacttgagcgaggacgccctggttctgagcagcgaggagggcgctgcggcgtacaacggcatcgggaccgccaccaatggctcgttctgcaggggcgccggggctgggcacccgggcgcgggcggcgcgcagcccccggactcgcccgccggggtccgcaccgctttcaccgacctgcccgagcaggtgcccgagtccatctcgaaccagaagcgtggcgtgaaggtgctgaagcaggagctgggcgggctggggatcagcatcaaggggggcaaggagaacaagatgcccatcctcatcagcaagatcttcaaggggctggcggcggaccagacccaagccctgtacgtgggcgacgccatcctgtccgtgaacggagccgacctgcgggacgccacccacgacgaggcggtgcaggcgttgaagcgcgcgggcaaggaagtgctgctggaagtgaagtacatgcgagaagccacgccctatgtgaagaaaggatccccagtatccgagattgggtgggaaacacctccgcctgaatcccctcggttagggggcagcacctcagaccccccgtcatcgcagtccttctccttccacagagaccggaaaagcatccccctcaaaatgtgctacgtcactcggagtatggccttggccgaccctgagaacaggcagcttgaaatccactctccagatgctaagcacacggtgatcctaaggagcaaggactcagccacggcccaggcatggttcagtgccatccattccaacgttaatgacctgctgacccgagtgattgctgaggtcagagagcagctggggaaaacaggcattgctgggagccgagagattaggcatcttggctggcttgcagaaaaggtgccaggggagagcaagaaacagtggaaaccagccctggttgtgctgactgagaaagaccttttaatctatgacagcatgccacggaggaaggaagcctggttcagcccagttcacacataccctcttcttgccaccaggctggtccattcaggtccaggaaagggatcaccccaggctggtgtggatctgtcctttgcaacgcgaactggtaccaggcaagggattgaaacacatctcttcagagcagagaccagcagggacctctcccactggacaaggagcatagtacagggttgccacaattctgctgaactcattgctgaaatcagcactgcttgcacctacaaaaaccaggagtgccgtttgaccatacattatgagaatggattttctattaccactgaaccacaggagggtgcctttcccaagaccatcatacagtctccttatgaaaagctcaaaatgtcttcagatgatggaatcaggatgctgtatttagattttggaggcaaagatggagagattcaactggaccttcattcctgccccaagccaattgttttcatcattcattccttcctgtcagctaagattacaagactgggcttggtggcctgaagacaggggtgacttgcctttgagaaaagaagggctgcaatgccaccagagaacgtgatgtcagacaccatctgtagtgagcagcgcaccagatgtagcgtgctacagtcagctttagctctcaagagtcgtatgtaactgtcccagactcctctgtcagtttcagcaactacaagggataccctgcgaaagtaccatgagaaatatcagagtaaaactttctagaacagtacaaggttaaagaggtgaggtgacgggaaatacacagcatagctttgaaataatgacaaccaaggacatgctgtgtatttcccgtcacctcacctctagaacagtacaaggttaaagaggtgaggtgacgggaaatacacagcatagctttgaaataatgacaaccaaggacatgaccattagaacagcatgtgcagatcttaatcatcccagttcctaggcaacttgttcaccaggtacgcaagggccgaatagttgagaaatggacattcttacctactcctcctagccccctatccccagtaacagtgatcccttttcttattgtgatttatttcctaattcttgctgagttgactttcccttgtaggaaaagaaaaatatttcaaatagaaacccaccttttatttaagtatgaagcagctgttactttttaaaaaatgaattatctttcaatggtgtagaatgattccaaagtgtctccattagcatatactgagcaggaattaaataaagcatcagatactgatctgagctgtaagctggtagaatctgagccaaagtagactgcttaaattgataagctttgctaaagagttgtatgcacaaaggatgattaattctgggactatactcacaccaaggtctgctgtcttatagccaagaattacagctttatttatagagagtgaattatgggtattttttcagaaaatattgtcatctgatatacacataaaacaactcacattgttggagttaactaattatccccatttcatggttttcagtggcaacttactgacccttgtttttgcctgtgcttgtatgcatgcattttcaagcaagtaataaagcagcctcatttaattctggataatgctgggttttacatatagactgaatgctataatcaaatctattgacagtatctgcagttctttcagaattccagggaaataatataacgacctgatatctttctacaggaatattttcagacattatatagcacattactgatttaatgcttttacttttatctttcaaaacaaattcactaaaaataacacctatgattttgaagtcacttttctcaaaccttgaaaatgagctctaggatctctataaacatttctaacacttttcctgtagtttacatagacagacatctgttgttagacctgtgtgtttttaaagaatcatatgttaacaaatacccatgcaaagagcttcaaaaagtgaaaccgtgttaaaggaacacaatttttctcactcagacatatttgtttattgaattgcaaagttttattttaaatcagcatttccccaaagaatatatcatatgacgctagttccaaggggcttgactgagtggtgttttgctggggggagacaggggtttgttaatacactttactaaatactgagctgaaaaatgttaaatagatttcacgattgcctccttgaagattttaaagttcattgtggttcttcaaggcgaaatccggtgaaccattcctcacacttacctacaggactcttttctaatggagcatcttgtgaagctagtgggtttttttgttgttgttatttgttttttttttttaatgctttagaaaacacagctttaggatattgactttttgtttatttctattttcaaatgctgaaaagtcaagtcccagtttgaataccatagaaaagctttgatgcatttgtaaattatattgcactctttcactatatattttcaaaatcactggaatgttgttatacaagagaattataattgtgtattgtaaataacatattaaaatacatatattaatgccaatagttaaattcaacaatatgtaatctaaggtgctcggttctacatgaagtatgagttaactgctcataattaagttgccaagattctattatatatttatagacaaattaaaatgatcataattacaaaatatgatttctttatcacttaagctttgggctgattaatatctgtgtggggggtcaatggaaactacattctctacatttataaacatttaatttaattatttatattttaggaaaatatatttgaataaaattaatgcattttctagagtaaattaaaatgttattagcaagaaatagaaaatttgactaagataattgtgtatatgaatcatttttcccccaagttaaaatgtatcataatagagaggctctaatgaatcaatttccaatactcatttctttcttattttgaattcaagttacaatgactttacactgtagattttaatcttgtctgatgtgtgctggtgtgtatgacacaaactcataagtctggatcatgcttgggtacagtcaatgaatcaaccgagtcactttgaggaatttgtttttgtccaatttgctctgtgctcaatcccatgaattattaaatttacaatgtttgtccccaaatgaaaaccaatataaatgaatgatgttttaatctgtactttatgggaagttgcctatttgtcagtagatgtggttaagtgagtcctctggtgcagtgacatccttttaagccatctcatagggatttaaagaaggccaataggaatatagatattggtttttctttctctgacttgaactaagtaggagaaaccaaaccataaacctattacaaactacccaggcagaggcatttacttaattcatcaactagtgcaattaaaaccctgaaaacacatgatccttgttgactctgcttggttgaagcaggaaagaatggtcttgatggtcagaaagttttaaaattaatgggcagggcctttctggaccctgttttccaaacacgttagatattccgtcttgaggggattggagtaggctacagtgagggggtaatttttggatgtatctggacttttaaaaaatgtgcctatatttatagcaccatgaatattatgtaaaatttatatatgaattaaataaatattcacctctgatttccagtgcaaaaaaaaaaaa

SEQ ID NO: 655451 - DNA, 301 bp, Homo sapiens
cgcatctctgctcgctccgagtagctggacgtagtgacacaacacactagctatttttatattttttttgtagggaaggttttgcatgtagccagggtggtgtaaacttcttacctcaggtggtccacctgtctcagcctcccaaagtgctgggattacaggtgggagccaccacccctggtcaaccatcataattacttcatttacatagtcactgttgaggagtatgttatttaaattctttgtaaatttatagtttctgaaatttctcttgatactgatttgtagttttattctgctg

SEQ ID NO: 655452 - DNA, 195 bp, Homo sapiens
acacgtatcatatcacacacactatcccacatatatctttcatcccatgaactgcgaaatccttccccgtaatcatgaccattgctaacaccatgtcgatggcttggtgatctaagaggatggctggaatcatgtgagactggtaaaaatccggggagaaaatgtttcaccttcagctcattcccaagtctctat

SEQ ID NO: 655453 - DNA, 5231 bp, Homo sapiens
  misc_feature (24)..(24): n is a, c, g, or t
  misc_feature (46)..(46): n is a, c, g, or t
  misc_feature (50)..(50): n is a, c, g, or t
ctgctccgcggctccccttgcttnggggtttgaactggctgctggntttnttcccctcccctgtctcggtctctccttcttcttttaggttgctccaccccggtcaggatcaggcgagggggaaccagcctgagtgcagctgccaactcccgccgagtgcgtctgcgaactcccggagcggagtcccgcgtgccgccacctccccgcgggacgcactctcctcgctcccccgggccccgcgtcctccccccggccacccttccccacgttgtccccccttttccaatcacatggcattttaagaatgccggaaagatggcggtagcggcggcggcggcggcggctgggccggctggcgcgggaggcggccgggcgcagcggagcgggctgctggaagttttggtgcgggatcgctggcacaaagttctggtgaacttgagcgaggacgccctggttctgagcagcgaggagggcgctgcggcgtacaacggcatcgggaccgccaccaatggctcgttctgcaggggcgccggggctgggcacccgggcgcgggcggcgcgcagcccccggactcgcccgccggggtccgcaccgctttcaccgacctgcccgagcaggtgcccgagtccatctcgaaccagaagcgtggcgtgaaggtgctgaagcaggagctgggcgggctggggatcagcatcaaggggggcaaggagaacaagatgcccatcctcatcagcaagatcttcaaggggctggcggcggaccagacccaagccctgtacgtgggcgacgccatcctgtccgtgaacggagccgacctgcgggacgccacccacgacgaggcggtgcaggcgttgaagcgcgcgggcaaggaagtgctgctggaagtgaagtacatgcgagaagccacgccctatgtgaagaaaggatccccagtatccgagattgggtgggaaacacctccgcctgaatcccctcggttagggggcagcacctcagaccccccgtcatcgcagtccttctccttccacagagaccggaaaagcatccccctcaaaatgtgctacgtcactcggagtatggccttggccgaccctgagaacagccataggaatcacagatttgaggaactgaaggcgaccataatgaccatgtggtttgaattctcctggattccccgaagttgctgcaagccagcaagacttcatcctcctgactagtttcatctgtgttttctccagagtcacttggaggggaaaggcagcttgaaatccactctccagatgctaagcacacggtgatcctaaggagcaaggactcagccacggcccaggcatggttcagtgccatccattccaacgttaatgacctgctgacccgagtgattgctgaggtcagagagcagctggggaaaacaggcattgctgggagccgagagattaggcatcttggctggcttgcagaaaaggtgccaggggagagcaagaaacagtggaaaccagccctggttgtgctgactgagaaagaccttttaatctatgacagcatgccacggaggaaggaagcctggttcagcccagttcacacataccctcttcttgccaccaggctggtccattcaggtccaggaaagggatcaccccaggctggtgtggatctgtcctttgcaacgcgaactggtaccaggcaagggattgaaacacatctcttcagagcagagaccagcagggacctctcccactggacaaggagcatagtacagggttgccacaattctgctgaactcattgctgaaatcagcactgcttgcacctacaaaaaccaggagtgccgtttgaccatacattatgagaatggattttctattaccactgaaccacaggagggtgcctttcccaagaccatcatacagtctccttatgaaaagctcaaaatgtcttcagatgatggaatcaggatgctgtatttagattttggaggcaaagatggagagattcaactggaccttcattcctgccccaagccaattgttttcatcattcattccttcctgtcagctaagattacaagactgggcttggtggcctgaagacaggggtgacttgcctttgagaaaagaagggctgcaatgccaccagagaacgtgatgtcagacaccatctgtagtgagcagcgcaccagatgtagcgtgctacagtcagctttagctctcaagagtcgtatgtaactgtcccagactcctctgtcagtttcagcaactacaagggataccctgcgaaagtaccatgagaaatatcagagtaaaactttctagaacagtacaaggttaaagaggtgaggtgacgggaaatacacagcatagctttgaaataatgacaaccaaggacatgaccattagaacagcatgtgcagatcttaatcatcccagttcctaggcaacttgttcaccaggtacgcaagggccgaatagttgagaaatggacattcttacctactcctcctagccccctatccccagtaacagtgatcccttttcttattgtgatttatttcctaattcttgctgagttgactttcccttgtaggaaaagaaaaatatttcaaatagaaacccaccttttatttaagtatgaagcagctgttactttttaaaaaatgaattatctttcaatggtgtagaatgattccaaagtgtctccattagcatatactgagcaggaattaaataaagcatcagatactgatctgagctgtaagctggtagaatctgagccaaagtagactgcttaaattgataagctttgctaaagagttgtatgcacaaaggatgattaattctgggactatactcacaccaaggtctgctgtcttatagccaagaattacagctttatttatagagagtgaattatgggtattttttcagaaaatattgtcatctgatatacacataaaacaactcacattgttggagttaactaattatccccatttcatggttttcagtggcaacttactgacccttgtttttgcctgtgcttgtatgcatgcattttcaagcaagtaataaagcagcctcatttaattctggataatgctgggttttacatatagactgaatgctataatcaaatctattgacagtatctgcagttctttcagaattccagggaaataatataacgacctgatatctttctacaggaatattttcagacattatatagcacattactgatttaatgcttttacttttatctttcaaaacaaattcactaaaaataacacctatgattttgaagtcacttttctcaaaccttgaaaatgagctctaggatctctataaacatttctaacacttttcctgtagtttacatagacagacatctgttgttagacctgtgtgtttttaaagaatcatatgttaacaaatacccatgcaaagagcttcaaaaagtgaaaccgtgttaaaggaacacaatttttctcactcagacatatttgtttattgaattgcaaagttttattttaaatcagcatttccccaaagaatatatcatatgacgctagttccaaggggcttgactgagtggtgttttgctggggggagacaggggtttgttaatacactttactaaatactgagctgaaaaatgttaaatagatttcacgattgcctccttgaagattttaaagttcattgtggttcttcaaggcgaaatccggtgaaccattcctcacacttacctacaggactcttttctaatggagcatcttgtgaagctagtgggtttttttgttgttgttatttgttttttttttttaatgctttagaaaacacagctttaggatattgactttttgtttatttctattttcaaatgctgaaaagtcaagtcccagtttgaataccatagaaaagctttgatgcatttgtaaattatattgcactctttcactatatattttcaaaatcactggaatgttgttatacaagagaattataattgtgtattgtaaataacatattaaaatacatatattaatgccaatagttaaattcaacaatatgtaatctaaggtgctcggttctacatgaagtatgagttaactgctcataattaagttgccaagattctattatatatttatagacaaattaaaatgatcataattacaaaatatgatttctttatcacttaagctttgggctgattaatatctgtgtggggggtcaatggaaactacattctctacatttataaacatttaatttaattatttatattttaggaaaatatatttgaataaaattaatgcattttctagagtaaattaaaatgttattagcaagaaatagaaaatttgactaagataattgtgtatatgaatcatttttcccccaagttaaaatgtatcataatagagaggctctaatgaatcaatttccaatactcatttctttcttattttgaattcaagttacaatgactttacactgtagattttaatcttgtctgatgtgtgctggtgtgtatgacacaaactcataagtctggatcatgcttgggtacagtcaatgaatcaaccgagtcactttgaggaatttgtttttgtccaatttgctctgtgctcaatcccatgaattattaaatttacaatgtttgtccccaaatgaaaaccaatataaatgaatgatgttttaatctgtactttatgggaagttgcctatttgtcagtagatgtggttaagtgagtcctctggtgcagtgacatccttttaagccatctcatagggatttaaagaaggccaataggaatatagatattggtttttctttctctgacttgaactaagtaggagaaaccaaaccataaacctattacaaactacccaggcagaggcatttacttaattcatcaactagtgcaattaaaaccctgaaaacacatgatccttgttgactctgcttggttgaagcaggaaagaatggtcttgatggtcagaaagttttaaaattaatgggcagggcctttctggaccctgttttccaaacacgttagatattccgtcttgaggggattggagtaggctacagtgagggggtaatttttggatgtatctggacttttaaaaaatgtgcctatatttatagcaccatgaatattatgtaaaatttatatatgaattaaataaatattcacctctgatttccagtgcaaaaaaaaaaaa

SEQ ID NO: 655454 - DNA, 5200 bp, Homo sapiens
  misc_feature (24)..(24): n is a, c, g, or t
  misc_feature (46)..(46): n is a, c, g, or t
  misc_feature (50)..(50): n is a, c, g, or t
  misc_feature (1552)..(1552): n is a, c, g, or t
ctgctccgcggctccccttgcttnggggtttgaactggctgctggntttnttcccctcccctgtctcggtctctccttcttcttttaggttgctccaccccggtcaggatcaggcgagggggaaccagcctgagtgcagctgccaactcccgccgagtgcgtctgcgaactcccggagcggagtcccgcgtgccgccacctccccgcgggacgcactctcctcgctcccccgggccccgcgtcctccccccggccacccttccccacgttgtccccccttttccaatcacatggcattttaagaatgccggaaagatggcggtagcggcggcggcggcggcggctgggccggctggcgcgggaggcggccgggcgcagcggagcgggctgctggaagttttggtgcgggatcgctggcacaaagttctggtgaacttgagcgaggacgccctggttctgagcagcgaggagggcgctgcggcgtacaacggcatcgggaccgccaccaatggctcgttctgcaggggcgccggggctgggcacccgggcgcgggcggcgcgcagcccccggactcgcccgccggggtccgcaccgctttcaccgacctgcccgagcaggtgcccgagtccatctcgaaccagaagcgtggcgtgaaggtgctgaagcaggagctgggcgggctggggatcagcatcaaggggggcaaggagaacaagatgcccatcctcatcagcaagatcttcaaggggctggcggcggaccagacccaagccctgtacgtgggcgacgccatcctgtccgtgaacggagccgacctgcgggacgccacccacgacgaggcggtgcaggcgttgaagcgcgcgggcaaggaagtgctgctggaagtgaagtacatgcgagaagccacgccctatgtgaagaaaggatccccagtatccgagattgggtgggaaacacctccgcctgaatcccctcggttagggggcagcacctcagaccccccgtcatcgcagtccttctccttccacagagaccggaaaagcatccccctcaaaatgtgctacgtcactcggagtatggccttggccgaccctgagaacaggcagcttgaaatccactctccagatgctaagcacacggtgatcctaaggagcaaggactcagccacggcccaggcatggttcagtgccatccattccaacgttaatgacctgctgacccgagtgattgctgaggtcagagagcagctggggaaaacaggcattgctgggagccgagagattaggcatcttggctggcttgcagaaaaggtgccaggggagagcaagaaacagtggaaaccagccctggttgtgctgactgagaaagaccttttaatctatgacagcatgccacggaggaaggaagcctggttcagcccagttcacacataccctcttcttgccaccagcagatggagtctcactgtgtcacccagtctggagtgcagtggcatgatcttggctcactgcaacctccgcctcccaggttcaagcagttttctgcctcagnctcccaagtagctggaattacaggctggtccattcaggtccaggaaagggatcaccccaggctggtgtggatctgtcctttgcaacgcgaactggtaccaggcaagggattgaaacacatctcttcagagcagagaccagcagggacctctcccactggacaaggagcatagtacagggttgccacaattctgctgaactcattgctgaaatcagcactgcttgcacctacaaaaaccaggagtgccgtttgaccatacattatgagaatggattttctattaccactgaaccacaggagggtgcctttcccaagaccatcatacagtctccttatgaaaagctcaaaatgtcttcagatgatggaatcaggatgctgtatttagattttggaggcaaagatggagagattcaactggaccttcattcctgccccaagccaattgttttcatcattcattccttcctgtcagctaagattacaagactgggcttggtggcctgaagacaggggtgacttgcctttgagaaaagaagggctgcaatgccaccagagaacgtgatgtcagacaccatctgtagtgagcagcgcaccagatgtagcgtgctacagtcagctttagctctcaagagtcgtatgtaactgtcccagactcctctgtcagtttcagcaactacaagggataccctgcgaaagtaccatgagaaatatcagagtaaaactttctagaacagtacaaggttaaagaggtgaggtgacgggaaatacacagcatagctttgaaataatgacaaccaaggacatgaccattagaacagcatgtgcagatcttaatcatcccagttcctaggcaacttgttcaccaggtacgcaagggccgaatagttgagaaatggacattcttacctactcctcctagccccctatccccagtaacagtgatcccttttcttattgtgatttatttcctaattcttgctgagttgactttcccttgtaggaaaagaaaaatatttcaaatagaaacccaccttttatttaagtatgaagcagctgttactttttaaaaaatgaattatctttcaatggtgtagaatgattccaaagtgtctccattagcatatactgagcaggaattaaataaagcatcagatactgatctgagctgtaagctggtagaatctgagccaaagtagactgcttaaattgataagctttgctaaagagttgtatgcacaaaggatgattaattctgggactatactcacaccaaggtctgctgtcttatagccaagaattacagctttatttatagagagtgaattatgggtattttttcagaaaatattgtcatctgatatacacataaaacaactcacattgttggagttaactaattatccccatttcatggttttcagtggcaacttactgacccttgtttttgcctgtgcttgtatgcatgcattttcaagcaagtaataaagcagcctcatttaattctggataatgctgggttttacatatagactgaatgctataatcaaatctattgacagtatctgcagttctttcagaattccagggaaataatataacgacctgatatctttctacaggaatattttcagacattatatagcacattactgatttaatgcttttacttttatctttcaaaacaaattcactaaaaataacacctatgattttgaagtcacttttctcaaaccttgaaaatgagctctaggatctctataaacatttctaacacttttcctgtagtttacatagacagacatctgttgttagacctgtgtgtttttaaagaatcatatgttaacaaatacccatgcaaagagcttcaaaaagtgaaaccgtgttaaaggaacacaatttttctcactcagacatatttgtttattgaattgcaaagttttattttaaatcagcatttccccaaagaatatatcatatgacgctagttccaaggggcttgactgagtggtgttttgctggggggagacaggggtttgttaatacactttactaaatactgagctgaaaaatgttaaatagatttcacgattgcctccttgaagattttaaagttcattgtggttcttcaaggcgaaatccggtgaaccattcctcacacttacctacaggactcttttctaatggagcatcttgtgaagctagtgggtttttttgttgttgttatttgttttttttttttaatgctttagaaaacacagctttaggatattgactttttgtttatttctattttcaaatgctgaaaagtcaagtcccagtttgaataccatagaaaagctttgatgcatttgtaaattatattgcactctttcactatatattttcaaaatcactggaatgttgttatacaagagaattataattgtgtattgtaaataacatattaaaatacatatattaatgccaatagttaaattcaacaatatgtaatctaaggtgctcggttctacatgaagtatgagttaactgctcataattaagttgccaagattctattatatatttatagacaaattaaaatgatcataattacaaaatatgatttctttatcacttaagctttgggctgattaatatctgtgtggggggtcaatggaaactacattctctacatttataaacatttaatttaattatttatattttaggaaaatatatttgaataaaattaatgcattttctagagtaaattaaaatgttattagcaagaaatagaaaatttgactaagataattgtgtatatgaatcatttttcccccaagttaaaatgtatcataatagagaggctctaatgaatcaatttccaatactcatttctttcttattttgaattcaagttacaatgactttacactgtagattttaatcttgtctgatgtgtgctggtgtgtatgacacaaactcataagtctggatcatgcttgggtacagtcaatgaatcaaccgagtcactttgaggaatttgtttttgtccaatttgctctgtgctcaatcccatgaattattaaatttacaatgtttgtccccaaatgaaaaccaatataaatgaatgatgttttaatctgtactttatgggaagttgcctatttgtcagtagatgtggttaagtgagtcctctggtgcagtgacatccttttaagccatctcatagggatttaaagaaggccaataggaatatagatattggtttttctttctctgacttgaactaagtaggagaaaccaaaccataaacctattacaaactacccaggcagaggcatttacttaattcatcaactagtgcaattaaaaccctgaaaacacatgatccttgttgactctgcttggttgaagcaggaaagaatggtcttgatggtcagaaagttttaaaattaatgggcagggcctttctggaccctgttttccaaacacgttagatattccgtcttgaggggattggagtaggctacagtgagggggtaatttttggatgtatctggacttttaaaaaatgtgcctatatttatagcaccatgaatattatgtaaaatttatatatgaattaaataaatattcacctctgatttccagtgcaaaaaaaaaaaa

SEQ ID NO: 655455 - DNA, 3467 bp, Homo sapiens
  misc_feature (1)..(1): n is a, c, g, or t
  misc_feature (30)..(30): n is a, c, g, or t
  misc_feature (35)..(36): n is a, c, g, or t
ntgtaggtgactgactctcttcctgaaccnccgcnncagcttgcacctacaaaaaccaggagtgccgtttgaccatacattatgagaatggattttctattaccactgaaccacaggagggtgcctttcccaagaccatcatacagtctccttatgaaaagctcaaaatgtcttcagatgatggaatcaggatgctgtatttagattttggaggcaaagatggagagattcaactggaccttcattcctgccccaagccaattgttttcatcattcattccttcctgtcagctaagattacaagactgggcttggtggcctgaagacaggggtgacttgcctttgagaaaagaagggctgcaatgccaccagagaacgtgatgtcagacaccatctgtagtgagcagcgcaccagatgtagcgtgctacagtcagctttagctctcaagagtcgtatgtaactgtcccagactcctctgtcagtttcagcaactacaagggataccctgcgaaagtaccatgagaaatatcagagtaaaactttctagaacagtacaaggttaaagaggtgaggtgacgggaaatacacagcatagctttgaaataatgacaaccaaggacatgaccattagaacagcatgtgcagatcttaatcatcccagttcctaggcaacttgttcaccaggtacgcaagggccgaatagttgagaaatggacattcttacctactcctcctagccccctatccccagtaacagtgatcccttttcttattgtgatttatttcctaattcttgctgagttgactttcccttgtaggaaaagaaaaatatttcaaatagaaacccaccttttatttaagtatgaagcagctgttactttttaaaaaatgaattatctttcaatggtgtagaatgattccaaagtgtctccattagcatatactgagcaggaattaaataaagcatcagatactgatctgagctgtaagctggtagaatctgagccaaagtagactgcttaaattgataagctttgctaaagagttgtatgcacaaaggatgattaattctgggactatactcacaccaaggtctgctgtcttatagccaagaattacagctttatttatagagagtgaattatgggtattttttcagaaaatattgtcatctgatatacacataaaacaactcacattgttggagttaactaattatccccatttcatggttttcagtggcaacttactgacccttgtttttgcctgtgcttgtatgcatgcattttcaagcaagtaataaagcagcctcatttaattctggataatgctgggttttacatatagactgaatgctataatcaaatctattgacagtatctgcagttctttcagaattccagggaaataatataacgacctgatatctttctacaggaatattttcagacattatatagcacattactgatttaatgcttttacttttatctttcaaaacaaattcactaaaaataacacctatgattttgaagtcacttttctcaaaccttgaaaatgagctctaggatctctataaacatttctaacacttttcctgtagtttacatagacagacatctgttgttagacctgtgtgtttttaaagaatcatatgttaacaaatacccatgcaaagagcttcaaaaagtgaaaccgtgttaaaggaacacaatttttctcactcagacatatttgtttattgaattgcaaagttttattttaaatcagcatttccccaaagaatatatcatatgacgctagttccaaggggcttgactgagtggtgttttgctggggggagacaggggtttgttaatacactttactaaatactgagctgaaaaatgttaaatagatttcacgattgcctccttgaagattttaaagttcattgtggttcttcaaggcgaaatccggtgaaccattcctcacacttacctacaggactcttttctaatggagcatcttgtgaagctagtgggtttttttgttgttgttatttgttttttttttttaatgctttagaaaacacagctttaggatattgactttttgtttatttctattttcaaatgctgaaaagtcaagtcccagtttgaataccatagaaaagctttgatgcatttgtaaattatattgcactctttcactatatattttcaaaatcactggaatgttgttatacaagagaattataattgtgtattgtaaataacatattaaaatacatatattaatgccaatagttaaattcaacaatatgtaatctaaggtgctcggttctacatgaagtatgagttaactgctcataattaagttgccaagattctattatatatttatagacaaattaaaatgatcataattacaaaatatgatttctttatcacttaagctttgggctgattaatatctgtgtggggggtcaatggaaactacattctctacatttataaacatttaatttaattatttatattttaggaaaatatatttgaataaaattaatgcattttctagagtaaattaaaatgttattagcaagaaatagaaaatttgactaagataattgtgtatatgaatcatttttcccccaagttaaaatgtatcataatagagaggctctaatgaatcaatttccaatactcatttctttcttattttgaattcaagttacaatgactttacactgtagattttaatcttgtctgatgtgtgctggtgtgtatgacacaaactcataagtctggatcatgcttgggtacagtcaatgaatcaaccgagtcactttgaggaatttgtttttgtccaatttgctctgtgctcaatcccatgaattattaaatttacaatgtttgtccccaaatgaaaaccaatataaatgaatgatgttttaatctgtactttatgggaagttgcctatttgtcagtagatgtggttaagtgagtcctctggtgcagtgacatccttttaagccatctcatagggatttaaagaaggccaataggaatatagatattggtttttctttctctgacttgaactaagtaggagaaaccaaaccataaacctattacaaactacccaggcagaggcatttacttaattcatcaactagtgcaattaaaaccctgaaaacacatgatccttgttgactctgcttggttgaagcaggaaagaatggtcttgatggtcagaaagttttaaaattaatgggcagggcctttctggaccctgttttccaaacacgttagatattccgtcttgaggggattggagtaggctacagtgagggggtaatttttggatgtatctggacttttaaaaaatgtgcctatatttatagcaccatgaatattatgtaaaatttatatatgaattaaataaatattcacctctgatttccagtgcaaaaaaaaaaaa

SEQ ID NO: 655456 - DNA, 142 bp, Homo sapiens
ctggaaggccgactttaaaggatcccccagagtccaaacagggccctctccctcctgctcgccctcctgctgcctcactgtcataagctcttggtgtatgaccttcacgcagccaggatcgacttccagatttggaggttga

SEQ ID NO: 655457 - DNA, 3344 bp, Homo sapiens
tttttcatgaacaatgactatatttttattttagcaagaaattcgtagctgatcgctgggactgaggaggcaagaagtgagtgattgggaaaatggattgattgccatggttcatacttgtctctttttctctctctttctctctcagcttgcacgtctcgtctcaatgcaagtagtccatgtgttgaaattcataatttcctgagatggtttctgcctttgagaaaagaagggctgcaatgccaccagagaacgtgatgtcagacaccatctgtagtgagcagcgcaccagatgtagcgtgctacagtcagctttagctctcaagagtcgtatgtaactgtcccagactcctctgtcagtttcagcaactacaagggataccctgcgaaagtaccatgagaaatatcagagtaaaactttctagaacagtacaaggttaaagaggtgaggtgacgggaaatacacagcatagctttgaaataatgacaaccaaggacatgaccattagaacagcatgtgcagatcttaatcatcccagttcctaggcaacttgttcaccaggtacgcaagggccgaatagttgagaaatggacattcttacctactcctcctagccccctatccccagtaacagtgatcccttttcttattgtgatttatttcctaattcttgctgagttgactttcccttgtaggaaaagaaaaatatttcaaatagaaacccaccttttatttaagtatgaagcagctgttactttttaaaaaatgaattatctttcaatggtgtagaatgattccaaagtgtctccattagcatatactgagcaggaattaaataaagcatcagatactgatctgagctgtaagctggtagaatctgagccaaagtagactgcttaaattgataagctttgctaaagagttgtatgcacaaaggatgattaattctgggactatactcacaccaaggtctgctgtcttatagccaagaattacagctttatttatagagagtgaattatgggtattttttcagaaaatattgtcatctgatatacacataaaacaactcacattgttggagttaactaattatccccatttcatggttttcagtggcaacttactgacccttgtttttgcctgtgcttgtatgcatgcattttcaagcaagtaataaagcagcctcatttaattctggataatgctgggttttacatatagactgaatgctataatcaaatctattgacagtatctgcagttctttcagaattccagggaaataatataacgacctgatatctttctacaggaatattttcagacattatatagcacattactgatttaatgcttttacttttatctttcaaaacaaattcactaaaaataacacctatgattttgaagtcacttttctcaaaccttgaaaatgagctctaggatctctataaacatttctaacacttttcctgtagtttacatagacagacatctgttgttagacctgtgtgtttttaaagaatcatatgttaacaaatacccatgcaaagagcttcaaaaagtgaaaccgtgttaaaggaacacaatttttctcactcagacatatttgtttattgaattgcaaagttttattttaaatcagcatttccccaaagaatatatcatatgacgctagttccaaggggcttgactgagtggtgttttgctggggggagacaggggtttgttaatacactttactaaatactgagctgaaaaatgttaaatagatttcacgattgcctccttgaagattttaaagttcattgtggttcttcaaggcgaaatccggtgaaccattcctcacacttacctacaggactcttttctaatggagcatcttgtgaagctagtgggtttttttgttgttgttatttgttttttttttttaatgctttagaaaacacagctttaggatattgactttttgtttatttctattttcaaatgctgaaaagtcaagtcccagtttgaataccatagaaaagctttgatgcatttgtaaattatattgcactctttcactatatattttcaaaatcactggaatgttgttatacaagagaattataattgtgtattgtaaataacatattaaaatacatatattaatgccaatagttaaattcaacaatatgtaatctaaggtgctcggttctacatgaagtatgagttaactgctcataattaagttgccaagattctattatatatttatagacaaattaaaatgatcataattacaaaatatgatttctttatcacttaagctttgggctgattaatatctgtgtggggggtcaatggaaactacattctctacatttataaacatttaatttaattatttatattttaggaaaatatatttgaataaaattaatgcattttctagagtaaattaaaatgttattagcaagaaatagaaaatttgactaagataattgtgtatatgaatcatttttcccccaagttaaaatgtatcataatagagaggctctaatgaatcaatttccaatactcatttctttcttattttgaattcaagttacaatgactttacactgtagattttaatcttgtctgatgtgtgctggtgtgtatgacacaaactcataagtctggatcatgcttgggtacagtcaatgaatcaaccgagtcactttgaggaatttgtttttgtccaatttgctctgtgctcaatcccatgaattattaaatttacaatgtttgtccccaaatgaaaaccaatataaatgaatgatgttttaatctgtactttatgggaagttgcctatttgtcagtagatgtggttaagtgagtcctctggtgcagtgacatccttttaagccatctcatagggatttaaagaaggccaataggaatatagatattggtttttctttctctgacttgaactaagtaggagaaaccaaaccataaacctattacaaactacccaggcagaggcatttacttaattcatcaactagtgcaattaaaaccctgaaaacacatgatccttgttgactctgcttggttgaagcaggaaagaatggtcttgatggtcagaaagttttaaaattaatgggcagggcctttctggaccctgttttccaaacacgttagatattccgtcttgaggggattggagtaggctacagtgagggggtaatttttggatgtatctggacttttaaaaaatgtgcctatatttatagcaccatgaatattatgtaaaatttatatatgaattaaataaatattcacctctgatttccagtgcaaaaaaaaaaaa

SEQ ID NO: 655458 - DNA, 443 bp, Homo sapiens
gggaactgttgacactcgggcccgttgagggggtttcttttgggcttttttcatgttttcttcacaaaccaaaatttgtttaactctcattgttagtatttctgggacaggttattacaggatttaaatttgaacctggctttctcacagctggacataattctaggaaaataatatactatgtccccacttgggcataatcatttagatggtggtgtacggcaaatctgttataaagactgttccgttttacccgccctgggcaggtcctctgctttgctgcaacagaaaggaaatgcccatgtctcagacttgtggatagtggccccccacgatccttgtaatcaattggcatgccgaaaggaaaactgacattagcttcctgaggcctccgcctgtgacatctcaagtttttgttaagtcaagaggtacacaatacccac

SEQ ID NO: 655459 - DNA, 637 bp, Homo sapiens
tgtcactcaggctggccggagtcccccgcaggatgctccacagggcaggcctaagccgcctaaggggctgcctcggctgtccatcagttacctcgtttccccgtcagggaaccaagaaacgtagcaggattagccgcagacaaaacttctcagacaccgagttgtagaaggaagggctttattcagctgggagcatcggcaagctactgcctcaaaatccgagctccccaaatgcacaatttctgtcccttttaagggctcacagcactaaagatttcacatgaaagggtcgtgattgatttgagcaagcagggggtacgtgacaggggctgcatgcgccggtggtcagagtgaaacagaacagggcagagagtttcacaatagtcttctatacaatgtctggaatctatgaataacatcggtttctaagttatgagttgatttttaactactgggtttaggccaggcaggcccaggcctggtttcggggctggtgccgggctgcctgtctttggttttacttccttgtttttctctcaaaacaggtaccgagtataaaacaatataaagcgatacgggagggtctctctcttccctcagagctgttatccccccagttcccttgtgcccacattac

SEQ ID NO: 655460 - DNA, 262 bp, Homo sapiens
cataccggaccttctccgtctacttgacacatcagtggtcagagagctcattgaggacgaagattccggaaagagccgttggtcgcccgaagagcccattggcgagcttctcatggttggtcgcaaagaacttatttgtcctcagtaactctcgcgtcgaccttcctgtatccccgtgaggcaggaccttctgcagatagtggcaacatcttggcggcttgcgtgtgcgcaatggcattggtgtggcccgaggtgttctcga

SEQ ID NO: 655461 - DNA, 352 bp, Homo sapiens
  misc_feature (352)..(352): n is a, c, g, or t
ctgaagcgccacttgtcagagacacagagctgtagctccgcctggagtggcagcaaaggcccgctggatcagctagagaaaggaggggaaactgctcagtctgcagatccccagtgggagcagttgaataacatcctgagcatgcctcttctgactgccgacttccacaaggaagacaccgctgccaacgactggactccagagggtgaggaggacgacgactatctggacctggagaagatattcagtgaagacgacgactacatcgacatcgtcgacagtctgacagtctacccgacagactctgacgtgagtgctgagcacgtacttcagctatatcatggcggccgcn

SEQ ID NO: 655462 - DNA, 661 bp, Homo sapiens
atacatatgtgtgtatatatacgtatgtatgtatacatatgtgtgtatatatacgtatgtatgtatacatatgtgtgtatatatacgtatgtatgtatacatatgtgtgtatatatacgtatgtatgtatacatatatgtgtatatatacgtgtgtatgtatacatatatgtgtatatatacgtgtgtatgtatacatatatgtgtatatatacgtgtgtatgtatacatatatgtgtatatatacgtgtgtatgtatacatatatgtgtatatatacgtgtgtatgtatacatatgtgtgtatatatacgtgtgtatatatatacacatatatacgtatatatgtatatatatatacacagtgaatcaggggattaatactataatctctggttcaaaggtaatatggaatatttgacacttgtgtaaaaggtgaactacctttgtagtgaatcttttcctcttggtagcatcaacactggggataaatcagaaccattctgtggaaatgacatgtttctcaagagcctataatatagtagatagtgcatattaaggatgtctggtggggatggtggtcatgcctgtaatccagcatttgggaggctgaggcggggaggatcctgagcctagaaagtagaagactacctggcgggacctg

SEQ ID NO: 655463 - DNA, 1044 bp, Homo sapiens
atgcggctaagggattttcctgggatgagagcgggttctgcctatcattttggatgcacatcccgcttaagccccggacagccttatggtaccggctacgtgtccctggggattctcggatctccgaggacaccggtacagggacgcgctatgagaccatacctactctaccgagcagaaggagacagacgtatatgctttccaagtgcacaactacagacacgcgcgcgcacacacgcaagcacacgcggcgagagaggaaccttgccggtccgaggcagctctgcgcgtcccctcctgcgctatagcatcctacggacccagacgcggcccgacaccgaacatggaggtgctggagagacggggagcagggcgtgctagcagtagggaccgcaagctgagacgagctgtcagagacccggaggacggcgaggccctcatagtaccacacgcacttctcagaacttctggatgagtatacccagaacgtctatagggtacagctcctgaatgatcctttcctctcagagaagagtgtgtcaataggagagtggaaccttccccgacgtacccggagacaatctcatccaggctgagcacaagctactccctgttgcgcggaggctcagggccaagtcgccttcaccacataaccagtgacaagcttcgatgaccgatgcaggtggcaagttgaaaatgcgtcaatgttctaacgactttcctatcagtccatcaagacagcaccaattacagagaaccaagcccagcatacatcacgactgtcctccgtacatcccacgccacctgaacctgagtgtacaaggcggaacctcgtctggcacatccacaagaggtgcacacagaacgaaccagtactcaaagagacgcgatctgtacgtgccaacgcagacgcacagaaagcagtgacctacatggacagttcgaagagcaagacgtggaaaaaaaccgaaaggactacacgcgtaagacaagcggaacgacaataaagcaaacacaagagaaaggatagagagcaacgagaag

SEQ ID NO: 655464 - DNA, 419 bp, Homo sapiens
atgtacagctagtgcgcaagtgtgtttggaggagggtctgactctgctaacgggagaaaaaattccccgaagctgacactcatccagtgcccagtggtacagtcatgcctgtgtttaaaatactgcagtgctgtcacaacggttgtggtgtatgtggctctgagggttcacacgccgagctctctccacatcgtatctgccattccagcccacgtccttcccagcagaaggcctcggaaaacatgcattctagttctgatcactcagtgcccattcctccctaattgctgaatattttgaatatcaccctggatatcaaagttgtgaatatagatttggagcttgatgtaaaagaagctagggaagcccatgtctctgattttcaggcactcgcatgttaaaaatcacctgctggaaag

SEQ ID NO: 655465 - DNA, 192 bp, Homo sapiens
ctcgacttctacatacctggactactatagggtgatagataggtccaattgggtgtagaggagttcagttatatgtttgggatattaaggtagtaggtgttgagcttgaacgctttcttaatataggtggctagcatttaggcctactatgggtgtaaaattttttactctctctacaaggtaaaatcctag

SEQ ID NO: 655466 - DNA, 643 bp, Homo sapiens
  misc_feature (533)..(533): n is a, c, g, or t
ggagtgcggtggtgcaatctcagctcactgcaatctccacctcctgggttcaagaggttctcctgcctcagcctcctgagtagccggggagctacaagcatgcaccaccacacccagctaattttttttttttttttggaagaggagtctcgctctggtcgcccaggtttgatgtgcagtgggcgcgatctcggctcactggcaagctctggtctccggggttcatggccattctcctggcttcagcctcccgagtagtcccaggatgtagctggggactacggtgtgcccaccaccacacccagctaattttttggtattttacagtagagatggggtttcaccagtgtttatccaggagtggtttggatctccgtgacctcgtgatccgcccgccttggcctcccaaaagtgcgtgggattataggcgtgagccaccgcccgggcaaattttggattttcagtagcagatggggtttcaccgtgtttggccaggagggtctcaatctgaccttgtgatctggccacctcgngctcccaaagtgctaggattaacgggcgtgagccaccattcctagccttatgcatattcttaaatatcccacggtcgcatttgtttgaccatccgcttggggctctaata

SEQ ID NO: 655467 - DNA, 325 bp, Homo sapiens
catctacgtatcgtattcacccagtccagtccatcacatccatgcatgcatctacctaccaacccatcgattcacccatacatccatctcatgcatgccatcaatccatccatccatccagctacctagccatcatctaccatctattcaagcatccatcacatccatacatccatctatccatccactcatctatctacgtacccatcatctaccatctattcacccatccctccatccatctcatccatgcatccatctatccatccattcatctacctacctacccgtcatctaacatctattcagctatccatccatctca

SEQ ID NO: 655468 - DNA, 295 bp, Homo sapiens
  misc_feature (91)..(91): n is a, c, g, or t
  misc_feature (159)..(159): n is a, c, g, or t
aggttgggtgtggtggctcacgccctcttaatcatgacacttgggcgcagaggcgggaggatttcttgaggacaggggattcaagaccagnccgggtaacatggcagggccccatctctactaaaaataaaaaaactaacagggcacaagtggtccaangcctgtagtcccagccacttaggaggctggagcagaaggattgctttggcccagtagatcgaggctacattgagccatcattgtactccactgcactccagtctgggcaacaaagtgagaccctgtcttaaaaaat

SEQ ID NO: 655469 - DNA, 455 bp, Homo sapiens
  misc_feature (45)..(45): n is a, c, g, or t
  misc_feature (64)..(64): n is a, c, g, or t
  misc_feature (93)..(93): n is a, c, g, or t
  misc_feature (102)..(102): n is a, c, g, or t
  misc_feature (107)..(107): n is a, c, g, or t
  misc_feature (114)..(114): n is a, c, g, or t
  misc_feature (177)..(177): n is a, c, g, or t
  misc_feature (208)..(208): n is a, c, g, or t
ggccctgaaagctggtaaaaaattgggcccccgaaagctggtaanaattgggccccccttcccnaagtcaaatgggctgggaaactgaaaagnaagctgggnaatgnaaggggnacccaatgtccccgaaagctgcaataagaagcaaggggggccccctggccctggccccccagnaaacccatttttcctctccctagggcccccnaggcctgtgaattgggaggggctgctgtgaaaggtctctgacatacccctggagacattttcacccattgtcttggcaattaacattttgctccttgttacataggcaaatttctgcaagaggctcaaatttctccccagaaaatgaggttttcttttctatcatattgtcaggctgcaaattttccaaattttatgctctacttcctcttgaatctttgcctcttagaaatttttcccccagagtg

SEQ ID NO: 655470 - DNA, 782 bp, Homo sapiens
gctgcacacagatcagagggccaaccacgaaggctcgtggccttcccatggcacacgccaggcccccatatggtccctcgactcacgggtggcggcggaagacaagtgcagcacgtgcgaacatagactgaggcagatagcgcgacaatgatattgcacaagtacccattcactaaaagctataccaagacccatgcatcaacactgcacacacgtagactgcagacatgagaaggaacacagacaaacagaacgacaattaaaacatcagaacaccacaaggaccccgagcacgacacaagagaacacatgaaaagaaagacaagcaaaaagcaagagaaaacacacgaagcacaggagaggaccgcaagcacaacacaagaaaacaacccagacacacagggcgcaacacagacaaccaaccaaatgacaacacgcaaacgagagcataacccgcacaaaaaccacaacaccacaagagacacagaagcaccggacaccacaaacgcaacatagcaagacgcaccacacacaagagctagaaaacaggaaaaaccaccccacaacacagagaaccgagcccacgcggacgcaacaagacacaacagcaaaacgcaaaactaaacaacacacgaaaaatccaccctcacagcacacagaacagaacccactagaagacaaacgccgcgataaacaaacgaaaagaacgagacaacacacaaacaaatcacacgcagcagccaagacgaaaacacaacacaaaccgatgaccaacacgcaag

SEQ ID NO: 655471 - DNA, 228 bp, Homo sapiens
  misc_feature (191)..(191): n is a, c, g, or t
  misc_feature (226)..(226): n is a, c, g, or t
gaggatccctgcactgttgttcatacctgcactgttgttcatacctgcactgttgttcatacctgcactgttgttcatacctgcactgttgttcatacctgcactgttgttcatacctgcactgttgttcatacctgcactgttgttcatacctgcactgttgttcatacctggtcgctgtatcggggggngtgggggtatgaacaacagtgcagggatcctctanag

SEQ ID NO: 655472 - DNA, 528 bp, Homo sapiens
tcctgttatttaggatttctgacaaagctggcttgagaagggtgggaagaaaggatatgattatttcttatgccattatccataagaggtgagaatgacaaggagctcttacgtaactgctcttgatggtgtaagaagggaggagatgcgacgaacgggcatgagcaagagacagcagaggacgacacagcagaggaccgacgagagtgatcacaaaggacaacaagaaataagcaaataaggacgacgcaataatcatagcagcgacaggcacgtaaaaccacgaatacacaccagaccaggaacaagggagcagaaagaaagcaatgcgagagctatgaacaaggaggaagcacaagaacgacagtgaagaaaaacttggaaacaagaacggcagaagaggcacgcgaaacgaagcagaaacacaagaaacaagacaaagaagatgacgacacacgctaaacaaacaacaaagaaacagaaaaacaaaacggcaaagcagagcgaaaacaaaaacacaaaagaaga

SEQ ID NO: 655473 - DNA, 336 bp, Homo sapiens
gaccagaagggaccagaagggcagctgcaggctgcacaagcagccagcgcctgtcaggggcgtcccgacaagaaggccgagtggagacagccgggggcgtgtgtgtgcgactcgaagagcacggggcctggccccaccccctggggaacaaccaagggccccacccaccgccggaacaaggcccactgtttgaggaggacacagagggccgaggtccccggcctctgagctcacactgaggccactcctaggtgtctcctaacagcctgccaggtgttcccagcaaccctacaacagcttctcctgacacagggctgcctgggagagcagcataca

SEQ ID NO: 655474 - DNA, 225 bp, Homo sapiens
  misc_feature (188)..(188): n is a, c, g, or t
gaggatccctgcactgttgttcatacctgcactgttgttcatacctgcactgttgttcatacctgcactgttgttcatacctgcactgttgttcatacctgcactgttgttcatacctgcactgttgttcatacctgcactgttgttcatacctgcactgttgttcataccccccccgagtgttacancccccccgataagcgaccaggtatgaacaacagtgca

SEQ ID NO: 655475 - DNA, 404 bp, Homo sapiens
  misc_feature (4)..(4): n is a, c, g, or t
  misc_feature (17)..(17): n is a, c, g, or t
  misc_feature (261)..(261): n is a, c, g, or t
  misc_feature (393)..(393): n is a, c, g, or t
  misc_feature (396)..(396): n is a, c, g, or t
  misc_feature (399)..(399): n is a, c, g, or t
  misc_feature (402)..(402): n is a, c, g, or t
attnagcaacctgggtncaatgttactaattgtccaaactattttttttgcctataaaacacatttacacacaatcttgtgtagaaaccccactatataaaacagacaagggcccaggtgcagtgtctcttgccccataatcccagcactttgggaggctgaggcaggaggattgcttgaaactagatgtttgagactagcctgggcaacatggggagaccccacgtctaaaatcatacgaaaattagctgagtgtggtgncgcatgcctgtagtcccagctactcaggaggctgaggcaggacgattacttgatcccaggaggtcgaggctgcagtgagctgtgatggagccattgcactccagtctagatgacagagtgagaccctgtcantantanatnaa

SEQ ID NO: 655476 - DNA, 381 bp, Homo sapiens
gtgaacacagcttggcaatctcttaaccatgggagtcaagtctcagaggtttattgatggaagtggttcatacttctaactgtctttactacgattcttgaatttcacatagttcataagtctgcatctgactacattactctctgtatctgtggaaacttcagactctcccctattactctaattctagtgagacattatctataagtgggcttacacattccggttgctttactgacacatgatacacagacttgaaggcttttttctgcttactatgctacctctacatgttcaacactttcctgatttcgtgatttgaggccgtgtaataacttactgacgctccattgagaccgcatattcgggacactgcgtctg

SEQ ID NO: 655477 - DNA, 551 bp, Homo sapiens
gaggatccctgcactgttgttcatacctgcactgttgttcatacctgcactgttgttcatacctgcactgttgttcatacctgcactgttgttcatacctgcactgttgttcatacctgcactgttgttcatacctgcactgttgttcatacctgcactgttgttcataccactgtactccaggctgagtgattctgtctcaaagaaaaaaaaaaaaccaaaaactataaaaatacaaaaattagccaggcctgatggtgcatgccttaaatcccagctactcaggaggaggtatgacaaattgcttgagcctgggaggtgaaggttgctgcgatcctcctgcctcagcctcctaagtaactggggttacaggctcccatcaccgtgccccgaataatttacgtattataagaaaagacggggtttcactatgtaggacaggatgatcttgaactcctgaactcatgaacctgccaaacttgacctctcacagtgctgaaataacaggcgtaagccattgcgcccggaaactatattatcctaaaaaataa

SEQ ID NO: 655478 - DNA, 698 bp, Homo sapiens
gtgagaacagaggcacaggtgccggccctgcagcccccagaacctggactggagggggccatggggcaccggaccctggtcctgccctgggtgctgctgaccttgtgtgtcactgcggggaccccggaggtgtgggttcaagttcggatggaggccaccgagctctcgtccttcaccatccgttgtgggttcctggggtctggctccatctccctggtgactgtgagctgggggggccccgacggtgctggggggaccacgctggctgtgttgcacccagaacgtggggcccaaatttccccccgggggcccaaaattgggggccccccgtgccctcggccagggcccggctgggaaacccagagccagccattctctctcatcctggaaggctctggggccagcagcccctgcgccaacaccaccttctgctgcaagtttgcgtccttcccaggctgctcttcacgtcccttatgccactatcaacaccagctgccgcccagctactttggacacagctcacccccatggggggccgtcctggtgggcgtcactccccaccacgctgcacaccggccccaggccctgccgctgggctccaaccatccctgcacgtggcagctttgtctctgttgagaatggactctacgctcaggcaggggagagggctcctcacactggtcccggcctcactcttt

SEQ ID NO: 655479 - DNA, 225 bp, Homo sapiens
gaggatccctgcactgttgttcatacctgcactgttgttcatacctgcactgttgttcatacctgcactgttgttcatacctgcactgttgttcatacctgcactgttgttcatacctgcactgttgttcatacctgcactgttgttcatacctgcactgttgttcatacctgtcgctgtatcgggggggctgtggtatgaccgggaccctcagaacagccacac

SEQ ID NO: 655480 - DNA, 312 bp, Homo sapiens
ttcccagtattgcacttttgccttccccatcttcctgtctgcccttcgtggcctagtcttgtggattctagcagcagtgggactattatgccagaagagagaatgaccgagatagagagagagacagagacagagatgcgagaccgttatctgcgtacagctaaatgagaacgcaccagagcgagagagagggacgcgtgatcactgtcctacaccaagtgtcttcaacggcgatgaagaacgatacagatactgggaatatgcagaaagaggttataagcgtcacagagcacgtcgagaaaaagaagaacg

SEQ ID NO: 655481 - DNA, 257 bp, Homo sapiens
gaggatccctgcactgttgttcatacctgcactgttgttcatacctgcactgttgttcatacctgcactgttgttcatacctgcactgttgttcatacctgcactgttgttcatacctgcactgttgttcatacctgcactgttgttcatacctgcactgttgttcatacctggtcgctgtatcgggggtgcgtcgggtctgtcgagagcgccagctatcctgagggtatgaacaacagtgggatcctctagaacag

SEQ ID NO: 655482 - DNA, 361 bp, Homo sapiens
agtcatctgtacttctgctgcgcagccagtgtgaggagtgcggatgcgtatcttcacgtgccaggtgacgacacagctcagataagaggactgcagatgtcttgtacacttgcgcatcagcgcgaggtggaggtggtggagattgttgaaaacgacatatctgctttcacctacgagaagaacactatgatggagcagaggtcggagatgctgaagcagatgcaggtgtccaagaacgagcaggagcgagaggcccagctgatccacgacaggaacaccgcgtcccacacctgcggcggcagccaggaaccaagcgccggctaagccttcccaaagcacagcgcctgtcccaagcacaggc

SEQ ID NO: 655483 - DNA, 241 bp, Homo sapiens
gaggatccctgcactgttgttcatacctgcactgttgttcatacctgcactgttgttcatacctgcactgttgttcatacctgcactgttgttcatacctgcactgttgttcatacctgcactgttgttcatacctgcactgttgttcatacctgcactgttgttcatacctggtcgctgtatccgggggggctgtacacctcggggggggtatgacaccgttgtcgggatcctctagaac

SEQ ID NO: 655484 - DNA, 338 bp, Homo sapiens
ttccccccctcctttttttccccggggtttgccttccgggggttttccccccggggcctttttgcccctaggggatttttgttcctttccaaggttttgggttttcctggccccttgggcggtttaagaaaagggggcttctggatttgggcccccccttgggggccttttcttcctggggaatgggttctaaaccccttgtaacccgcccttttgttggggtgggggttggggtttttgggggggggcccttttttgcctttccatttttttgggggtggttggtccggggggcccccggtttgggggcccccccgaattaaaggattttagaaata

SEQ ID NO: 655485 - DNA, 307 bp, Homo sapiens
tcactattatgaaatcctgtgactgaagttcccctcgagtgcactctgtggttgcacatgcgccgaccacacaaactctggcatggaaacatgaactaatgcaaaccagtgctacccagaagcaccaacacgtgtgttctccattccaccaatcacagaccagtatctactccaaacatccagtaacgaaaactatggcatcttcccaggaacagcaaggcaggcttcttactcacgatgaaccagcacgaataaacccagcaaaaagagaactgcatacttaaatttaggatagtcattcatgagg

SEQ ID NO: 655486 - DNA, 89 bp, Homo sapiens
aaaaggaacaagaaagaagattgcagcaggcagtgttaagcagacagatgccgtctgaaagcttggacccagcgttcagtcctcggatg

SEQ ID NO: 655487 - DNA, 242 bp, Homo sapiens
tggccaggctctctacgctgggccggtctccatggtcggcctggctttttgaactggcacacgtgggcgacaaagaaaaggggaaggagggaacttccaggtggaatatccgctgggcttccaggtatcccttttctatggggccacagcggtcagcatttacctaatgcaagctttaagctggcttaatctatggtgggcagctggatttggcaggcggctttctggacaaaaaagaaatg

SEQ ID NO: 655488 - DNA, 675 bp, Homo sapiens
tggagactccatctcagaaaaaaagaaaaaaagacggggtacagatgtgatatgggaagaaaaagatcaagctgatgaggttaggatacccaggcccttgggacttaaagatcactagtgtctaaattccatcgagtggcattctcagtctataggtaaacttccgtggaagctggattgggagacagttttatcatctgatatatggggcttctcgttataggtccttagggagcagcttacctgaaagtgcttttagctgttacaccagtcgtgtaaacttcaaccgtgtaatgaaagctgtacctaaagtgtcacatgtgagttgagtgtgactaagtgctgatataataagaaaatatatatcggatcttcctatctagtccctgtgttcagagctcctgaaaccctgtgtaattctccaacagtgatggagtacatctttggtcctagtattgggtcttggaccccagttccgtgacacaaagctcctaaattcctttaatattccccagctgataaggagaatttcgcgtcctaatgaggtcacctctttgatgggcccctggataacctcaggattggggggctcgtccacaaaggaccacttcttgatgtggcagttttcaaaactttccagttctccccaccttccagaagaaggggaaaacgggc

SEQ ID NO: 655489 - DNA, 162 bp, Homo sapiens
  misc_feature (88)..(88): n is a, c, g, or t
  misc_feature (139)..(139): n is a, c, g, or t
ggaggctcagagagtaacagagcagcctctagagaccagcctgtgcacctctcaccaactgcgctcctcatccccgtgccatccccanacttctattctcctggctcctccgaaagcccatggcttcccgttctctcgncctccgcagttttccatgtgatc

SEQ ID NO: 655490 - DNA, 420 bp, Homo sapiens
  misc_feature (53)..(53): n is a, c, g, or t
tgtttttgtttttataacatgtatgaaactgacatcttctcaaatcttgttcntccggctcttgatgtgtccatcgtccagcgctgctatggacaccacacgtatgccaggcccccccccgcagtccagtctgattctggggtatgcccatgctgtgggaaagaatagggaggcctcccaaatgtatgcgaattgtccccattccgtgggggcacctggcaatgacccgggtggagatggggcatggaggagtaggaagacccagccctatttgactggggagaggaggatctggagtccttcatgcccaggtctggaacccaggttctgaccccagggccccaccctgggctggacaatcagatcccaaaggaatgccaaaggggactcggttgtgagagccgcttaggggccagacct

SEQ ID NO: 655491 - DNA, 176 bp, Homo sapiens
tagaatttgtatctaacaggataaaataactacatctagcttcctctcagtgacattctctccaagatcagctacaggagctcactcctccccaccaagctgtctagcagccagacgtggagcttgctgtaacacacacgtactgattgtagagtgcagactgaaatgtcttcact

SEQ ID NO: 655492 - DNA, 863 bp, Homo sapiens
  misc_feature (104)..(104): n is a, c, g, or t
ggtctgatgttgcaggctgcttcgcgaacgatcgatgcttgcaacgtggctggatcggccgaggcgcgcaatggacggatcgcgagcacgacgcacccgtgcgntcgtgctcgctccgttgcccttcgcaggaagaaggagccgcgccgacgcggggagtccgcgggacgaccacgaacaagtcgtcaccatcgtgccgatcagttgcggcagatgggcctaggtgcagtcgcgaacccagagccgagggaaggtcagtggtaggaagccgcacgcagaggtgccacgacgagaggagcgccggcgttggcactcgtcgacgctggttccagtgccgccggttgctcgcgacggtagcaggagcgagtaacgccagggtctgcggccaggcccttttctatcgagagcacgctggcagtgcccattgtgtacatcccggagatgctagacacagagacatttggccagaaagccaccgcagtttttgactgggcttcggaggttgacactggaaccgagacagcaagcacgatgcgtggtcttgttcttgtattacccttgtggctaccctggcagcaccaagctgcagggtcttgcattgtgaccaagcaatcttcctgtgaactcacactggactcttgtgagtggccttgtgccctacgtgccggcttggaccattgtggacttgtagcaacgcttagagtcctatcgtagtagtgccatggaacccttggacctggcgacgaccttgcagtcccacagacaacctgtacagggcgtgcgtggaggtcccgcagcgctgtccttgtgtctggccttaccaccctcacgcagcccttccaacgtcgccagggctgtaacag

SEQ ID NO: 655493 - DNA, 290 bp, Homo sapiens
  misc_feature (21)..(21): n is a, c, g, or t
  misc_feature (30)..(30): n is a, c, g, or t
  misc_feature (38)..(38): n is a, c, g, or t
  misc_feature (44)..(44): n is a, c, g, or t
  misc_feature (54)..(54): n is a, c, g, or t
  misc_feature (59)..(59): n is a, c, g, or t
  misc_feature (63)..(63): n is a, c, g, or t
  misc_feature (79)..(79): n is a, c, g, or t
  misc_feature (95)..(95): n is a, c, g, or t
  misc_feature (127)..(127): n is a, c, g, or t
  misc_feature (139)..(139): n is a, c, g, or t
  misc_feature (146)..(147): n is a, c, g, or t
  misc_feature (149)..(156): n is a, c, g, or t
  misc_feature (158)..(159): n is a, c, g, or t
  misc_feature (175)..(176): n is a, c, g, or t
  misc_feature (186)..(186): n is a, c, g, or t
  misc_feature (192)..(192): n is a, c, g, or t
  misc_feature (255)..(255): n is a, c, g, or t
gggcgagggagtcagcgaccncaaggtgancgggttgngtaggncagggcaggnctgcncagnccactgggcagtgggncacgagtgggcgagcnccgggggtgtggcagggcgggagaaactggcncggacctgggtncacgagnntnnnnnnnntnnccaaggaacttgtgtnngggggctccnggagancggcatttatgtggggaggggagacgaaattatcgccccttccccaaccatttttagttgtgnccgccgcccagaagctgtgctggcggggggggatt

SEQ ID NO: 655494 - DNA, 787 bp, Homo sapiens
tctttataaagtgaacaaggcagctgatgtggtggctcatgtctgtaatcctagcactttgggaggaaggagttcaaggccagcctggtctacatggcgaaaccccacctctacaaaaaaaaaaaaaaacttagttcagtttttggtggaacttccctgtggccccagcttactcgggaaggctgaggtggagaggactcactttgaccccagggaaattggaggctgcagtagacgctattagatgggccccatcttgcacttccagccttgggcaaccgggaggcaagaacccttgtcttcaaaattaaaattaattaaatttgggctgcgccacaggtgggcttcacggccttgtaattcccaggcacttttggcggaggcgccaacggtgggcgcaggattcaccttgaggcgccaggagaatttcagagagacacagcccggggccaacattgggcagaaacccgggttctctactaagggaattacaaaaaattacgctagggtcgtgagtaggagcgccggcgccgtgtaaattcccagcttacttgggagacgcgcttaaggggcacagagggcactcaccttttgaaacccccagtagaacgcaagaaggtttggtaggaaagaaggcccaaagtatctccccaaccactgtgggattttcccaggccctggggggccaatctaggaagccaaaagaaactccttgttcttcattaacagtaactgtacactacaaattcggacgagcaggacaatataatttttgcacacagctaat

SEQ ID NO: 655495 - DNA, 187 bp, Homo sapiens
agggcatcagatgcttttgaactgcaggtatgggtagtgagcaagggcacccaccagcacatacaaacatacaaattaagtttgtatgttaaaagcttggggataaggtcatccagaaaggaaaaatcctggcccagcttctccacaatcagaagctgagtaacacgtcgacgcggccgcgaattta

SEQ ID NO: 655496 - DNA, 265 bp, Homo sapiens
ttttttttttcccccccaaaaagggggggtccccttggggggcgcccaaataaattagggcaaaggcttgtttgaaacccccccccccccttttgggtttggggcccccccggggggaaaaaaaaagggggggttccaaaaaaaaaaaagccccgccaaatttttttaaacaggggtttttttttttttttttggggggggcccccgtttttttttcccccccttaggggggtacccaaaaaagggtttttgttttggtttttta

SEQ ID NO: 655497 - DNA, 172 bp, Homo sapiens
ggtttttttttttaaaaaattccccccccccccctcctttccccaaaaggggggggttgttccaggccccccaggggggtaatgtggggccccttaggaggggggccccagcccctttttcttgtgaaggggggaaaaaccccccaaaaaaggccctttggggtttttttta

SEQ ID NO: 655498 - DNA, 116 bp, Homo sapiens
gcccagcgcctttcatcaatcgcccacatcactcgagacgtacattatggctgaatcatccgctaccttcacgcccatggcgcctcatcatctttatcttcctcttctttctcacc

SEQ ID NO: 655499 - DNA, 253 bp, Homo sapiens
  misc_feature (131)..(131): n is a, c, g, or t
ctcggatacacatatgatcaccgaacatatattgatgaagtagcacataagacacccataaaagtagagatacatctgccgttcacacagagaggacttaaagtatacactgacttgtcctgagtttctcngctctagaactgatgacagaaacatgtaccgaggtcattctgctagcttctgctttctaccggaattttgcccaagttaattttttccctctcaattacttacaaaagtcggtggttttcta

SEQ ID NO: 655500 - DNA, 244 bp, Homo sapiens
cattacctcatttactctgagagctccggatgtcttctttggacaagaaaaagcgaaacgtgaggtgccatcatcttgtgtggctcatcctaacattacaagactttgagggcgtgtcttaacctctagaccctccctcttctattcaggatacaatcagaagggaacctttcaccaagctctcccaggggtcagatcacagaatgtgacctgaaatgtcagccaattcccatctcccttaagc

SEQ ID NO: 655501 - DNA, 494 bp, Homo sapiens
agtgaacagcagcggagtcctgaagctctgcatgggctaacatgaattgtatagtgctgccgcaggacgcctgcacaccatcgaggtgcgagcagatgaagtgcccatgcccgggaggagaagcatcagaagcagcgtggcgcggcaacagctggaaacagagaagaaaaggagagaaatcgtggagagagagaaagagcagatgatgcgcgagaagtgaggagttgatgctgtggctgcaggactatgaggagaagacaaagaaggcagtgagagagctctcggagcagattcagagtggccctgcagatggaggaggagatggaagcgggcacaggaggagtggcgagctgcctagatgtgttgaccgtatggctgaactgcgggctaaggaggagctggagagacaggcggtggatcagataaagagccatgagcagttggctgtggaagcttgaagaatacactgccaagatttgcctcctggaagaggc

SEQ ID NO: 655502 - DNA, 179 bp, Homo sapiens
cagctgctcgtcggtgactctataggatcccgcttctcattacacgaacagattaacgtgcacacctggcaattgtgtttggtcccacgctcttccagtacagatgggcaggactacaaggctgtgccgtgtggtggatgacctcattaaccactatgtggtggtgtttagtgtggatt

SEQ ID NO: 655503 - DNA, 305 bp, Homo sapiens
aagcactataaagctgatgacagacttcaccttctgaattagttcccttcttcggctggatacggtttcttcatagttctacatagagcaacttttaatactttcttgtcaatcaagagatcttacaggataataagcagatctatattggcgttgtatgagaatgggcacataacttgccaatagtgatggtcgcagagaatcttggatcagattgaggagagtaccgaaagggaaggagccgatgtatactcggtagccagtccttcacagagactcttgccattccctgaggcatgacaaga

SEQ ID NO: 655504 - DNA, 280 bp, Homo sapiens
  misc_feature (65)..(65): n is a, c, g, or t
gaaaggctttgctttaatgtgtagtgccccgccgcggtgtttttgtgtgctagttgcttcttgcngctgcttcccgcctgtttggggctcccaaacctaacgtggtatatatatatatatataaaaggataaaaatatattttatttttttttaaatccctggagcttttgggtcccatcaggtcctgttgttaattgtaaaaccgttgtcccctccccccttcccggatccctcatgttttttttttttttaatatccatataaaggtaaaagaaggga

SEQ ID NO: 655505 - DNA, 229 bp, Homo sapiens
tgctaggggactgctggtctgcttgccctgctggaaaagatggtcgcactggacatctggtacagttggacctgctggcattcgaggccctcaggatcaccaaggccctgctggcccccctggtccccctggccctcctggcactccagtgtgtaacgcggtggtggttatgactttcggttacgactggagacttctacagggactgaccagacctcgcctcagccac

SEQ ID NO: 655506 - DNA, 153 bp, Homo sapiens
ttcttggttctttctccctcaaagtgaaatgagagactattgtagggtcttgagccaaggagtgatattactctgaattctgttttaaaaggttcattatccgctcttgtgtgaaggcagggtagctacttataagcctagccccagctgcgg

SEQ ID NO: 655507 - DNA, 1408 bp, Homo sapiens
ggttcccggtggacgtggtccctggactcccgggcccgtcgcagtcctccgccagcgcttccttaatggcggatgggtgagccccgggagacctcgcgtgcaggaccgcagtggttgtccgagtgcgaggcgcgcgagtgggcgatggccgaggcgtgtcgcaggagccgatgtctgactcaggactgtattggagagatctgatatccagtcgccatgaaggcatctgtgttgagtgacgattgagcttgagtaaagaggaggaggctgggaatgaattggatgcgtgcacaggtgatgtggagacgctggttaggggagctgagtacacgtggcccgagtgcgagaattcatggaggtccgcatctgcaatgacgggtgcagaacacggggattcgacgtgggtggacgcggccccgtgattgagggtgacactgacccgtgaccgggcaggggccccgggcggagaggacaccccctttgtgcctgccagggggacggaaccacggagataggacttcgagcaccttggtacattagcaataagacgatagttcgggggaaaataggatttagaacaaatacatgatcgccatattggattgtacatagagaagtcggtttgggaatgtccattgaaggaaggtgcggaaggttcacagcgcggcattgacgaccggggtttgttaccaacccctgggttaccaaccccttgggacgaaagggagagttaaatacacatgtattgcagcgaggggagcagtaagattagcttggagaaaatagtgggggacggagataaatgcaaacaggtaaggttcgaggggctcaaatagggagggaaaaggagaacacttaggtgtcagaggagaacatataggggagaattacacgaggggtacagtaggagttgagaggcagtggtcatatgggggacatgttataggcgagcttgaggaagtattgggaggcattcctcagatgggatttataatgggaaaaaactcgggagagtgacaggagatgtgccaattttgaccgatatatgtgggagagtacgaagagagaaaaaggccagctaggccttggagacagcgtcactttttcccccactgtctgccattgtcacgcgaatgttttcccaccgatgcggggacaaaatttgttaggtgaaccgactgaaacacctcgcaggtctatcatttgaacgtagagagcaaccttgaagatggcatgtgtcgtgaaaccccagcgagagatagaaagctgaaactactggggggggtgaacacacagcggtccagcgcccctatatgttgtaatcggacagcaaagggacacacagcgaacaaatgggagcgaagggtggaagtcactctctccaagcgagacatttcgctactgtgcc

SEQ ID NO: 655508 - DNA, 103 bp, Homo sapiens
tcggtaccccacatttgattatatactatgtatggatgaaagcactgagagatttgaatagaaaaggtaatcgagttaaaacctgcaaagctaaaattgaact

SEQ ID NO: 655509 - DNA, 470 bp, Homo sapiens
  misc_feature (174)..(174): n is a, c, g, or t
gtcatgattgtgccacagcactccagcctgggtgacagagcaagaccttgtctcaaaaaacaaaagaaaatcaaactgaggttcagagagaaatattaatttctccaattttgcacagccagcaaatggcaggcttagaattccatccactagctaactgagtagtataggacntagaccaagcttgtccaacccacggcccacagactgcatgtggtccaggacatctttgaatatggcctagaacaaatctgtaaactttcttaaacattatgagattgttttgcgattttttttaagctcatcagctatcattggtgttagtgtattttatgtgtggcccaagacaatttttcttccaatgtggcccagggaagccttgaacaccctgacttagactttatagctaatagcttgacaaattaggtgccttaggagaaatcatttaatatttgtatcagttgtctgcc

SEQ ID NO: 655510 - DNA, 559 bp, Homo sapiens
  misc_feature (100)..(100): n is a, c, g, or t
  misc_feature (197)..(197): n is a, c, g, or t
  misc_feature (205)..(205): n is a, c, g, or t
taagggaactggtcacacgctcgggggggccctgcttggtctaacggacacggggggactcaggctcagggcccttccggggtggccccggcgctggaanacggcttggcccttggccgcttttaaaggattctggcggcgcagggggtggattccggtttggccccaaccctgtgctcgggaagttccccaaaaanccggcaantttttccttgggcccgggagcaggaggaatttttggggcccccaaatggccccgtggaattggtccggggccttcccctggggctggttttgcacaagtttggggccgggggcaacccccctggggaacccctccccctgggggggggggcaaaaattttggtttacgtgggtcaaagggtggcccggggggccccctgggtccggggggcccgggggggccccgcgctcaaggggccccaaaaccgggccccgcaggggggggttgttctttccggccgggggccctttcccgccccctcgccctttgcaagggttgttttgccccccccccaataaaggtccttttccccga

SEQ ID NO: 655511 - DNA, 240 bp, Homo sapiens
agcttaacatggcagtctagggtgaacaatcccctaacacaagtttacttgtctttgattatgacagtaacaaattgacagctttctaactcacaggcatagagtgaccttttaatcagagcccagggaggacacatgattatgattggctcctcatactgaacatcagtggatcctctcagccaagtgatcttctgagagagctcacctgagcaactataatcatatctcatggcttgt

SEQ ID NO: 655512 - DNA, 343 bp, Homo sapiens
acatggactccaagctaccacagctgcgctccagtgtcacattatggtgagcaggttccctggaactgcaggaggagaacctgcaggacgcctgggtaggattgcacttttgctctaatgtgaatgggacgctatgtttcagctacgtttctatttatgatggtgacaaaaaaatactgctggattcccagcatggttctggatagagtgcacaagagttctcattgtgacagcccaactcactcagaaacagccatgagacacttttgggtgtcccttctgaagacagacaccgaaagcattgaagagaaaaacagccctcagtctgaataaaattgtatta

SEQ ID NO: 655513 - DNA, 336 bp, Homo sapiens
gcttggttacgacacagttgatccagaagtagcaaagtggtagttgataactggtgcctccatagggcagcttgaactgtctgttctgagtttgaaatgcttttttaggatgtacttcagcaggcttctcttccttccggctcctcgagtacacatacaagaggcacactccacaggcaagctcctgagcatatttaatcccaggccgtaattttacaggaggaaaaatccagcgagtttacatctggtgtgagtgtggcgagtgacatgaagccgataaggtaataccatactatatcgatgtccttcagcaactgctggcagtaactcgacatg

SEQ ID NO: 655514 - DNA, 272 bp, Homo sapiens
gggcctggctctcttaacacaaagaccatgcagccagtgctgacttggaatgagccgaactcaggaaaaggccaaccctacctaactccttaaggctggcaaagtctaggctctgcctttaacaacactggtaacactacctgctccattcctggtttatccttgtggtagagtggccttgtttctatgtgctcaggaaccagcctccacccagcctcagggatgtcctcccaagagtgtaagtcgacgcggccgcgaatttagtagtagta

SEQ ID NO: 655515 - DNA, 403 bp, Homo sapiens
actcagatatcaagtattactttacagcaacgcagaatgaactaacacccccttcaaaacagagaagtcaacacacacttgaccaatgccctatcttcagacacaattaattagaatacgaatacacatgctgatacctactcttctcatagttgctaaactgtcataataacttgccctgtgtctttcaactgtgtgcttcaataaaggcaaagcaatgcttcctcacagaaaacactaagacccttagcaaggggtaaatatcaactatctcaagattatcacagcatatttcaagttcattaatgtcatcaataatattatactttaatacaacatgctgtgaaatattttaggcccagataacaagaatggacgactatccaccagattactcttccta

SEQ ID NO: 655516 - DNA, 216 bp, Homo sapiens
ggctgctggtgaacaggtcacccaaaatggagatgggatcaaactagtggtcaaggactaactcctaaaaaaaaaaaaagaaattcttttaaaggtttaatttagtttttaaaaaaaataaaagttattgattcactcttctaaattggaaagtttacctgtggttttattgtaaggtaaaaaaataaatttttaaaatttgggggccccaagtta

SEQ ID NO: 655517 - DNA, 677 bp, Homo sapiens
  misc_feature (68)..(68): n is a, c, g, or t
  misc_feature (87)..(87): n is a, c, g, or t
  misc_feature (93)..(93): n is a, c, g, or t
  misc_feature (98)..(98): n is a, c, g, or t
  misc_feature (106)..(106): n is a, c, g, or t
  misc_feature (113)..(113): n is a, c, g, or t
  misc_feature (115)..(115): n is a, c, g, or t
  misc_feature (145)..(145): n is a, c, g, or t
  misc_feature (211)..(211): n is a, c, g, or t
  misc_feature (233)..(233): n is a, c, g, or t
  misc_feature (456)..(456): n is a, c, g, or t
  misc_feature (513)..(513): n is a, c, g, or t
  misc_feature (542)..(542): n is a, c, g, or t
ctggctacgcaaactcttaggcatcagtgtcagcaccaatcgggcattcgtgcagctgctgtgggagncaggcattccgtggtaaancctcancctgnatggcatngtgcgcntntgggacgccggaccggcggcctgcttaatnactaccggggccacacggttgagatcctggactttgccttcagcaaaaatgcctccctggtggtgnccacgtcaggagaccacaaagngaaagtattttgtgtccaaaggcctgaccgttaatggctgcagcccctgcctgtgtgtttggtgttgaggggaagaagggacccctgcccctgtttgccaacaaaggcagtagggcacaaaaggaaaaggagggtggggccctggatgactttccagcctcttcaaatgacttgctcccctttcctttttttttttttaaagacccagcccagggccctcccncccttgcccaaacctggtgggcccttcaaagggagggggggacctgtttttttttcnctttcatttgctggtgtgacccatggggngggtatttgtatgtggggagtaggggtttaaggttcccgttttttcccttcccaagtttttggggggggaaaggaggaaaaaatactagttaaagattttaaaaatgtaaataaaatatacttccccgagccaga

SEQ ID NO: 655518 - DNA, 82 bp, Homo sapiens
agaaattctagggtataaatacaatttggacaattgcatttgatacaggttcagtgtgattatgctaaaagagtttcataat

SEQ ID NO: 655519 - DNA, 339 bp, Homo sapiens
  misc_feature (56)..(56): n is a, c, g, or t
  misc_feature (84)..(84): n is a, c, g, or t
  misc_feature (113)..(113): n is a, c, g, or t
  misc_feature (138)..(138): n is a, c, g, or t
  misc_feature (169)..(169): n is a, c, g, or t
  misc_feature (241)..(241): n is a, c, g, or t
  misc_feature (335)..(335): n is a, c, g, or t
actactccaacgagaagccgttcacggggttcgaggccttctatgcagccgagganattgacgagtgccaggtggccccggganaggcgcccacctgcgaccaccactgccanaaccacctgggcggtttctactgcntctgccgcgaggctacgtcctgcaccgtaanaagcgcacctgctcagagcagagcctctagcctcccctggagctccgggctgcccagcaggtcagaagccangacgacctgttggcctcagctccgggttgggctgaagaatgttgtgccccaactcccattcacccaccatggacccaataataaacctggcccnaccc

SEQ ID NO: 655520 - DNA, 1498 bp, Homo sapiens
gcgcgatagagtaccacggccagaggtcccatggaaggtgtttccggagaccagagagatagtgaaaacgccgtcaggcttctatgttcgtcgatgctgctcgatcatggacaggcggctatgagtttgagtacctatgagatatcgtaacaatccagactcccagagagagagctctgacctgttagtgagtcatagtggcctgtagacaattattcacggtagacatgcgtccagagaagacgcagtcacattctatgtaaacggtgcatgtcagacgtgcacatcacttgctgtaattaacgctggccttctgacgcatcgtctcctcgtggacgccgtgcgccaagcaaaggccatcacatgcgaagcatggtctatctaagggcaatagagtctcctacttgaaagcgtcaccatgtcactccatgaaagaaacaattctttccaaaggagcatgtgaaaggacatatgcgccagcgagaaaacttagctttcgcgaacctcagaagcgcggccgcgagccaggagcccgatgggtccttggcatggcgtggacataggcggcgtaattctatctaccacatcgcacaaggatgcattgcggacacgaatgtgtaacgattcgagcaagtcaatcggatggtccaaagcaagcccagttgctatctccatcccgctatgtgtatagaggggagagaaagaaccacccaggaaaaagcgctctccacagtcttagggtttggcgcattgtcacatctggtcgaggctatagcccaggaaaacgggcctagagagatagtacgccccccatagtgcttttggtagcgcccttaggagcgtttctgggatgccgtattcctttgtggtccgccgttaaggccccgccaatggttttgggctgtccgggattaaaacaccagcagtggggccgttatcggatgcaacgccggttgtgggagttttaggcccatattatttgagtacccccaggggaagggccacaccaagttgtcggaaaacggaacgtttggaagctgtaagagctggtttgcggacaaaagggttcccaccggaccttaacggagggagaggaagaggaaaaacgtctctttgggggaactaccgccggagggcatataggtacaccgggcccccctttgtgtgtctatacattaccccaatgcgtggtttaggccaccaaaccctttcccggagggaggaggtcgtaaccttcggtgacaaagtcggcctgtggcccttcctttgtggaggcaggtaataattggcaccgttgtgggagcagttgggtgatgacacaaagcgccctcaaagttcaaccacgggaggttaagcggccaaaaagtttattgaacacgcgccacgtttgggagaccccagggaaaagtgaacctcgcaagattgggaagaggacaaactcccccccggttgccgcgagtaacgaaccattgtgcagtgtgggactatgaggcacaaa

SEQ ID NO: 655521 - DNA, 570 bp, Homo sapiens
tgacggctgaaggtcagacaaaacgacagagtacttatagatcgattgagatacccgacacttaaactagaaaatacagagttcgatgtatatggatatagcttccggtgaaaatgatcgtcgactcatataatcttcaacatcagaagatccgaatgtccctggtagaaccacagataccaggaataagcattcctactgatacttcaaatcatggaccttaatggaccaaaggaaaaagaagatgaagcttggaaaatagctatattcaacaaaaatcttcaaagactggtcgcctttctgtaaaagaaaaaacttgaaagaacacttctaagcctaagtgtgtgatacagtttgttacttttaagtacattttaataatttcagacatctgcatttttattgaacagttgtctgtatctgacccatcatactactatacttctgggttgaacagaattatttatgcagaataattcaattgaatatccatcacttaaatacagtgacaggacagcaacttcagggatctgtaaagatcatttaaatggagtgctcacctcattgagg

SEQ ID NO: 655522 - DNA, 926 bp, Homo sapiens
ggctaaagaggtgtgtttacgaggggtatatgcccgagtccccctgggcccccgggggatcagtgaaaatggttgttaattcggacacaaatgggggggggacaaactcacagaaggcttcccgctggaaccctcccatgtggcccccccccaaggtgccaactgtgtctgcccgaaggtagatgtccccctcgctgtggtttgacaccattagttccaaagggcttgcctccttctccgtcggcctgcagtggataccgcccctcgttgatactctgaccaggtgacatgccccccacgcgtggtgagccccccccagtgcgctcaggccagtgcggccgctggataaacacgccgtggtgtgtcgtgacgcctgcgcggcaaaggtacaagtcaccacgactcgtgcgttctaaacctggcgaaaaaattaattacacgccctgtgccgccctgtactcgaaaaccataactggaagtctgtctcccaacattgtgggacaactcctcttgggtgctagaagccctttctttagaatacagtggctttcttgtagacagccttccccaccggtttcttcattgtttgaaggatcgtggagtctataaacagtcgtgggtgtcagttaagtcaccgtccccaccaaatatgtcttcctaatagcgcccctctgatatcaacaagagtcgcgcttatcatttccccgacttcctcttactgttacttattgcactcaccatcctcttgtacaccagtagacactttctttccttccattctgtatctctgcctatcatggaaatcttgcgaagtcaaccccctctaaaacatttctttatacgccccccatcattctcccccgaaacccgtccaccaggccaaattcctcgcccccaaacaaaaaatcccatcttcccccaaaaca

SEQ ID NO: 655523 - DNA, 414 bp, Homo sapiens
caaaatccccctaaacccccaaacccagtgccaaaggctcaatggcagaatagaatcaaagatgggagaattgtctctagtttttgtttaatctgtagtttttctttcctaggattctcagagccggcaaggaggatacagcatgcatcagctccagggcaataaggaatatggcagtgaaaagaaggggtacctgctaaagaaaagtgacgggatccggaaagtatggcagaggaggaagtgttcagtcaagaatgggattctgaccatctcacatgccacagtaagtatgtttcttaatttaccctgcctcatgggccagaaagcaaacacgattatgtactcagcagtaaaaattggcgcaaatatatttatgcatttgggtcagatcattttagatattcctttaccaaa

SEQ ID NO: 655524 - DNA, 198 bp, Homo sapiens
tagatcccgcactggagcagggtcccaggaatgtgctgcatgttcctgcaggacaagctgagcatagaggattacaacagaatatggcggtgagtataggaaacaaacaggccagcgccttttctaacctaaagaatgcactggagctggccccctcctcactggtgcttcctgccgttcgcctggatatgcagtcag

SEQ ID NO: 655525 - DNA, 171 bp, Homo sapiens
gggcgggcaggcgggacgacttttcattgcgccgacggccgtctttcccacgctgcgctcacttgcccgacggattgctccggcaaaaaacccttatctggatagggtttagtcaagccggcgcaagtccaatgtgtgggaaaattccgcatgccgactcgacaaaacggg

SEQ ID NO: 655526 - DNA, 316 bp, Homo sapiens
tttttttgagacaggatcttgctctgttccccaggctgtggtgcagtagcataagcatggctcactgcacccttaatctccagggctccagtgatccttccacctcagcctataagaacacaccaccatgcctggctggttgttttaatttttatttttagtagacgaggtctcgctatattgcccaggctggtcttgaactcctgggctcaagcagcccgcccaccttggcctcccaaggtattgggattacaggcgtgagccactgagcctggccttgatatctatttcttattggcttataatgcaagtgtgc

SEQ ID NO: 655527 - DNA, 1151 bp, Homo sapiens
  misc_feature (970)..(970): n is a, c, g, or t
gaaaggcgcaactcttcataggcagatgcgtacactgcgacaggttaccggggcaatcctgccgcagtctgcctcctgtgagcgcatcattggaggaagacgcccatcagcaagatagcgaaggagagatgaacctctcagaaacggactatccactcatggaatagctgtcagccgacttgactagtcttcatcgacaatagctctgcgcttaggactgagataggttatacgccagtagagtggaagtaccccattagtgctgtgccacgccaaaactaggcactctgcggtgcctgtgctagtatgtcactaaaaatacgagagacaagtgagacagcaaccctggaccgttggtcacaattgatgcggagagagctagaaggccagtaagagcacgaagactgggatagatcctggactcttcctgatcatacccaatcctattccccaggtacttccatagaagttgaatgacttgcataaaggcagcacataggtgacaccctggtccaggaacatccggatactctacagataccagaaaactcctggtccggctcagcgattcttatgacaaggtcctttctagagagcctgaaggtgaacaacagagcctctgcctgcaacagagaagacagggaaggtaagaggcctcatcctcaacagtcaaaggagagcctggaagggctaagtggccccgtatagagtacctactccagataactacgagacagtggggaacggaaatgccgaaagacccggtgaacaggatcaggcaacaacaggactcaagaacgaacaggaaacacagaagaacaaagacagacaagacgatacagaagccataccagatggtaaccggaccagaggaacgtgaacaccgggaacagtacgcaagagaaccatagatgcgacgtgcacgtggtaccataacaacgacacagaagaatggaataagagcaatganatgacgacacatgacagaccaatgagatgcaccacgaaggccaataggagcaccaggagccaacaagagacataccaaaaaaccacaaaaaacagacagaaaaaactaacacaagagcagaaaagagagaaaaaagacgaacaccaatagacggaaaccaatagaacacgacaacaacaca

SEQ ID NO: 655528 - DNA, 582 bp, Homo sapiens
tggggtaaactcagagtgtgatgatgggatagtgagaatagaggggcaattatgagggataggtaaagtgtgacaagatatggtaacggagatgatgaagattggagtgctacgtgactggtgagaattgataatgtgcagaggtgagaatagaaatgactggaacatgagaggatgaagtggtgaatggtcgggaagaaatattagaactgtgctctgaagatatataatctgaggcatctgaggagccatgtcaattaggagatgccccttgctcacaatcagacaaggaatgccggagtcaggcagacattcaggattcaacatggaaattttggagtcaccgtcacataagaacaggtaaggacagttcaagcggtgggatcagtaaggtcaaagggatactacaggatgagaaaattaaaagcaaggcagatattggagaaatacattaagttagtagagtctagaaaagccttagagggagagacaactaaaggtgagaaagtaaagaaaacaagcaagggaaagtgttcagggctgtagagagagcgagcagattaaagatgcaggatttaccct

SEQ ID NO: 655529 - DNA, 1281 bp, Homo sapiens
gctcagactttcgagacagtccgaatcggacctggaccgtgagtactgccatactcgtttccgtggtcaatggactcgccccacccgtgccccccaccatgcgctcccaactctactggtgtagtcgcggtgtgccctgtggctgctgagatgctgggttggcggcctgtcgatgtgcccctgacgcgcaggtgacatgccgtggtgctccaggggctgcttgcttcggtggccgcgcgtgctgctcgatccatccccgcggtacctctgcccctttccatgtgcttactttgcttccggctggccccataagtctgtcttgctttgcagctgctgctgtctgggatgccgagactttcctgaccaatgcccttcctgctggggactttgcctgtccgagtaggctctgcataaccttcactcatcgtagtgcgccaaccctgacgcgtgcttgctgcgcggccctcccttctgccgtgacggttgacgggggactggccgacccattgcctcggcgagtgccgtttgcgactctgccccgattcacttggatatcgcggacttgtcgcccgtcacgcgcatctaaaccaacaattacagatggctaggctgagatcgacgaggcaggccctctcgagaaccgcgtgcattgaccgctaatacccttggtacgtgacagcttcgaagagcgatcagtgtcagcatagtactccagcttgtcggtcgggccctcgtttttgtgtcacttgcctgtgctcgcccgtttccccggaccgcgggggcagttgccgccactcacagcctttggctgtcacattcagtccttgcctatggcgtttcaaccagcccatgcgtactgccgttgagttggctgcctgtgaactgtgcactctctgtctgacgttgtcgttggggccccgtcgcgccatgggtacctgcgatggctgggccatgggacagccagtgcgctcggtcccggaggcgttatcaggcggcctttgtccgttgtggcggccgcttaagctgtgggtgtctcagcggcagtgccttgcaaggcccggtctaccttggcctggcccatgtcctggccccttgccacgtccttgagtacggccgagcccattgcgcactgccgcgtcttgggcaccgttttccgactttcaaaccagcacgccgttgtgaccaggcgctttggaacccccaggacacgtatggcttggaggtcggcgccttgtatcttcggtgtaatgggctggggccactcccacctgtgtgcgtact

SEQ ID NO: 655530 - DNA, 292 bp, Homo sapiens
ttttggtcacctcggggtacttgagctcctctgtcacctccagcctccatcttctccggaactgagcagagtaaccttctcaactgtggggttgcgtgcccgggaagctgccctcgccagggaaggtgcgcagctgggacttcgggaaagccaggtgacaagggaaatggcgatgcctcccccgaggtcaggaggagggtgcaccgttgccactataaacggctgcaggacagttaacaccaaagagctcttacttgaaagcacaccagcggacgcacacatggagtacatg

SEQ ID NO: 655531 - DNA, 360 bp, Homo sapiens
agccactagccctcctatcctggtgctacatagtgagaatccatctctattaggaagggattaaacaaggcattttcaagaggggcggatgccacgctcagtggctcacgcctgtaatcccagcactttgggaggccaaggtgggtggatcacttggtgtcagtagttcgagaccagcctgaccaacatggtaaaaccctgtgtctagggaaaaatacaaaaattagccaggcatggtggtatgcacctgtagtcccaactactggggaggccgaggcaggagaatcgcttgaacctaggaggcggacgtagcagtgagcggataccatgctgctgcatccagcctggacgatcctccca

SEQ ID NO: 655532 - DNA, 454 bp, Homo sapiens
cggcacgagggtaagaaggtgcattttctcaatttgctggccagcataatttcacaaagcccctgacactgtggcaagtgtagctctccggagggatgctttgaagacatggcagggtagagcacacggctcccacatctcttgcctgggtcgctgtattccagaaaaggtaagtgaccctggtctttgccctttcctagacataagacaacatctggtgtggttaatgattatgcctctgtgacctataatcagatgtactcttacatcctaaccttgatgtatttctgctttactgtaacttctgaacaagtttgatgtgattttgcataaactatgaactaaaacactgctttggaggagtctgacctctctgaaagactcctcccaggctgtagttctcagtccgtagtcctgagtcagacttctgaataaaactaactttaattcttta

SEQ ID NO: 655533 - DNA, 337 bp, Homo sapiens
  misc_feature (3)..(3): n is a, c, g, or t
aantcgacggttctcagatgtcatatatgtaatcacacactcaaactctgaacagtataccttcctatgtacaattaactatattgtactctcgggatcggcaggcaaatgaataaaagaacatctttatttacccgtatctgcgacattcctcatagtatgtccgaaagcccaaatgatggaatccaaaacaagcttaaactgtgtaggtggaatagcaaggaacgctgggaaacaactgagaatcgacagcctgaagtagtaagaaaaagttcgctctatgtccaggatattcttcaaagtcctacccataagtggcggaaccaccaatactgtt

SEQ ID NO: 655534 - DNA, 131 bp, Homo sapiens
aagaggaagatggtgagacgacggggaggtgaggcaaggttcataatggagagagtcgagagggatgaaaatagagaccccagtgcagggacaagtgggtgctagagtagaacccaggagagggtccagtg

SEQ ID NO: 655535 - DNA, 139 bp, Homo sapiens
atctgacttgcccgatgtgactccacccctagtgcctgtgatcttgactctgccctgactgtgacctccacccctagtgcctgtgatcttgactgccctgacatgacctccaccccatagtgcctgcgatcttgactct

SEQ ID NO: 655536 - DNA, 117 bp, Homo sapiens
ctagaggatcccggctgcctagcacttcaggagaagaggaggataggctgctgtcgatggcacagctttatctgaacggtgagctagtggggaggtcctgcaggcggacagagtcgg

SEQ ID NO: 655537 - DNA, 374 bp, Homo sapiens
gttgtgcgtttttaagagctttttatgtggccacagtgcagagccaagggaagagggcacggcccattgccattctgtcacagcccgccggggtcagatgcaaaatccaaaaagagacccccaagtacagcatggggtagggggtgtcgggaatccattgaattgtggttgccagaaccaagccctgctcacattctcacactggcacccagaattgtcaaagatccagatgtgtaaaaatctacgatccctcagtctcactcacaaaaaataaatatctcatgtccccagcgaacacagagtcaggccacagctggagcaggcacaggcacagtcagaaaggacacgagtgaacgcggtcatatgcacacacg

SEQ ID NO: 655538 - DNA, 293 bp, Homo sapiens
  misc_feature (32)..(32): n is a, c, g, or t
  misc_feature (70)..(70): n is a, c, g, or t
acctgcataacaacttttcagtcaacaacagntcaaatatatgatggtgatcccccggacctgaaaatanccctattgccccggtgacattatagcccatcagcatgtggtagagcaacacattactcacttgtttgccagttgtaaaaaagaatagcacatacaattacatacagtacgtaatacttgataataataaatgacgatgttagtggtttgtatatttactgtactatatttttcacagttattttagggtgtactcctatttattaaaaaaaatgttaactata

SEQ ID NO: 655539 - DNA, 508 bp, Homo sapiens
  misc_feature (91)..(91): n is a, c, g, or t
  misc_feature (344)..(344): n is a, c, g, or t
  misc_feature (358)..(358): n is a, c, g, or t
  misc_feature (393)..(393): n is a, c, g, or t
  misc_feature (402)..(402): n is a, c, g, or t
  misc_feature (431)..(431): n is a, c, g, or t
  misc_feature (476)..(476): n is a, c, g, or t
  misc_feature (490)..(490): n is a, c, g, or t
  misc_feature (503)..(503): n is a, c, g, or t
gattcggaacgagggtctcacacacacacacacacacacacacacacacacacacacacacacacacacatatttttgagacggagtttcnctctgtcgcccaggctagagtgcagtggcatgatctcggctcactgcaagctccgcctcccggattcacaccattctcctgcctcagccccctgagtagctgggactacaggcacccgccaccatgcccggctaatttttttgtatttttagtagagatgtggtttcgccgtgttaggcaggatggtcttgaactcctgaccttgtgatccgcccgcctcagcctcccaaagtgctgggattacaggcgtganacacggcgcccagncatttgttcacatattttgatagtaatatgaggcntcatttaanaattggtttattttttatggataaatttntgggccattgttgtaactggtcttaattgatagttatataaatantggtagtatatttnctttttttaaagnacaaa

SEQ ID NO: 655540 - DNA, 371 bp, Homo sapiens
tccccaaacactgtggctccagctgaatttcagaaaaatccttttctctctcacatgaggagcctagttttcacgattttatgtccaaaacgtatatttgaaccctgcacctgggcatctggctcttggccgagtctccctctttctcccaaggtggtagatgtgactgtcaggagtctggggagctgacgacaaggctgagcaggtcagattgtgacttgtccctggactgtcatcctgttgaggaggaacagctagtaccctagagaactaagaacacctgccaccgggttatttagacccgcgggtgaggatctggtgccataggatggtctccagggagcactgcagtgatggagggtgttgagtag

SEQ ID NO: 655541 - DNA, 179 bp, Homo sapiens
gcgctgcgggctgatgcggtaggcggccacgtcgaacgttcgtcggcgggctcggcgatctggctgcggcgcagcagcgccgcgacgcgcgccagcagttccagcggccgcagcggcttgacgatgtagtcgtcggcgccggcgcgcaggccttcgaccaggtcgtcctcgctggaacg

SEQ ID NO: 655542 - DNA, 180 bp, Homo sapiens
ggggacggacgttgcagtgagctgagatcgtgccaacacgggcctggccgacagagccagactctgtctcaaaaaacaaaaccaaaatcacaaaagtaccatatgaggctggtccatgactggcactttatgacagctgaggtggatcagatggcttgaaagcctaggtaattcgaggac

SEQ ID NO: 655543 - DNA, 568 bp, Homo sapiens
aaggggagggaagataatttttgtatgttttttttattaagaaagagagagagggtttatcgatgatttgtatggtggttctatctatgaggggtggggtgtgtttgtttgtttttgatagatgtaagaggggggcgcttttcttcctctgtttggttgtcgcgactggtggtgtgtgtgtttcttttgtgttactctctctctctctcgtcgcggtgtgtctcccccctctccgctggggcgcgccgcgctgctttgtttggggccgccgccccgcgcgcgtcttgtctctctctctcgcggcgagaggagtgttttttctctctctcgcccccgagagatatatttttttttttcgtggtgttgtgttgctctctcgtgttttttttttttttcagcacgattatgtgagtttgtttattttttttttttgtggtggtgatatgagagttgttttttgtgagtagaggagcacattgtttttttttgtttctgtttgtaatataaagagagaaagagaaaaaaaaagagagaaggaaaaaaaaaaggcgcgcgccccccccctgga

SEQ ID NO: 655544 - DNA, 708 bp, Homo sapiens
taaaaacgggggggagtggcgtcataaggggaacccccccccgtgggggcgcccacagagagggggggggagaaaagaggaggggggtggggagagagagaggggcgccgagggggggggggggcccagaagaaggagggccctctggggggaaaaaacacccccggagggccacacgcgcggggagggctcttctctctccgagaagagagagaggcgcacacaaacaagaaagagcaccggagaggacccctcctccaccaccggagggagaggagaagagcgcgagtggtgtgtggggcgcacccgacggggtcggaggcgccctctagaagagggaagggacgaaaagacacagagagagagacaccgccgcgagggagagacacaacacgagagtctccgcgagagaggagtgtgagagagaggagggagtgagtacacaaaaataactcgcgtgtgtgtgagacgacacgaaggagatcacccccccccgcaacgcagtggtgtgggggtgggcgcaccaccaacacagtgagaaaagagagtggtagagagggcgcgagggagagaaagaataacacacacccccccgctgtggggaggtctcacacccaggctgcagtggagggagggagggaacaaaaaagaagcagggtgagaacatacgagtgggtgtgagagagacaccaccacaaacagtgtgac

SEQ ID NO: 655545 - DNA, 160 bp, Homo sapiens
tctagaggatctcgagaagagacagaagggcaaatcttgatctgatgggctgctccagaggatgactggctcgagatgtatccctgcccgtggagctttcccccagaggggcccggccaagtgcagtcggtggtcctgagatggaggagtcgggagcaca

SEQ ID NO: 655546 - DNA, 506 bp, Homo sapiens
ctggctcagctcccgaggtagctgggattacaggcgcccgccacacacctggataatttttgtgttttcagtagagacgggggtttggccatgttggccaggctggtctcaaactcctgatgtcagatccgcccttcttggcctcccaaagtgcttagattacaggcgtgagccaccatgcctggcctatatgtcttgatttttcattcctttcgtgccttttttttttttttttgggcagaatgtggacaagcatattttaaaattaatagggaagggcaagagaattaaaaaatcaaaactatctggaaaaagaagaccaaggtgggggtacttagtgcttccaatttcaaaatttaatacaaggttacaatattcaagactagctagtacggggttaaagatatctagatagatagcgggcggggcaggggggctcactcaaatattcccagcaattaaggagggggaggcggggggatcccgggggcccaggagttcgagac

SEQ ID NO: 655547 - DNA, 136 bp, Homo sapiens
agcctggagctggtggcggatgttcagtttgccttggggcttcccttctacccagcctatgatagtggcatgtttgctctggaggagaagagcctgtcgctgaaagtcatgcacgtacttttcccacttcatcaga

SEQ ID NO: 655548 - DNA, 179 bp, Homo sapiens
tagaggatccttatagacagagtgtgcaacagcacacgaagtaatacttggtgtggctagtcacactgaaaagagccatttagtaaatattctaaattaaaaactggctgggctcatccagaatctcatcaggactgggcagctcccgcgtggactatacgtggatatgtgggcacgga

SEQ ID NO: 655549 - DNA, 205 bp, Homo sapiens
tcgggcattctggactgtgctgagtgtctcaggctggccttctgggcggtgtctgtggtgatcgcagtcatgcagctggggccattgtccatgcagaagcacccgggcaaacttgctggctatatatccggcctgttcaccctggccagtctttgctacatgcttttgctgctgttgtcctctgcgtgaatagcttcatctggca

SEQ ID NO: 655550 - DNA, 771 bp, Homo sapiens
caaagccctgcgtccttcggcccccagagtcggatgaagcgcgcaaggcacctggtggcagcggctgacgtgcagctgcgacagcaacccctgctgggccgaaactgggcagagcggagcagacgtctgaagcagcgcgagtgacggcgctgatggtgtagcgccctgctgcccgggaagacccctcggtcgcgaaccggcagcccacgccccggtgtcccggttcccaaggccccgcctctagcggtcctgggtggactatgtctggattgagcatgctgcgccggcccgggccgcgaactcgccatattgcggagggcggtgtgccacctgcccaatccggatgcatgacagtgtgcgatggtcctggtaaggctggacggccaatctggcgtgcgtgttgcgacctgctgggtggcaggtctcgtgccaataaggtaggctcgagtgacatcttcgcgcaccaatcgggagtgcagggagcattcgtgcccgctcgcccttccggccagaccgcttatttaccatggggcgtgcaggcccgcttgccaatcagagcgcggctgagcggccccgcagtcaacccccgaggagcggcggctggcgtcgcgcgcccaggagttggggatgtctacaagcccatcgcccctgctcgcagcagccccctggctcagacccctgggccggctcgcggtcctaccgtgacggtcagtcaccctggtgctgcgggggcacgttcgaaaagacgctatttgaccggctgcgctacag

SEQ ID NO: 655551 - DNA, 912 bp, Homo sapiens
tttgcgtgccatggctggccttccttggggcgctcatgcggagcacttcggacctcagctgcggactgcccactggaagtggtctgtatccctccttctgtattcgtggtggccattcggcaccattgtgcagttgctggtgttgggcctttcccctttctctgtcgtccttgttcctgtctgctcgtactgcgcgttttggagtgtcgttgtcacggtcgttctgatttcccttcggggcgctctaggtttgtgtgctttggatgctgataccatgtcggccgcttccgacggacaacagttgctggttcgccgcgtcggtgcttctcaccggagcctggttgccccgcttcagtcctccctgctctgctggtcgtgatgcattctttgatttattttctggtgtcttatctgtgccttttgttcctatgttacacccagtggaacgcgtctggcgacgttcttgtcgtggggtgggccttgcctttttttctctgatctgtcattagctgcctcttctgctctgtttttgcgcaacgttgtggttgttcacctctacgcgtcgacataggatgctggtcgttttcggtgccctttgttttttcgagtcaatgacttatctgtactatttttgccacgattgttctgcgtctcctttttcgggtgttactctcgatatcaggtggccgtcgctctccccatggacggtgcagcagaaacatcacacgaaaatgaacaggataaaaataaaatagaacgattagcaagagaaattacagatcacgattacaaacatatagataatgatacaatactttattgtcatattaaatcaaaataaataagacaataaaaataattgaatatatactcatatggaaaataatataaataataaaaagaaaaaaataa

SEQ ID NO: 655552 - DNA, 199 bp, Homo sapiens
accaaagtaacagaacttatcccaggtaaaggtgactactcaaacccaggctgctcatataccaggcttattcttttaatagttcaccatatagatggttcaaagtgctgcttattggcaatgcaacttgaatatagatcttcaggaaacactcctaccctctattattccccaggttataaaacaacatcccgtttag

SEQ ID NO: 655553 - DNA, 236 bp, Homo sapiens
gataacatcgttgtgcgtggtcactcccgtgactgtgttgtaggtgaatgtgttatttcgtgtgtgtgtcgtggtttcagtgtcagaagggaaataaaagtgtaatggaggacagtgtaaaccctttgggtggagtttcgtaataacccagactattttcaagcaatctggtccacccaggattagtgaccaggtttccaggaaaggatttgcttctctctagaagatgtcttcag

SEQ ID NO: 655554 - DNA, 732 bp, Homo sapiens
  misc_feature (180)..(180): n is a, c, g, or t
gctgttggcttcttccgcgctggagtatccagataggcgacacgccggcggtgggctgaggcgggaatggtgcctgtactgcagcgcgtcgagggggtgtccaatcgagtcgtgcgtgtgttgggctgtaaccctgggtcccatgacctcttccaaggcgaccgaagcaactacatagtngggaccggacccaggagtaatccgtcattgacactggaggaacctagcaattccagaatacatcagcgtgtttaaagcaggctccttaactgaatttaacacagcaatccaggaaattggtagtgactcaactggaaccgagatccattctggaggcatacggagatatttgtgtaaaagcatcaataagtgacaatagctattgcattaagaaaaatcccaggggaattccttcagaagagaacgaacattatacgggaaatggaggaggcaaccaaatagtggtcactctggaaaagaattgggacgactgtgacttaaggacttgaagggaagacactactaagagtttatattatatccctgggcaaaaattgatgatcagcgtggggtctaactctgtaagaaagagggaaaaatgctatcatttttcgtgggagattggcagtcctatggggaagggaacaaacgggtagtttgaaagacctctatgattatatgaaggtgcttaaaaaggaggttattgaaaatccaaggtggcttattatatat

SEQ ID NO: 655555 - DNA, 178 bp, Homo sapiens
atagatcgagctcggcccgattcctaatacggtatagttttctaaggtactccataatgttttctgtagtgttgtaccagtttatatccccatgaacagtgcaggagggttcccttctctccacaccctctccagcatttcctatttgtgtctttactaatgatggccattctaactg

SEQ ID NO: 655556 - DNA, 289 bp, Homo sapiens
ccaaaaaaaaggaaaaaaaatagaaaaaaaaggagtaaaaggggcgggtttgtttttttaaaaactgtcttggaaacccatttaaaagggtggtctgttttgttttttaacgatttttaaaaaacgtctgggccccccctggtttagggtggaacctccaggcaggaaccggcttgcccccctttggccggtaagggctgcccaaaaaaacattacccgccctcggggggttgggcttagggggtcccggcccctggggtgagtttcatgtattaaaacataaaattta

SEQ ID NO: 655557 - DNA, 106 bp, Homo sapiens
cctttatcagctgagtaattacttgagagggataaagcgggaggaatgggtggccccgatgcctgggccggccatgctttacgggcttgtaggtgatggagaactc

SEQ ID NO: 655558 - DNA, 242 bp, Homo sapiens
agggaaagtactatgacccagcgatgggggcttcgacatgggctatgaggagctcatacgtggagtccgtaaagaggtatctttactataaaagctattgtgtaagctaatcatattaagttgctggctcaggacgtagatagtgcttgggcagtgagagtgagtcgtagaatgtttggtgagcctagggtgttgtgagtgtcaattagtgcgatgagtaggggaagggagcctactaagct

SEQ ID NO: 655559 - DNA, 188 bp, Homo sapiens
gtgttgcaagtgtaagcgacaaaaacctgtccccaatacataatttaaaaaatctaaatttcaaatcagcagagctagcctacttccatgttggctatatccacaatataagtgtgagctcttgaaatgcatacgtaatgtaggtagtctcccactgtggcaaaatgcgcaggactcccaattccctg

SEQ ID NO: 655560 - DNA, 496 bp, Homo sapiens
tgattcatccaaagagacgattcatgtgagagccagctttcaggccaagtattgatgggagacatctggctgattggccaacagcaggtagagaaggcaagcccagtgaaaacagcatgaggagagcatccaccttttgacattgcacacaagcaaggatgacaccatgaccatctttgaaagggcagagctggacttttgcataacattattcaggttaatgacaccttggtacacatcagtcaattaaataataaataaaatgtattgactcttagtcttcaataacacctctgagacttgttaataatacttgtggattgaagatatataaacaaaatcaatatttattgaaaaaatgttcaacgtttgagaacttagattaaccttgttaattgatcctataaagtgtcaaatttttgactgatttgtttacttacatgcttgtgaaattctttgggatggatattgcttcctaatacaatgtttgtagcac

SEQ ID NO: 655561 - DNA, 145 bp, Homo sapiens
acagcaaaaggtctgcatcgaacaactcacagcaactccatgctgtacatgtgctacttcattgttgtcttataagatgtagaagattttcagatcttggcaataaagtactgaagaggccaccctgttatccagtgtagaaatt

SEQ ID NO: 655562 - DNA, 188 bp, Homo sapiens
  misc_feature (7)..(7): n is a, c, g, or t
cgacaancatagaatggtggtgttgagctgattattaacaggtactggaatccaatatttatttggtaccttattccctttggtatttaggtttccttttacattctttttatatgcattctgacattattccatttgtattttaggtttccttttaacattctttttatatggcattctatgggggg

SEQ ID NO: 655563 - DNA, 949 bp, Homo sapiens
tgattcatccaaagagacgattcatgtgagagccagctttcaggccaagtattgatgggagacatctggctgattggccaacagcaggtagagaaggcaagcccagtgaaaacagcatgaggagagcatccaccttttgacattgcacacaagcaaggatgacaccatgaccatctttgaaagggcagagctggacttttgcataacattattcaggttaatgacaccttggtacacatcagtcaattaaataataaataaaatgtattgactcttagtcttcaataacacctctgagacttgttaataatacttgtggattgaagatatataaacaaaatcaatatttattgaaaaaatgttcaacgtttgagaacttagattaaccttgttaattgatcctataaagtgtcaaatttttgactgatttgtttacttacatgcttgtgaaattctttgggatggatattgcttcctaatacaatgtttgtagcaccaaaaacccaaaaaaaaaccaaacaaacaacacacccaacaccaaacccacacacaaccgcgccctcgggcctcaccggagggccgacgccgccccttccttaagagagggccgcacatgaaccccgctccccaacacccatttctcgccccagcggtgtgtggcccgcccctattcccccgacggcgaggaagcgccccaccccaccccgccacgacccaagaagaaatcaaactaacacgcacccccaaggcccccacccacgaatacgtgaactcgcgccttccacacatcgcccacacctaaacaatctgacaagatattactacaaacacgcggcaaacccccccgcctacataaatcatagagtcccccctacgacgacagccagtcgtaagtatcagagacctcagcaaacaagcgccccgtcgaacgcacctacacgaacgccaa

SEQ ID NO: 655564 - DNA, 140 bp, Homo sapiens
atgacaaggaagaaactaattctagaaaagaagatagtaagtatataaggtttaagtttacgtgtctatataatataatagaaaccagctatttttttctaccatataaaacatgcataacgtttgaaagcacatatgga

SEQ ID NO: 655565 - DNA, 452 bp, Homo sapiens
  misc_feature (39)..(40): n is a, c, g, or t
gggcggggccgttttggtcagccgggtttcgttttttanngcccctcgggtaagcaacccagtgaaaacagcatgaggagagcatccaccttttgacattgcacacaagcaaggatgacaccatgaccatctttgaaagggcagagctggacttttgcataacattattcaggttaatgacaccttggtacacatcagtcaattaaataataaataaaatgtattgactcttagtcttcaataacacctctgagacttgttaataatacttgtggattgaagatatataaacaaaatcaatatttattgaaaaaatgttcaacgtttgagaacttagattaaccttgttaattgatcctataaagtgtcaaatttttgactgatttgtttacttacatgcttgtgaaattctttgggatggatattgcttcctaatacaatgtttgtagcac

SEQ ID NO: 655566 - DNA, 1143 bp, Homo sapiens
  misc_feature (1143)..(1143): n is a, c, g, or t
ggactcttaagaagggacggggccccacgctgcgcacccgcgggtttgctatggcgatgagcatgcggacggcagatggtggcggcagtcccggagcaggaggattccgtgctgttccggcagcggatacaggccagaagctgatgattctgacattatagggcatgcatacaagcactgcatcaaaagccatcatgataaagctgtggcttccatttaagacatgctctaaagaatggtgacagtttgtgaaacttcgggtaaaccaaaaaccacacctaaaagacaacctgctacagaagaataaaaagccaacaagacgcactactgcagcttccttacaacagtggacacacgttggggaccaaatgtactgccatttgcgtcagaagacaggttgcatttacccagactaccattgcttcaattgatattaacgagagaaaccctgctgcttgctggctaacactgggactatggaccactacgaggacggacgccaaatctgatccgctctactttccccactctgtgacgataccctaatactatagacacagactgctcacagagacatgacgcatgaaaagccaagttttcaacaagcatgacacgtgagaactccaggaacatcctggaaataactcagactaacatcaagcacaaatccagatccatgcaacaccatacgtcctgccacgacacccacatgcaaggacacgacactggaaaccgagaaaagcccaggacatgaaacacaaagggaccacacccgcgcagccagcaaaccgaacgacaacccaataaaaacacgacacaagaagacacaaaaaaacaagaggaagcagagaagaaaacagagcacacaagataaaacactactcactacaacaacatacaaacatgaaagctacaataacaatcacgcatataagcagcacaacaaccacaatacaaacctcataccaaaggctcacaccccaaccagtaaatcccccatatcttagagaaaagtaatacatcaaacaaacaaaacatcagacacaacgaaacaattcctcatcaactaataactataacaacaaatcacactaacaaaacacaaatagtactacacactattactcttagaagtaactgagn

SEQ ID NO: 655567 - DNA, 125 bp, Homo sapiens
ccagtgctctatctcatgaggctgagcattatacgaaaatgacctctgctccttttcattgcagaaaattgccagtggcttatttcagcaacaacttccacttactttccactggcgctcgtagg

SEQ ID NO: 655568 - DNA, 1710 bp, Homo sapiens
  misc_feature (94)..(94): n is a, c, g, or t
  misc_feature (238)..(238): n is a, c, g, or t
  misc_feature (253)..(253): n is a, c, g, or t
gtgtgctaagatgagatgtgtgcagtccgccgtgctcgtgagcatgacagcgcctaagagattctcggccttgagtacgaggatcatccgagcnccaaaatcgcaggaccttgctcgcacgcttctggtgcgtataatcgtgcgcccagttctatatcgaagcgttggcgatctgcgcagaaagatgcacacatccgtcataatgtggcacgtgtctgtagtatgtggtcttcacgtngtcgatatttaatcngggattccatcgctagagcgctcgtggtcctcgcacggaagcgagtcgtatctacagacttgtctttaaggcttgtgcctcgacaacagtgctggatcctacgcagtaccatcatgcgaaatcacgagaggaagccagagcactgtatggacccgtgggccgtagacagaccggctgcttggcaagccgtgggtaccgtctctcacagcagaaagaggtagccacgctgctcccttctgaagcagtggagttaagcatccaggtcaacccacctttgccatgggagaaatgcaagtaaagagctcacgtcctggtgggtgaatttcggcacatcggaatgttggcgaatcctcctaattctgaaagacgttggggttagatcatttcctttggtcgcgtgggccccattgctcgattctgatcaatacactcgagagcgtgtacccccttttgactcgccaagtttattcacaagcgtggagaaattgtgtccataggaacctggtggaatccgttcctcacgatctcgaaccagggacaaaggaccccttaggccacctctatctttagatcaggcttcatcttctaaccaatcgaagggtgcgaccctcttctggggagatgtaagcgtaacaaagaggccggcctcttttgagggcgttaaaggcgccttcggcttagggaatacgcttaattcgaggggaacccagacttttgaccaaattggtccccggattacccgaattcgaagattccctggctccggtcagcttgggagggttggggccaaggctgtgtcccttggggtccccttaagggatcctaggggcgcctccgataatacagccccaaagctcccgaaacacgggcaaagaggcctaaacatgacaccttttgcccacctaaaaccctgggcgttttaacattgtggcacacctgcgtgggacgctttttccttgtgcacccttatcacaaattactctgtgctatgatagtcaccacacaatttttcgtttccactacacaatgatttcacagcatactattccaacaagaaacactaccccggcggcgacttattttcccgcggggcgcacagcagcctgatggccacacaacctaagcgcccgcgcactaaaacgacctcactctccccatcggctttgtgcacaacgatggacaaacactaacgcggctctcccacaaaaagcagcaggaggaaccacccaaacgacgggcgccacactatccaacacacaactccgcaccactcagcaacgatccattctgtacatgaccacaactcacacctactccaccacgactatattaccaagcacagactaacacaaacacgacacaaccacccaccatgttctttcctttacgcgcgcactgtatcgtcttaccatccgccccacagactacgcacctacctgacaccccacataacatgg

SEQ ID NO: 655569 - DNA, 106 bp, Homo sapiens
ctttaaatcatgagctgggtgtgggtggtgtctgtcatcattcatgttgtcctgtatcattaccagccatctgtgcttgttgcctcattagccaggttgtgagatg

SEQ ID NO: 655570 - DNA, 819 bp, Homo sapiens
gttctgggctacgcgggtggtggggggagcctagccaatacgcttccgcatgtagagcatgagcactacagtcaccgaggtggatagtccactgaggctaatgcatttacatggccccacagttgcactcgttataatgatagcagcaaccccttagattgatccattaacgacacatgatcgacggtgtgtgggagccctacattcaggaggcttggcatgacccatcactattgctgcttcgatgagcgcagtgccatagttcccggcccatagagacctcgtcaacctacactgagcaccactctatcagggttcaagatacatacaatgggctaccagattggacattcaagaacactgcaactgcgagagtccagatatgacgataacatgattaccttccccaactggcctgaagcctttgacttgtcctttcttgtgtgccaccctttcaggaacacatgttggctgttagaacaaatttaactatgactgatggtggaaggatcatgaaagctggttcttaagtaggccttttttttaatgagatcccttcatttgaatattaatggctttttacattaaagacttgtcggtcctggcgaccccgatgaatgtatgatgctagtatccatatcatacattcagagtgatggttaacttggcatatatctcctaaagtgatacacatatgattttcctggccgagtttttcataagcagaaacaggacatctttgctgtacacagtgcacctatgccaccacacagagatttacatgtgaccgatctcatgagactgatttctgccattttt

SEQ ID NO: 655571 - DNA, 130 bp, Homo sapiens
gtcattcattaacccctcccctccccacagtggaattcttgaacttcccccctcccctgggggagcacagtatagggtctgcggcggggggagaagaatacagagagacaacagggaccggcggcggccg

SEQ ID NO: 655572 - DNA, 399 bp, Homo sapiens
gactcgatcagacattatgacgcagagcttctgagagggtgtgcattggggcaatggtactgaatgtctacacagcagctggcaaatgaatagaccatatcctgtttaatctcactggttctggccttgcttgataattgatcagtagatcaagtgcccctgaaatgtcagcagagatgatcaggtccccctccctctgaattgcagcctgttcagtgcccagacgtacgcatgggatactgctctgtgctacaactgaaatatcaaacaattgctacattgttaatggaacattaagtgcattttcccagaccacttatttaaagtgcatttcccttctgtgggttcataatgaggctgtgtttgaggtctgtgttgaggcagacatgaggggaggtg

SEQ ID NO: 655573 - DNA, 273 bp, Homo sapiens
gacccaacggcagttaccggcgtacgaatggcgtttcgacgacgccaacccgccggtgcatgcctgggccagctggcgggtgtaccagcaggacaaggcgctgaacggcgtgggcgacatggattttctcgagcggatcttccacaagctgctgctgaatttttcctggtgggttaaccgtaaggacgccgagggccgcaacctgttccagggcgggttcctcgggttggacaacattgcgctgttcgatcgctcggctgatttgcgtcgacg

SEQ ID NO: 655574 - DNA, 536 bp, Homo sapiens
  misc_feature (390)..(390): n is a, c, g, or t
tacagcttcctagtgcggggattacaggtgtgagccacggcgcctagcttatttttaagagataagatctcactcggtggctcgggctgcagtgcaggggcgtggtcagctcactgcaatttcaaactccggtgctcaagcgattctgtcacctcagcctcttaaacagctggaactacaggcatgtgccaccaggtccggctaatttttaaattattctgcagagatgggggtctcgctacgtggttcaggcgggtcttgaactccgggcttcaagtgatcctcctacctgggcctcccaaagtgttgggattacgggcatgagccactaaaaagtattatcactttaataataaaactatcactgttttggagaactgtctggaaatngtggcatttacaatatctgtcaggtgggttttagacacgtgcaagtggtttttaagaaaagatttacatttatgtatggtttggtgactgtgaactctccttaaggctctggaagggccaggacaaggtgttataagctgacacat

SEQ ID NO: 655575 - DNA, 146 bp, Homo sapiens
gaataaaagattgaaataaaataaagacattctcaaatgaaggcaagctgaggaaattcataaccaaagaatctgctttaaaaaaatgttaacccagttcttcagcagagagttactggggcaattcaaactttgggattcagagg

SEQ ID NO: 655576 - DNA, 271 bp, Homo sapiens
  misc_feature (181)..(181): n is a, c, g, or t
ggagggtcctgtgtcaccgcgtgatgctaaaccctcagcatgtgcagctccattttggcaatgaagttcgccctgatcacatggcaatgaagcagatatggctcgcccgctggttcggcgagccggcccctttgcatgaacgaggcagtgtgaaagagaagaggaggtaggggccgagccnccaccccatcccactccccttccctccccagatatttatgtgaaatgaactgcagctttattttttgaaataaaaacttttaaaaagcaa

SEQ ID NO: 655577 - DNA, 889 bp, Homo sapiens
gaaagtgcaactgtcagaacacgattaagagtcatgcatgagtagtacccaaatgcctgtctgaaactgataggatgattggaattagtataaaatttacactataaggtatcaaatgtcaagttattagaccgagcatatgggaagaattgaactaaaattaactagcgtacagttttctctaatgaggtgactgtacatagatgggtatattgggaatttagaacgagaataatgctgtagtaatcgtggcccttatgttgaacaccatgaattcagcatgggcgtatttgctttgtgccaattacaaggaatgccaaaaggaggagcaggaacaaattgccgtccattttatgactgtaggttcgcgcgtttaccaccgtaatttgtgctacagaaacttttttggacccgttctaacgtgctagcgtcatgacatctgaagactgacaagtcagtgatgctttgattaatgatcggtgaatttacatgcacacagtgcggtaacatctaccatacagtagcaaagctgttgttattagatttaataaactctcactagcccattatgttcctaactggtaatttcgggggacttgaacagcaagcaaatactggtcaactgtccagcttgtgcggcacacacctccatgtgccattgttcaacacaagtctctacctcaaaattggggggtatattcacaacatccatatccatccccacgacgtctccgcccctccgccacgcgcctacttccatcattaacccccacactgcttaatccaatcagcacaacacctcccaacctcgaatatgcttcatccgactcgtcccaccactcccccaccacacacgctccgcatatctcacgcacagccccacacaact

SEQ ID NO: 655578 - DNA, 425 bp, Homo sapiens
gtcgactttatattttcacgtattttataacccttctattagatcgtaggccctgcggctgcctctcctcctctcccaggaaccaagcactgccagcccgcagttctctcaagcaggagtgtgccctctctgtgtgcctctctccttaaacttgtcattacacatttctctctgccctctgtccattcatatgaatatgaaacaatataaatattctcaatgtcctcctgccaaatctaaatagctaaatctctaatccgaggataaatgtcgatgatgctcactctgctgaactgtgtgcctgaaggccttttgtctccaatgttgaacttacaggtgtctagatatagtgtagtgtatccccagagttccctgaatgcacagtttctgctggagcatttgtttaatttttcgtcgacgcggcc

SEQ ID NO: 655579 - DNA, 316 bp, Homo sapiens
ggaagcccccgacctccttttggccgaaattgacctccccaaactggatggagccctggggctgtcgctggagatcggggaaaaccgcctggtgatggggggcccccagcagctgtatcatttaaacgcttatatcccgctgcagatcaactttcatgagagcaaggcagccttcccccggaagagaaagcaattaatggtggccatgccgcttctgccggtgcctttttgatcagggggtctccttgtgcttttgaaatgtggaaaaaaggctgctggctcccctaaaagttgaaataaaaaatttttgccttta

SEQ ID NO: 655580 - DNA, 413 bp, Homo sapiens
  misc_feature (15)..(15): n is a, c, g, or t
  misc_feature (53)..(53): n is a, c, g, or t
  misc_feature (100)..(100): n is a, c, g, or t
  misc_feature (230)..(230): n is a, c, g, or t
  misc_feature (296)..(296): n is a, c, g, or t
  misc_feature (371)..(371): n is a, c, g, or t
ttaaaagttccccanctttttaaaatatgccatatacatattattattgttgntttttatttttaggaactgaaaagaaaatggtgaattgctgccctanactgagaggagaaaattaataaatcttaaacttggtgccccaactattacggggtctggctctgtcacccaggctggaagtgcagtggcacgattatggctcattgcagcctcgacttctcggggccaancgatcctcctgcctcagccttctgagtagctgggaccacaggcgtgcaccaccatgcccacctaantttttatttcttgtagagatgaggtctcctgcctcagcctcccaaagtgctggaatttacaggtaggaccaccanacttggtccacttacttataataaacattgatttggtcgttc

SEQ ID NO: 655581 - DNA, 1625 bp, Homo sapiens
  misc_feature (1436)..(1436): n is a, c, g, or t
tccccacgggacccccacggccggggcctttacgggggggcccgggggggggtgcttcccgtcccacgggccccccattgtgtgactcttggacacgttccccggtacacgggtgccacgtgtgtcgtggacgtggccctccgcggtgtgtgagcggggggtggggacacacactggacacttgcgtacttccactgcgtggacacgcttggacgggaccgcggtgtgtggccgtggtctcacacagcgggtgactgtgcacccacccttgtgtgacacacacactcttctccagcgggtgtgagacgcgtggacacacacaccagctgcctctctcgcggctgtggtgctgcgggctcaccccacgtcggccgcgcgtcgcgtctctcttggtgcgtgtgtgtgtcacacacgcgcacgtgtgtggtgtgtgtgcgcgcgtactgcgccgcgtgtgttggcgcgtgtgtgcacacgcgcgcaccgggtgtgcgcacacgtgtgagcgcgggccaccgcggtgtgtgtgtgtggcgtgtgctttgtgtgcgccccgcgggtgttatcacggccacacacacacgccttctctctactcagcgggtgctcgcagggactcgcacaccctctgctctggctctcttcgcacacactctcagcacagcgggggcgaccttctctctcgcagcggggtgttgtgtgacacactactctcacgggggtgtgtgtgtgtggtgtggacgacacccaccgcaccacacacaccacagcgcacacaactgggaagctgtgtggagcgaactcaccaacgggagccgagaagcgtgatccccgccgcgagggcaacgccgggagcagaccaccccacaacagagttgtgggagtacaacacacacagcaacgggggggaggaacaacaacattaaccacacgcccgcaccaaccacaacactctgtggggagaccacagcaacgtacgcaaccacgacggggagtgccgcaaccaccaccggggggtgatgtggagtgaactaccgaggagcaccgacatcgttggtgaaaccaccaacaaccaacgaggtcgggacatacaaccaaacctactcggttgggagccagggcgaacacattgacacccacaacaagcacggggggagataattcaaaatcaacaaccataatcaagcagggggggggggggggggaggcacaaacaacaaacacaaacacacccactatccaccacaggatggagcgaagaacaccgacaatacacacaaccaacacccacaacacctcacacggaaaaacaaacagaagcgagccggggggggggagcgggtaccaaccacccaccagcaacacacacaacaaactacgtgcggagtagagacccacataggggcgaaaccacacattatagaggcgccactacngccacaacgaggagagcggcatcacacacattgggtgggcagcacacacgaaggaccccacaacacaagactcaacagcaataggtgaccaagagcagccacaaccatacggtggggggagaccaagaaggagacaacctcacaaacaccaaggaggggaggggcccccaacagagcaacatcccaaga

SEQ ID NO: 655582 - DNA, 140 bp, Homo sapiens
  misc_feature (123)..(123): n is a, c, g, or t
gtgagcgtctagtggtcacttacgggtaaggtatacggcctttctctcacatgaccttccggtgcgtccttcttcgggacacttctgggcctctgagccagcactctcatgcttctcttcccnttgggcaccttaaatcc

SEQ ID NO: 655583 - DNA, 874 bp, Homo sapiens
  misc_feature (52)..(52): n is a, c, g, or t
  misc_feature (62)..(62): n is a, c, g, or t
  misc_feature (65)..(65): n is a, c, g, or t
  misc_feature (78)..(78): n is a, c, g, or t
  misc_feature (83)..(83): n is a, c, g, or t
  misc_feature (87)..(88): n is a, c, g, or t
  misc_feature (96)..(96): n is a, c, g, or t
  misc_feature (102)..(102): n is a, c, g, or t
  misc_feature (149)..(149): n is a, c, g, or t
  misc_feature (202)..(202): n is a, c, g, or t
  misc_feature (204)..(204): n is a, c, g, or t
  misc_feature (208)..(208): n is a, c, g, or t
  misc_feature (214)..(215): n is a, c, g, or t
  misc_feature (220)..(220): n is a, c, g, or t
  misc_feature (224)..(228): n is a, c, g, or t
  misc_feature (231)..(231): n is a, c, g, or t
  misc_feature (240)..(241): n is a, c, g, or t
  misc_feature (272)..(273): n is a, c, g, or t
  misc_feature (289)..(289): n is a, c, g, or t
  misc_feature (291)..(291): n is a, c, g, or t
  misc_feature (294)..(294): n is a, c, g, or t
  misc_feature (298)..(298): n is a, c, g, or t
  misc_feature (304)..(304): n is a, c, g, or t
  misc_feature (311)..(311): n is a, c, g, or t
  misc_feature (324)..(324): n is a, c, g, or t
  misc_feature (328)..(328): n is a, c, g, or t
  misc_feature (342)..(342): n is a, c, g, or t
  misc_feature (346)..(346): n is a, c, g, or t
  misc_feature (361)..(361): n is a, c, g, or t
  misc_feature (369)..(369): n is a, c, g, or t
  misc_feature (379)..(379): n is a, c, g, or t
  misc_feature (384)..(384): n is a, c, g, or t
  misc_feature (387)..(387): n is a, c, g, or t
  misc_feature (401)..(401): n is a, c, g, or t
  misc_feature (403)..(403): n is a, c, g, or t
  misc_feature (409)..(409): n is a, c, g, or t
  misc_feature (411)..(411): n is a, c, g, or t
  misc_feature (418)..(418): n is a, c, g, or t
  misc_feature (423)..(423): n is a, c, g, or t
  misc_feature (433)..(433): n is a, c, g, or t
  misc_feature (439)..(439): n is a, c, g, or t
  misc_feature (443)..(443): n is a, c, g, or t
  misc_feature (447)..(447): n is a, c, g, or t
  misc_feature (450)..(450): n is a, c, g, or t
  misc_feature (466)..(466): n is a, c, g, or t
  misc_feature (481)..(481): n is a, c, g, or t
  misc_feature (529)..(529): n is a, c, g, or t
  misc_feature (545)..(545): n is a, c, g, or t
  misc_feature (562)..(562): n is a, c, g, or t
  misc_feature (564)..(564): n is a, c, g, or t
  misc_feature (566)..(567): n is a, c, g, or t
  misc_feature (577)..(577): n is a, c, g, or t
  misc_feature (590)..(590): n is a, c, g, or t
  misc_feature (617)..(617): n is a, c, g, or t
  misc_feature (625)..(626): n is a, c, g, or t
  misc_feature (631)..(632): n is a, c, g, or t
  misc_feature (651)..(651): n is a, c, g, or t
  misc_feature (653)..(653): n is a, c, g, or t
  misc_feature (659)..(659): n is a, c, g, or t
  misc_feature (663)..(663): n is a, c, g, or t
  misc_feature (671)..(671): n is a, c, g, or t
  misc_feature (675)..(675): n is a, c, g, or t
  misc_feature (681)..(681): n is a, c, g, or t
  misc_feature (688)..(688): n is a, c, g, or t
  misc_feature (703)..(703): n is a, c, g, or t
  misc_feature (707)..(707): n is a, c, g, or t
  misc_feature (710)..(711): n is a, c, g, or t
  misc_feature (714)..(714): n is a, c, g, or t
  misc_feature (716)..(716): n is a, c, g, or t
  misc_feature (735)..(735): n is a, c, g, or t
  misc_feature (740)..(741): n is a, c, g, or t
  misc_feature (744)..(744): n is a, c, g, or t
  misc_feature (763)..(763): n is a, c, g, or t
  misc_feature (769)..(769): n is a, c, g, or t
  misc_feature (772)..(772): n is a, c, g, or t
  misc_feature (789)..(789): n is a, c, g, or t
  misc_feature (861)..(861): n is a, c, g, or t
tattcatccaaaacaaatctttaaaggactcaaattagatataaattatgtncacctctganctngttataaatcatntttancatnnaaacactnaaactnaagctttcttctccttataggttgccatcattttcttgatctctgcnatagctttccctggattcagacccttaggacaggtccttgtgcagtgcatgangnggtngcagcnntatanacannnnnccncctgcagcnnggccaggcgctcctctgtgaagtcatctctnnagtcaatcatccagcnanacncctncataanaactgcnggccccagatatntgtntccgttccaccagnagcnggggcagctggtgtnacagcagncatagagaangcacnagnagagcccgtacagntncgcacncncttctanggacngtagagacgnctgctngccntccnganaggcagccttcggcgncaaagaaggcgcatnggagttgtacgggtcagagtagggccgcaaagcgttattaagatccgntatcacagacaggtgngggagaggggagagggngnanntcgtaggcangggggggggaagncggcgggggcaatcgagatgggggccnccatttanngtcannccacaacacccacacaggncngcgcgncagnagcggcgnaagngcaaangagatgnaacggcaggcggaancggnagnnaancngccaagaccatctccccanagggnnganctcgcaacggcagaactcnccagantancgggcgcgccacccggngcgctctgccagccagacagcccaaatggcggcatacccccaccgcgcccgtcaccgcgcgccccgccgccncaccccgccaccc

SEQ ID NO: 655584 - DNA, 716 bp, Homo sapiens
ggcatccagaataaaaatcctgacagataaagaagaagcagagagaaaatacaacgccagtatgcggaggcatatagaagtgctgtcggatgctaagtaaacgggcacatctgatgtacatatagtattgagctagacgaaaggattcaaatcggtgtgcaaggatgggatgcgtggaagtccatttagacaagtccatcttgatttaggctggcacagttcgcttaacccatgatgatgtcattcagaggagatcaaggcggtaggaagggactccaatgtgtcatttgactttctttgaaggaccctttgtagaggacattcatctgggaatcgaaggggtccccgtaggtaagccgtaagcccgtagggacggggtcgctttcttctactgcgcttcagtggattctccgtcttttgtggaacgtggaattttcttctatttgatacaggatgtgtacttcatttgggtcactaggtcacgggggcctcatcttcattgcctcttcacacgtgcattaggtggatagtggccatgggccaacttgcgaagatcgatatcaagcttcaacttaacaatgggttaatggccagaaaaaatcactactaagagagaattgtcgaggaacgggtcaagaaagagtagaaagttgaagaagatgggcagattgaagtccttaacaataaatggcaaggagcaggtgctgcggcttgga

SEQ ID NO: 655585 - DNA, 476 bp, Homo sapiens
ctcacacctataatcccaacactttggcagaccaaggcagtaggatcacttgaggccaggagtttaagaccagcctggacaacacagcaaaacctagtctttacaaaagaataaaaaagttagctgggtggggtggcatgtgcctgtagtcccagctacttgagaggctaaggtgggaggatgccttgagcacaggaggtcaaggctgcagtgagccatgatcgcaccactgcactccagcctggccagcagagtgagaccctgtctcaaaaacaagcaaaaactggctgggcgcggtggctcacacctgttatcccagcactttgggaggccgaggcggacggatcatgaggtcaggagatcgagactatcctggctaacacagtaaccccgtctctactatccactatatgcctggcgtggcgacaggagcctgtagtcccagcttctccggtggctcaggcaggtgattgtcg

SEQ ID NO: 655586 - DNA, 175 bp, Homo sapiens
cccgttccgatgcccatggacatgtgtgtgtgtggtggccttgagtatgtgctttctctgtgtaacagtcgcgccatcattgttatatggttagtgtgttggtctagtaagcctagtatgaggagcgttatggagtggaatttaaatcacatgccatggagccatcgggacgggg

SEQ ID NO: 655587 - DNA, 110 bp, Homo sapiens
caagttattaccatgtattttgtgaggcaggtttacaacactacaaggtctttgagttaagaaaggacaagagggaaacaggaaaaaacaaccattacccaggttttaaa

SEQ ID NO: 655588 - DNA, 109 bp, Homo sapiens
tagacatgtcatcagcataagataagtatgctggcgggtaggcccggaacccggagcgcggtcgggggaactgggcactgaatcatcggacaacctcgacagagcccgc

SEQ ID NO: 655589 - DNA, 169 bp, Homo sapiens
ccgcggagtcaacgtgagcctcacgctctccaacacgggcgcggtgcccggcacgatcaacgcgatcgaggcgacgttcaacacctacgacaacggctggacgccggaagaggtcgcgcaggcgttccagaagctcgccgcgaagcacccggagtcgcacccgcaccat

SEQ ID NO: 655590 - DNA, 136 bp, Homo sapiens
tctagaggatccctctaaacgtatcagaacttataggtctagaggtaaatgggattcatgaggggcagaggtcaaaggtgaagcagaagtcagtggtgaaggaaggtctgcaaagttaaaggtgcggtttccagag

SEQ ID NO: 655591 - DNA, 179 bp, Homo sapiens
ttgtctatgcagcatacatacagagactgggctcttaccacttccgtatcacaaaagaccatcacacgattctaccaatgcctgtcgcatctgtaattcacgaacctggtcaaccaacacatcatgttcacttcgaacccccatttcatttcaaattcaacagaaaaacacaccttttc

SEQ ID NO: 655592 - DNA, 412 bp, Homo sapiens
ctacagcagctatccaatggcctgtataccatggacgttgctatctatgtctctaacctcacctcctgagtagctggtattacatggcacgcaccaccacatctggctaatttttgtatttttagtagagacagggtttcgccatgttggtctcgaactcctgacctcaggtgatccacccaccttggcctcccaaagtgctgggattacaggcgtgagcaattgcgcccagcctcatctcgttgtattcttaagaggtaatcttatatttgaggtttgcatttactagaattttatatatgtggaagcattgagtaggtactcttttttttcctggattgtactcagcattatgttgggatttacttgtgtgtcagctgttcatacttttttcttacgtgagtagtaatgg

SEQ ID NO: 655593 - DNA, 280 bp, Homo sapiens
gtctctctgatccacttctgccatatccactgtgtcgctcatgcctctttccctgtttttaccatgtctttgctgttgtgaatagtgctgtaatgaacattcacatgcatgtgtcttatggtagaatgatttatctccctctgggtatatacccagtaataggattgttgaagtgatggtagttctgcttttagctctttgaggaattgccatactgctttccgcaatggttgaactaatttatactcccaccagcagtgtataaatgttccttttctcc

SEQ ID NO: 655594 - DNA, 135 bp, Homo sapiens
gtatgacgtggaagagagacacttacctttccaccgataacttttgaatttcatttttattaaagtattaacatagtttatggtgtcaaatctaacaaattggcaagctgtttctgtagatgggtaagtaatcaa

SEQ ID NO: 655595 - DNA, 1047 bp, Homo sapiens
gccggccttcctcggctccggcgctccggtcgcggggccctgggttcctcggcacacctccggtccatgccgtcccctagagcctgtccccagtcctcttctggaagtccccgggcgccacgcccgtgtgccctcgagctggtgagcgtatgaccggtatgctgcagctcgtgcactgcatacctgcagaagactagctgggagaactcgaactaaaagatccagctggaaacggcttaatctcgcgaggttcttaatagcatgactaattgatctactacacgatgaggaaagtccggttcattactcttgggcgcactcctagcatagcacctatgtagtgcaagcggtggggatagttcctttcacacggccatccaatcgtgtacggtatatccctcagagaacggcatttgatttccgctcttcccggaccctttctctataacacctgaaataagtttcaagttaacaagtacatagatcttgggtcacacctaagaactgcgctgggactaaacataagaatggaggttgcaatatggttggttgacaacttttctaccctaactttcccgtttccactttgcaagagcccgtgagggcgtggccacagtcaatttacaggcgtaacttggggttataatattggccacacaacaggctccaaagcgaaagtgagcaaaactggactgtgaggagataccccaacgttataattcgcccaaaccgacctgggcctgtgagtttaacaacgaccccacaatttcgcagagttttggaaatttatatacacgcttagggctttcccacaatttcctaattacacggtttgacattatgtgccccttgggggaggcgccccagaggagaaaaaacgccgcccatattaaacagggtcgcgcgtcggcgacaggggaagaccctttcccagaagcgagcccgttggggcccttaaaaatagaggttgagcattatcgagggaaattgtgtgggtaccagtaggtgtcgccggacaaacagagaaggcgagaaaaacactctgga

SEQ ID NO: 655596 - DNA, 370 bp, Homo sapiens
cttgcattcactcatgctagtgttcgataaaccagaaacggaactgtggggtcaaagagacttctggagaaaaatttgtcagtggctgccgtcctgcctctccccccagcaccatgtgagggccatctatgcccaaactcatggcaatcaggactctgaatcttggggatatttgccaaggggggtggatgaaagatattctctctgtgatttccttttgtactttttttttttaagggacattttaataatacatttaagagcctctttctgtgtcccttcttgctggtagcctctggccaatgccctggtggtcactagccagttctgatcatttgcaagagctccagatagtccagggaaatgaggc

SEQ ID NO: 655597 - DNA, 1143 bp, Homo sapiens
  misc_feature (376)..(376): n is a, c, g, or t
  misc_feature (532)..(532): n is a, c, g, or t
  misc_feature (882)..(882): n is a, c, g, or t
  misc_feature (1024)..(1024): n is a, c, g, or t
  misc_feature (1143)..(1143): n is a, c, g, or t
tgggttagagcacagggtacttatattggatgggtcctatgacaaggtgcgggttccctaggcccctcccctcttacaaggggtctacttggcaatctgtaaggaggggaaatccagtgttgggtggggggactgatgtgtgtgggcagggactccccagcagtgaggtgtctctctcttcctctggtgctctggctgggggctggttgttgggtccagggggtctaaactctcttggaggccatggtggcgccatgatgtgtccaccaccctgttggctggtacgccaacattgcggttggtccattaccccagggagaaatgagccgtcttagaccacaaattgtggtgtcctgttgagacggcgcaattggcncatggcccccagggctgtcaaaagtgtgtggagaagagactgtgggtgttgtaccgctgtgtgtgagaaaggtccaagatgagaagaccccaccgtgggttgctctcccagtgtttgttagcccccagagatattgccctctttgagaggtgtgtngcccctctccgcgaagacgctctctagatcttttacacgacacctctttctctgtgagattggtaactatacaatatattgggggcacgaggtgtttttttctctaagacagcgtgccaagggtacaagtgtccacacacccattgtgaaccatgctgttgggcgacaactgtgggggggagaaccaccggggagacagtgggccccatttcgcccaaaggtgagaacgtctactcccccgtgggtacaaccaaggtcatacaaggggggatttagcaacccttttttgggcgcccaacaccagggcccttttgggtcgacactcgcgcgctccatatgattaatacacntgccgcacgggggagaattcagaattgttgtcgcctgggagaaaaaaatgccccctcgagcatggggccacattaccaacggcgccacaaccaaatgtttttccccccgggagaagggggcggcgcatattcccaacaaggngttcatcatcacttaggggtgtttgggggcaatcagttagaattttggagcacatttggagcactggtgtgggcgcaccaaagagaatggtccctttcccccaagaggaatataaccan

SEQ ID NO: 655598 - DNA, 132 bp, Homo sapiens
agctctttttctgttttccctggcccatttcgttttgggaaaaaaatttgtccggtattgggatggtaaagacctttttgccctccgaccgtttacagaaattaatgttttttttgtttttcagaaaaaaaa

SEQ ID NO: 655599 - DNA, 141 bp, Homo sapiens
gtaccgcctccccggtttcatcccgagtcgtcggccgactatcgagcgaacccggaggacgtcgtcaactggtcaagctgcttaacgacgtcaggaaagtcgccatctttgccggcgcgggtgtcgagggcgctcacgatg

SEQ ID NO: 655600 - DNA, 151 bp, Homo sapiens
gactcatagacgatccccgataaaaagacatccggatacatggttgtcgagctatatatcattgagtttcctaggttatcgtgatgagcacaccaattttacagtatgaagcccatatatatcacagccatttaggtaacagccatttagg

SEQ ID NO: 655601 - DNA, 228 bp, Homo sapiens
ttactctctatctatgagataaccatgtgatagacagatatagacctcttactctttgcacaatgacatagattgaagagaatatatggatataatagatgacccttttcggtacaatggtactgtaactagagattgcattgaggtgtttctagtgggtaatgtaacatgtaattacagttaagtgtgaaaccttggaagacatttaggtttaatgtggttcataaa

SEQ ID NO: 655602 - DNA, 251 bp, Homo sapiens
tcaaaaacacacaggattggtctcctattgatcattctgctgccagtgatacttgtcctatactggagatttcacttacatactgctgacattctacaaatgttaacttgaacacaaatcagctacatatcattagattttaaatctcactgcaagctgtactacttatgcatctccatcagcataatctgaggcagtccaaactaaagcattatttgaaacatatcagggcttaaattccattgtaatag

SEQ ID NO: 655603 - DNA, 949 bp, Homo sapiens
  misc_feature (934)..(934): n is a, c, g, or t
agcgggcggacgccgagcggccagatcaggtacgcggggcgggccctgcgtccgcccctcccgccgaggctgagcctgagacccggggcggatcgactgacgccggggccgggatggcgacgcctcggccctgcgcggacgggccctgctgctcgcatcccagcgcggtgctcggcgtacagcagacgctggaggagatggacttcgagaggggaatctggtcggcagccctgaatggagacctgggccgagtgaagcatttaatccagaaggccgaggacccaagtcagcccgactcggccggctacactgcgctgcactatgccagccgcaatgggcactacgctgtgtgccagttcctgctggaaagcggagctaagtgtgatgcccagacccacgggggtgccactgctctgcaccgagccagctactgcgggcacactgaaatcgcgcggctcctgctatcacatgggtccaaccccagggtggtggatgacgacggcatgaccagtctgcataaggctgctgagaggggtcacggggacagcagggaactgaggccagaccacccaggaagagccccagtctggtcactgtggaagcgagggagtagatttggtgtggctaaaagtgtttaagactggacagatgatcatattctaaattagttcatatgagacatctatttatttggaaaaaaataaagttatatccttacctcatcccacacccaaagataaattgcaagattaaagatctaaatataaaaacacaaaactatgtaagtattagaagaaagtagggactatgtgagaagctgctttctagctgaatgcccttggtaaaagtcactttagctgtctgcccctccatttcctcttctgtaatgagagtggttatcatagggcccgcctcagagtcattgtgggaggangtcagtgtgcactgg

SEQ ID NO: 655604 - DNA, 354 bp, Homo sapiens
tgctcgtcacctctgtttccaccgccgacacactgcacacctacatcccttggacccaaaacccactgctgctgctggtgtggacttctagcgtatgggcaatgccagagaacactccttagagtggcttgaattcccctgcctgttcctcataaaatcagcaacaactggagccaaggaccaccttccctcaagaaacaaaaacaaaggcaacaataaaaactgcgctctaggtaaaacaggcagttaccactcccaagggatttgtgggctgtctataaagcagaagaaagtgtcacttcctccaccttcaggaggaacactgtccaagtaggaccagccatgcaggtcagg

SEQ ID NO: 655605 - DNA, 232 bp, Homo sapiens
taagagaagatcttgctctctttcttactcaggctggagtgcagtggtatgatcacaactcactgcagcttcaacctcctgggctagagtgaccctcctgctcaccactacacctggctaattttttttttggtagagacagggtttccctatgttgcccaggttggtcttcctactcctaggctcaagtgctccttctgtctagcctcccaaagtgctgggattacaggtg

SEQ ID NO: 655606 - DNA, 940 bp, Homo sapiens
  misc_feature (925)..(925): n is a, c, g, or t
agcgggcggacgccgagcggccagatcaggtacgcggggcgggccctgcgtccgcccctcccgccgaggctgagcctgagacccggggcggatcgactgacgccggggccgggatggcgacgcctcggccctgcgcggacgggccctgctgctcgcatcccagcgcggtgctcggcgtacagcagacgctggaggagatggacttcgagaggggaatctggtcggcagccctgaatggagacctgggccgagtgaagcatttaatccagaaggccgaggacccaagtcagcccgactcggccggctacactgcgctgcactatgccagccgcaatgggcactacgctgtgtgccagttcctgctggaaagcggagctaagtgtgatgcccagacccacgggggtgccactgctctgcaccgagccagctactgcgggcacactgaaatcgcgcggctcctgctatcacatgggtccaaccccagggtggtggatgacgacggcatgaccagtctgcataaggctgctgagaggggtcacggggacatctgctccctcctcctgcaacacagcccagtctggtcactgtggaagcgagggagtagatttggtgtggctaaaagtgtttaagactggacagatgatcatattctaaattagttcatatgagacatctatttatttggaaaaaaataaagttatatccttacctcatcccacacccaaagataaattgcaagattaaagatctaaatataaaaacacaaaactatgtaagtattagaagaaagtagggactatgtgagaagctgctttctagctgaatgcccttggtaaaagtcactttagctgtctgcccctccatttcctcttctgtaatgagagtggttatcatagggcccgcctcagagtcattgtgggaggangtcagtgtgcactgg

SEQ ID NO: 655607 - DNA, 186 bp, Homo sapiens
  misc_feature (59)..(59): n is a, c, g, or t
tttattacgagcatattctttaagaaaaaaaaaggctggataatatcctctgtactatnccagtcctttacaagccaaatacttgtgtcactgtttctagtatttccaagaagcattatgtaacgttgtcccctgtgccctacatagtataataattggttaagatagctaaatgataaggccaac

SEQ ID NO: 655608 - DNA, 306 bp, Homo sapiens
tgaatatggttgaacacggtggcatcatactgctcagccatctctggggttaactgcagatgagataattcctgtataactcctggatcctctagggcattctgccactgtatccacacttcatggtacaagggcgaatggacagatctccagcttccaagtgaaacgtgaaggcgactcgacaaggatttctgttaggacaatagttttgcttcatgaagaccaggaaggcttgaactcaggacaatgggtatcttgaatttactcagttcccatctcttaagttattaaacattatttcccaaa

SEQ ID NO: 655609 - DNA, 248 bp, Homo sapiens
cctgtcatctttcatcattcttcagtcttgtgtcaatcagttgcaacatggggttctcttccaattcctgcctgcaggtggtcatttcagccatgtcagggggctcatattttatcctattcattatccaacagttcagttgtggcatcagcacatccaggcatcatacccattggcacagcagggtcaacgcagccataccaccattgtggcaagacccagccatgtgcacatccagcagcagcagg

SEQ ID NO: 655610 - DNA, 194 bp, Homo sapiens
tggggagggagatacccccaatgtgtagcaagatctgtgagcctggtacagcccgacctacaaacaggacaagcactacggatacaattccatacagcgtctccatatagcgatgaaggactatcatggccagagatctacacaaaacggccccgtgcaagggagctttctcgtgtgtattcgagacttcctgc

SEQ ID NO: 655611 - DNA, 201 bp, Homo sapiens
  misc_feature (47)..(47): n is a, c, g, or t
  misc_feature (50)..(50): n is a, c, g, or t
gcagaatatcgaaatcattggtcagatgttatagcaggctctctggntgngcatatctatagcagtattctctggttgtgtgcgtcgtgaataatttcacagagagacacgcagaaaatgagcatatacacatagataatctcgcacagatgacactgcatcagcattcctcgtagtagtagagttcctctgtaaaagtaa

SEQ ID NO: 655612 - DNA, 137 bp, Homo sapiens
aagcaatatgaaatgatctgctgcagtgctctgagccctaggattcatctttcttttgtgtgatggtaatgagataatttctgcattacagattttcaggagactctttgtttaaatgaaactgggtaccgagctcg

SEQ ID NO: 655613 - DNA, 158 bp, Homo sapiens
caatatcaggtaatctgagtacctgttagagattattgaggctatggggggcaagaggcatgggatcagtctcatggtttattatgattcaaataatagctgtttctgaatgcagttgccaaatgcctaaaattttctgactggactgattctcactc

SEQ ID NO: 655614 - DNA, 132 bp, Homo sapiens
taccttcctctcctcccacctcagggaagaagagaataagaggagacaggacataagaaggtttagggagcctgcataacagctggctggaagaaagggtgggcttgaaatgtggaggtgggaggagaggaa

SEQ ID NO: 655615 - DNA, 162 bp, Homo sapiens
tgtctgttggcaacagaggacgatacatttgttgtggaatctctgtagctcccatcacaaattggttgtactatggtgagaaaaccattttaaatattttagcctgtagaaatagtagttttgtgatgtattgaacattttgtgatgcattgagtatgtgat

SEQ ID NO: 655616 - DNA, 502 bp, Homo sapiens
  misc_feature (47)..(47): n is a, c, g, or t
caagccaggtgggcaacatggcaaaatcctatctctactcaagaatncaaaaattacccaggcatggtacttgcacaactgtagtcccagctacttgagaagctgaggaaggagaatctcttgaacctggcaggtggaggttgcagtgagctgagatcatgccactacactccagcctgggtgacagagtgaaattctatctcaaaaaaaaaaaaaaaaaagaggccaggtatggtggctcatgcctgtaatcccagcattttgggaggccaaagcaggtggatcacttgaggtcaggagctcgagaccagcctggccaacatggtgaaaccctgtctctactaaaagtacaaaaatcagccaagcgtggtggtgcatgcctgcagtcccagctactcgggaggctgaggcaggagaatggcatgaacacaggaggtaaaggttgcagtgagccgagatcacaccactgcactccagcctgggcgacagtgcgagactctgt

SEQ ID NO: 655617 - DNA, 319 bp, Homo sapiens
tctctattatcgacgggaggtacaattaaaaccacagtgagggctgggcacagtggcgtgtgcctgtaatcccagcactttgggtggccgaggcgggcagatcacaagatcaggagttcgataccagcctggccaatatggtgaaactctatctctactaaaaatacaaaaattagacaggcttggtggtcccagcctgtagtcccagctactcgggaggctgaggcaggagaatggcacgaacccagaagccagagcttgcagtgagccgagatcgcgccactgcactccagcctgggcgacagagtgagactccggc

SEQ ID NO: 655618 - DNA, 312 bp, Homo sapiens
agtagaatattcttcagtttagccttcctacctctatcagtctgataacagaccagcctttattagtcaaatcagccaagcagtttttcaagctcttagtattcagtgaaacctttatatcctttacggtcctccgtcttcaagaaaagtagaacggactaaaggtcttttaaaaacacacctcaccaagctcagccaccaacttaaaaaggactggacaatacttttatcactttcgcttcccagaattcaggcctgtcctcagaatgctacaaggtacagcccatttaagctcctgtatagacagacgct

SEQ ID NO: 655619 - DNA, 120 bp, Homo sapiens
tcactcgccagtaggacgaacaggtcaagaagcttggcagcaaagttggccaggtacatagcggacgggggtcccgtaggtggaagacctattgccctccaagaagcacaccgtggagta

SEQ ID NO: 655620 - DNA, 361 bp, Homo sapiens
  misc_feature (106)..(106): n is a, c, g, or t
  misc_feature (116)..(116): n is a, c, g, or t
  misc_feature (134)..(134): n is a, c, g, or t
  misc_feature (137)..(137): n is a, c, g, or t
  misc_feature (140)..(140): n is a, c, g, or t
  misc_feature (155)..(155): n is a, c, g, or t
  misc_feature (161)..(161): n is a, c, g, or t
  misc_feature (182)..(182): n is a, c, g, or t
  misc_feature (243)..(243): n is a, c, g, or t
  misc_feature (262)..(262): n is a, c, g, or t
  misc_feature (274)..(274): n is a, c, g, or t
  misc_feature (281)..(281): n is a, c, g, or t
  misc_feature (291)..(291): n is a, c, g, or t
  misc_feature (293)..(293): n is a, c, g, or t
  misc_feature (301)..(301): n is a, c, g, or t
cccgcgtggacggatgacagtgtccaatgtctccgtgccaggcctctgtctccagaatgcacgcggccttcgggggaacctttcagaaggtgtatgattttctctncacgttgatnacctcagggatgcgcttnctnctnaaccagcagatctgncctgtnctctaccacgcagggacgggnctgctcaactccctcctggacaccgtgcctgtgcgcagttctgtggacgagcttgttggcnttgactattccctcatganggatcctgtggntttcacnagcaactggncntggacttncggggggccttcttttccctgactgagagggactggagccttcccaaccgggcagtggag

SEQ ID NO: 655621 - DNA, 292 bp, Homo sapiens
  misc_feature (56)..(56): n is a, c, g, or t
tttattgagagataattattgtccatctttaatttcctttcatgtgaaattcagangtaacatgtgtccactttaggtaacatttatatataagcggtctattagagatataaggtcgtctgacttttacactatttccaccttaggattcttttagataaagcagatgtgccttacggttcaaacacaatctgatgtacaagatcttatttagttcttagcaaataaatacagacacaaatgatgaaatgatggactattaatacctaagccaccgtaaagtttcaaaacc

SEQ ID NO: 655622 - DNA, 567 bp, Homo sapiens
ccagaaggtaactcacacaaatgacgggcggatcggatgataaggatgggggctgtggtgaacaatgtatcagttccacaaaggctctgtctgactgtggagaccatgtgaacggtacttgggagagatgagtgcagagaggagggctgcagggtgatgtaaccccaaaatgaaaggcggtagaagttagcaaaacccaggaaacgtttcaactggacgtaggttgaggccaatccaccgctgctttcaccaggatccatctggacatttccctcagcgatgatatatcccagaaaggagattgtagagcggtggaacttacacttctcggctttcacgaaagttggttctcgaggaggtgctgaaggacctgtctgacatgaagaacgtgttcttgggcagaccgggaaaaaaatcaggatgtcgtcaaggtagattaacacaaaacggttgagcatgtcccggagcacatcgtttacctggaagacggtatccgaaccaggtggtaggtctagcttggaaaaaatggtgaccctctggagaggttcacaagctgaggagagagtg

SEQ ID NO: 655623 - DNA, 390 bp, Homo sapiens
tgctttatttttctcgtttaggtcacagaatttttcaaagagtatgcccacagttttgtgtccttccccaccccactcccagaatcctagattaaaatctgtacaaatggccgggcgcggtggctcatgcctataatcccagcactttgggaggccgaggcgggcagatcacgaggtcaggagatcgagaccatcctggctaacacggtgaaaccccgtctctactaaaaatacaaaaaattagccgggcgtggtggcgggcgcctgtagtcccagctactcgggaggctgaggcaggagaatggtgtgaacccgggaggcgtagcttgcagtgagccaagattgcgccactgcactccagcctgggtgacagagtgagactccgtctca

SEQ ID NO: 655624 - DNA, 593 bp, Homo sapiens
  misc_feature (418)..(418): n is a, c, g, or t
  misc_feature (458)..(458): n is a, c, g, or t
ggatggcacatgcatcgcaagtgggtgtgcggggcgctacttcccctatcatagaagagcttatcacctttcatgatcacgccctgataatcatgtgccttatctacttcctagtcctgtatgcccttttcctaacactcacaacaactatcctgcccgggagcatcctagagcttatcgcccttccatccctactcatcctttacataacagaccaggtcaacagtccctaccttaccatgaaatgaattggccaccaatgacactgaacctacgagtacaccgactacgggggactaatcttcaacctctacatacttcccccattattcctagaaccaggcgacctgcaactcctggacgtttacactcgagtagtacttccaattgaagcccccattcgaataataattacatnacaagccgccctgcacttatgagcaatccccacattaggnttaaacccaatgcttttcccgtccgcctaaccaaatctttttaaccttaaacgcacggcgctaccatcggtccctgcccttaattttttggcaatccaaatttatgcaatattttttattaactcccctaaattt

SEQ ID NO: 655625 - DNA, 551 bp, Homo sapiens
  misc_feature (292)..(292): n is a, c, g, or t
gcgccgccgggagaggcgagcgcgaggcagagagcgcgattcggctccaaactccggcgctgcagccgatcggactctgggccgcggtgggcaccgcgcgcagctagggagccgagaaccgcggcgagccccgaggacgcccagagcgcgagggtcgctgcgcctcgcagagccggagccgagtctgagcctgggcgccctgtggctgcctggcctgcggcggcatggtgggctgcccccgctggctctccgcgctgcccgccacctgcctcggccagtggcctggaggcanggagcgcgtctgagcccatggcgaggggaccctgcctgtcacgcctccaccccagaagagcaaccagcacgaaagccggacaggcatggtagtcccaggagcagacaatgagggataccagagcacaagagcacttcacggcgatatgagagtattgccatcgcaagcatcgacaagaggataccatggaaacttaggacgcagagcatacctttgacagagcaaaaaattgaggcattatcagcgcaatgtaggttgg

SEQ ID NO: 655626 - DNA, 440 bp, Homo sapiens
  misc_feature (163)..(163): n is a, c, g, or t
  misc_feature (172)..(172): n is a, c, g, or t
  misc_feature (179)..(179): n is a, c, g, or t
  misc_feature (182)..(182): n is a, c, g, or t
  misc_feature (189)..(189): n is a, c, g, or t
  misc_feature (201)..(201): n is a, c, g, or t
  misc_feature (235)..(235): n is a, c, g, or t
  misc_feature (281)..(281): n is a, c, g, or t
  misc_feature (315)..(315): n is a, c, g, or t
  misc_feature (326)..(326): n is a, c, g, or t
  misc_feature (337)..(337): n is a, c, g, or t
  misc_feature (355)..(355): n is a, c, g, or t
  misc_feature (364)..(364): n is a, c, g, or t
  misc_feature (377)..(377): n is a, c, g, or t
  misc_feature (380)..(380): n is a, c, g, or t
  misc_feature (433)..(433): n is a, c, g, or t
  misc_feature (440)..(440): n is a, c, g, or t
gcgccgccgggagaggcgagcgcgaggcagagagcgcgattcggctccaaactccggcgctgcagccgatcggactctgggccgcggtgggcaccgcgcgcagctagggagccgagaaccgcggcgagccccgaggacgcccagagcgcgagggtcgctgggngtggggagnggggggngcngagtggnggggggggccgnggggtgccgtggggggggggggatgggggggggngggggggtctgggggctgggggggacggggtgggcgagtggggggnggaggagggggtcgtggggggatggggagggggngggcggggggnagggggtgggngggggggggggggggggnggggggggnggtgggggggggnggntggggagggggggggggggtggggggggtgggtgtgggtggtggtgggggggntggtggn

SEQ ID NO: 655627 - DNA, 407 bp, Homo sapiens
  misc_feature (69)..(69): n is a, c, g, or t
  misc_feature (82)..(85): n is a, c, g, or t
  misc_feature (89)..(91): n is a, c, g, or t
  misc_feature (100)..(100): n is a, c, g, or t
  misc_feature (102)..(103): n is a, c, g, or t
  misc_feature (106)..(106): n is a, c, g, or t
  misc_feature (113)..(115): n is a, c, g, or t
  misc_feature (240)..(240): n is a, c, g, or t
  misc_feature (243)..(243): n is a, c, g, or t
  misc_feature (249)..(249): n is a, c, g, or t
  misc_feature (284)..(284): n is a, c, g, or t
  misc_feature (341)..(341): n is a, c, g, or t
  misc_feature (343)..(343): n is a, c, g, or t
  misc_feature (349)..(350): n is a, c, g, or t
  misc_feature (353)..(353): n is a, c, g, or t
  misc_feature (355)..(359): n is a, c, g, or t
  misc_feature (361)..(361): n is a, c, g, or t
  misc_feature (363)..(363): n is a, c, g, or t
  misc_feature (366)..(366): n is a, c, g, or t
  misc_feature (368)..(370): n is a, c, g, or t
  misc_feature (375)..(376): n is a, c, g, or t
aatccatgaggcagttactatcattcccattgcatggatgagggaggtgaggctcacaggagccaggcngcttgctcatgannnngcannntagggccantnnagngccaggnnngggcattggtttcccatgagatggaactgtaatcgtggagactttggaggtgccactcgggtcccctaagtcagacatgacacaaacacagcagggccacaaggacctcagccctatgcccatcnttntggccntgggcagctgtggtgtacacccggacccttcccanagtgcagatcttcactctcgctgaaatgcagtgcagaaaatattatttatggggtgncnttaaanncangnnnnntntnttntnnnttggnntctttgtaaagcctgaactttccattctgag

SEQ ID NO: 655628 - DNA, 1108 bp, Homo sapiens
ctatatggaggtgctcaataagcaaaagtggtcggaggctgctgtattggacagctcagaaacaagatttccatcaccacagaaaggtcggctggcagcactggaccaaggttgatgggtgtgtgctacacaggtgatatgctcactgtggtagctggatggagctttagctggttcgtcggaataaaagacggctggtttccgtgtgttcaaaaaaatgcaaacccatctaagaacacagaaagaaaaaaagggtcgagcgccgcgactctctagagatataatctccacttgcaagagggcgcaccaaaggctttaacgggctgtgtccccactgcgaatttttcttggcgatacacatattgagtgggtgcctcctatatagtttgcgaggagctccagacatatgtaatacagcgatcacggagactttggcgctcggtagctggttataacaaacaaggttgcgcagtccagcactgggggggggaaactaccttcggtggctgaaacccctttcggggccagatacctcctcgagtgctgcggacagagtgtacctcacttataacacactagatcggggtgcgatggtcgcgaacatctactttgagtgcgtaccaaacatcctatcccccatatgcagggaaatgcatctatacaacaacggcactccaaaaacggcgtggaaaacaggttttaaacagacatatgtagcaacaaagaggaggtgtatataagcgtgaggtggttcggcaaacccataatcgcaggatgggaatatacatgccgtttaagggtgaacggtgattagcgaaaaaaggtatatagggggcgtctaaacacagtggcggactacaccgcaaaacaggactgaccgaaaacaccaaatcatagatgaactacaccccagccagaggaggagaccatcccgacccgacgccgcaacacacaaaaacgaggaggaatgagcaaccaaacccaatggcgacacgaccccgacacaagatgtgcacaacaaaacactacaaccccacacacccagagccgagaacggagcgacgacacaacagatagaacacatctcacacggagaccaagacaagaa

SEQ ID NO: 655629 - DNA, 190 bp, Homo sapiens
gtatgtcggaccgatgggatacaggcatgtgccagcacgcctggctaattctgtaatttagtagagatggggtttctccatgtggtcaggctggtctcgaactcctgacctcaggggatccgccctcttcccggagtgcacggattacaggcatgagccactgcagccgaccaaaactgatataattttt

SEQ ID NO: 655630 - DNA, 137 bp, Homo sapiens
tgagacagaactactaacaagtatatgggcttacaattatacaaacttagagggcataatagaattgaattttgattgcctcttttactattatcactacgactgtctgctcacgatttctgtgccctatcaagggt

SEQ ID NO: 655631 - DNA, 115 bp, Homo sapiens
cctacgtggagtgcaactccaacagtcctctagaggctgtgtgagttgcaaggaccttggatcatgttaactacattaattctattctttccttttgtgccactacctatatatt

SEQ ID NO: 655632 - DNA, 534 bp, Homo sapiens
tgctaagcatagcatatatacttacgtcataagtaccccatagaagttagacttagtctgcacttcattgtcacatacactatcagcatttgcccctgccctagagatctgtggaacttgaacctgagagaggattaagggtatctggcagaaaaaaaattctaagcaggacagcattcaaaatatgacctgggtgctctgaaaaacatatcagttatatgcatttacaaagagttggcttgaacttggaacttatgtatataagggaagcagagcataaaggtatggaaaatttgcagcctcaccatatggtagaaaagaaaaaacccgtaaaccttcaagtcagctgcagaaatttgcataaagtcattagcaccccactgttaatcaccaagacgatggggaaggtgtctgtgtctccagggcatgtcagagaacttcaagacagcccctctcatcacagacccagaacctagcagggaaaaaatggtttcatgggctgggcccagagccccagtgctagtctgtgcagcc

SEQ ID NO: 655633 - DNA, 597 bp, Homo sapiens
  misc_feature (597)..(597): n is a, c, g, or t
aaaggaatgactaacattaagaaatgcgacagatagtcaaggaagttgaaatcagaacaagacatttaagagcaagtttgattttggagtgattgtgagcaggaagggcttgacatccggtaaatcaagaaagcagaggattaagaagcgagtgagctggaccaggcagaaagaatgggcagtgaactctcacaggaaatctgacagtttctcatcaatagacacgatcaattcaatcccattttgcagtgacaaatggcaaactgcatgcaagtcacagggggtatatgctgggttaatatgcatatctgtattttcagacgatacggagactgtgatacgtattcataatcaacatgagggagattactaaggcagttcttgtaaagaagatgaatgacaaatacaatgtcaggccaggcgtggaggctcacgcctgtgattacagcactttatgaggccgaggtgagcgaatcacgaggtcatgagatcgagaccatcctgactgacacggtgccccgtatctactatagatccaaggatgcaggactagtggtatgcccggtagtcggagctacagcgagctcagtggcgccn

SEQ ID NO: 655634 - DNA, 943 bp, Homo sapiens
aggactcttagtctaaagtacctttagactctgaagatctagcagctttttaggaccagaagttgggggtgcatttcccttgcatataatttaccagtttttttctttatcccaaaagtggctccagaagttcagccccttggggcttagttgccaggagctgtcctgtattccaccactctaccccaggccagaacaaggactcagccgtgctgccccctgcaggctcaggcctaggtctgtgggctgcttagggcactattgatgtcactgaagaaggagcaccttgaccagacagagattgtgaaggtgcaagtctagccacacctgaaccaaaagaaaaggagggagtgcggcagggccaggcagcagaagccagcacctgctgctcctcattagtaaccaaggcttgccaggcaacagagcaacaggtggagaaaggctagtgacccttcagaaagacccagttgattgggcagacacaactcaaggtatttgcaagccagccatctacaggctataggctacatcactacaggctactgagggagtcttcctgcttgggtgtcttcccgggtatcaccagaactccagcatcatgcgagtagcaggcgtataaagtcaagtgttcaggaacaggtagttctcactctttgttactctgaacaagatggtaacagggagggtcaccagtgagaatagtctccaagagctacacactcgcgaacagggcccttgcaagtgtcaagtaagcaggtaggattctcctctatggcctaggcccctaacgacccgagttttgttcgggccgaccaagaagccctaagagaacccgccttcatccagcagtgggtggccttacaagcaactaggggcagagagccaacgtgcacagcagaagggtggaacacaaaagagcgcacacgggggggagaagcagaac

SEQ ID NO: 655635 - DNA, 119 bp, Homo sapiens
atcccctgtaccgccgtaactggatggatggagcgccgtgcagtcccagactatctcgcggagagctgagcgcaggagaatggcctgaatcccaatgaggccggagatttgcatggcag

SEQ ID NO: 655636 - DNA, 385 bp, Homo sapiens
cgcaaggatgaggacggtgcttggcggatccccagcccccgggtatcagcggatctatgaggcgctggtgtttctggaggacatgccgagtttcaagttgcttgcgaaccgctgggcttagccttgatccaccgataaacaggctggttgtccgggtgtcggaatgatgaaagtgccctctgaactggaaagattggtgttctctacgcaacgatctgaccggttcaagaaaggcacttccagtgcaagtgtcccacacgttcggccctgactctgctgtgttcgacgaggacaatctcgtgtcctgcgcgggcctggtcccggtgatggccctggccgagcaagcaggcctgacgcggttgttggacaacaagattcacatcga

SEQ ID NO: 655637 - DNA, 167 bp, Homo sapiens
taggccggaccgggtggcggtgaggtggttacttgagatagtgatgctcacgatcagctggccaacatggtgaaaccgccatctgtactaaaaaatacaaaaattaagtgggtgtcgtggcgcatgccgtgtagtccgcagtgtagttagggcaggctgggtgcatg

SEQ ID NO: 655638 - DNA, 131 bp, Homo sapiens
  misc_feature (47)..(47): n is a, c, g, or t
  misc_feature (92)..(92): n is a, c, g, or t
atgattttgcatcagctagactgagttgattctgaccagactgtggntttgaagtcggaaccgattaaattttaaaaaggagaaaaaataanacctagttagtgataaaacatgaggcttttaatggtact

SEQ ID NO: 655639 - DNA, 114 bp, Homo sapiens
tctttggactaacagttaaatttacaaggaggatctagagggttctgtgtggcaatatttaacagttgaactaacgattctatcttggacaatccagctatcaccactccgcag

SEQ ID NO: 655640 - DNA, 204 bp, Homo sapiens
gtctgagtagataggactacacggtgccactaccacacccggctaatttttgtattttttgaagagatggggtttgccatgctgcccaggctggttttctgacctcaagtgatccacccacctcagtctcccaaagtgctgggattacaggtgtgagccactgcgcctgtcagaaaacactttttattttgaaaaaattttaaa

SEQ ID NO: 655641 - DNA, 248 bp, Homo sapiens
cttgctcctctaataataaggagctagcaggataccgatccaatggtagaatacctaccagatatccccagagactgaatctacctactaccaggtcagcctgcactacagatagctccagcgtgggcagcagtggcaatacccatgatagactatatgtaatgataagactttaaaccagctaattctaaagatgacatacttccgatggacctggggaccttctatcgggagtatcagaaccctca

SEQ ID NO: 655642 - DNA, 197 bp, Homo sapiens
ctgtatccctgcgagaacatgaagtgctagctgtgatgggatctggtggcgctctctgagtgcatcatgtacaaggtcccccatcatcagaaagaagtccttgaggcgcaccctgtccgagcgtgccctgcctgaaggacttccatgaagaagcacaagctcaacccagccagcaacatgtacttcccccgagatgg

SEQ ID NO: 655643 - DNA, 1256 bp, Homo sapiens
cacccctctacacgctgggcgtcaactacccggatgaaaacgtcgattccagctgctcgcccgtctacacttgccatcttctacacagcggccatcctgggtcccaggctgaccgtgctagccttgattgtggaaggatgcccgtgcgtgtagaatatctaccacgagagacattgtgtgcaccgacggcgaccggtacgtcgtgactcatccgaacgagctccactgttggtgttcggtcgcctctggatgggatcgtgctatcctggcgctctgtgcgtccgcctgcgtatatcttacaccggcacgttcccgatccatgtgtggtgtacctctacggtcatgctcgccagtgtgtccacacgcgactagcgcccggtcaatagagagcggctggagaactgacgacgcagattgcaacgggagcaagcagcccagtgaggtgaagcgactgacgccaagcctcaagggatcttatggcgaacaatctcatcacgaagaccttgacctctactcctaatccttggtctccgtgctgataagtagactcaccaacagttacatccatgcttgctgacctagagccccagggagtccactcagatgggcccaacttacctcccatttcaaactctgtgcaacttgttccccaccccgttgtacaagacccacacaaataggcatgtgctttagagacagtacgcccaatgaattatcaaagtcccttagcacggtttgcacctcccacgtatacgacttgacacaaaccatgtgcttgtagaggtacctctgggtgcgtagccaaggaccggagaattggctgggcttgagctatgctcctgtcccatgggtgttccgcgcctctacctttgtggctggaccctctcatgcccttctagtgccctcccgcggcgggttcctcccgtgcagcgctccatttcgaaccggcaatcttgtccctctgtttcccttggacattgccgccttgtttacctgcccctttgaccgtggcgaggccgtttcccctctccgtttctgttcaccttccaagctttgccaccattggtctccccctcaccgtcgattcgtccccgccctttggccccgagggcccctggttccgtcggaacacttcccggacgcttgcacacgaggccccggggtaagggcccctttccccccttatggcctccccgcaataatgtggtcccgaccgtcgctgttgtgaacaaccgccttaacagctgggcgccttc

SEQ ID NO: 655644 - DNA, 171 bp, Homo sapiens
ttggggctcattcaggtacagcacagctacagagccgggaagcagtgagctaggtgtcccggagcagcctgacctccaggtatgggcttggatttttaatggtccctcttcagtattccacgtggggggaaatgggcttgatcctatgggatcctttatggcaggactggg

SEQ ID NO: 655645 - DNA, 824 bp, Homo sapiens
  misc_feature (400)..(400): n is a, c, g, or t
  misc_feature (506)..(506): n is a, c, g, or t
  misc_feature (553)..(553): n is a, c, g, or t
  misc_feature (573)..(574): n is a, c, g, or t
gaatgggactataactgatatatcatgaccacaccaactgagggtgtggagtaggtcacccattggggatggaaaagggaggcttcggccatgcctgtggagaagaaaccaagtcagtaatctgcaagaaggcccatctggtcacatgaaggtcaatctcatggtcccacaataaaagccaacttcagaagccatttatgccaagagagactgtaaggtacctgcaccagctggaggagcagatgaaagcgaagaagtgctgcgctaccacaattatgcgaatgtgcacccaaccatgagcaatactttcattctgttcttgaggctcccagcttctgacacaaatgagctagggaaatttaaaaatgggaacagatgaagtaagagggaaagatttttnagaattgaaataagatctgaaaggaagttgtaagcattgattgaaatattaatacattaattgcattagaccatcagctcaatgtatgttttgatccataaatggncatgactataagtggcaagattaagtagtcactgtcaataggattanaatcccatagggaagtttanntttgctaaataaaaaagaaacctctctcttcttgtctttaaccgtacccacaacacacacgcaacaaacaacaaactttttgggcgccccgggagcccgaaacttttaacacacttcgttgggcccgggccccgggctaggacctggccacggcgtcagaaaccggccgcaacggtgggttccccaaaaaagccggggccgcgtttaacaacaaggggctggccctcggctcacagggccgcgtacgggg

SEQ ID NO: 655646 - DNA, 135 bp, Homo sapiens
aaaaaaaaaaaaaaatttggggaaggaaaaaagaaaaagggaaggggttaaaaaaatttaaaaagtaaaggggggcctaaaaagttaaagaaactacttagggggaaaggcccggcgtaacggggtaccgacccc

SEQ ID NO: 655647 - DNA, 329 bp, Homo sapiens
atatggaatgcggatatctctataatgcgggagaagtttgtgtctcggccgacagtcacatggccgccagtggaatttgggacatacaccttttgtgtgatgagttgtatactgatgccacattacaggagagagctgaacgttctctcaagccagaggaggaaacacattaaagtcccagaagtctctaatatatcctttggcttttttccagtgaggtaaaatacagggcattaatgcgcgggtacatatattccccaggttgtacttaaagtctaattaaaaccattctgtgttaagtgttacacaaaaaaacacaaaaaggggtc

SEQ ID NO: 655648 - DNA, 352 bp, Homo sapiens
gggggggggtccccacaaccccccccataaattggcgggaaggtttttaacagggttttttaaaaggggggggctcccccccaccccgccctttttttttaaaggggggggggtttccccttttcccaaagggggggggggggggggttttcccaaaacaggcccaagggcttttttggttttaaagggggggggcccccttttggggggttgcccccgggggtttaaaatttctttttccccgcccccccggttaaaaaaaccccccccccggtttccccccagttttttttttttttttaaaaaaaaaccgggccctttcccacaaaaaaacctttttttggttccccca

SEQ ID NO: 655649 - DNA, 614 bp, Homo sapiens
  misc_feature (349)..(349): n is a, c, g, or t
  misc_feature (459)..(459): n is a, c, g, or t
  misc_feature (588)..(588): n is a, c, g, or t
atttgttgtctggtatgtgatgaaatgaatgtaatctggatattccactttaacatctcaattgtaatatatgtacagtctgattttgtagactcctcactatatgtaatgggatacttgtggtggatgacatatcgtctcgttatattatacgtataatatatgtagataacacctgttttgtctgacgggtgttatctagctagagtggtcgcgatttagtacggtaattcacagagtgttatattctttcgtggataacatcctctgtctaatacgtcatattgtatgacctctgagtagcgtcccctgtgcttatattctctataacagtttcttaaataatgcntataatagtacactgagtagtactaaagagagactcttacttggattgctcatgtgggtatgatcataatatagactatatgatgacgcacatagtcccgcatattaccntatttattctcattttaaatacatagttatatcgtttcgatatggggtaaatatactcaaattcatacttggtagtagctcgcgataaaaatagagggagaagtagcatagttgtgagatttctacttntgttgcatcaatcatcctcttattct

SEQ ID NO: 655650 - DNA, 353 bp, Homo sapiens
agctgctctcactctgacccagactccgactgaggcagcctagcgaggaagcaagaactttaactagagggctgatctttaactggaaagctgcttatctcctttcaccacaccctccttccctgtgtcttttaacgccaaactgtctctgcctcttcccggagaatccagctgggctagaggctgagcacctttggaaacaacatttaagggaatgtgagcacaatgcataatgtctttaaaacgcatgttgtgatgtacacattttgtaattaccttttttgttgttttgtagcaaccatttgtaaacacattccaaataattccacagtcctgaagcagcaggaggagga

SEQ ID NO: 655651 - DNA, 249 bp, Homo sapiens
tctacaggatccccgctcgggactcagagggataacttaagagtacttacccagctacttgctttgtctatttatagtggaatacgtatacagatagtagttcaggcactattccatctcaattatgatacacattgcattactgtcttatttcaagaaaggaaataccaccataaatatcatggaccacgttacagaaaataaacataatgtgctttactgaactagttattcattcacagctcccga

SEQ ID NO: 655652 - DNA, 157 bp, Homo sapiens
  misc_feature (147)..(147): n is a, c, g, or t
agtgcttctgtctggtgtgattggcagccatagacagtataaatgtaggacagccagcgtccatatctgacctaactcagggctgccgtcaatcattaaccaccaattattttaattcccatgtcttcctatcctcaccctcttcangctttaaacc

SEQ ID NO: 655653 - DNA, 268 bp, Homo sapiens
ggtccctgccgttacgcccagccaagcccagccaagcccagccaatccccgcctgatcgcggggcatgtctgtgagccagaccccgtcagcggagagggacctaactagagcaccagcctgcatgtgaacttccttctctcactcattgcgttcccagcgttgccagctggtgacaggggagatggacgtaattttgcgtgtggaaagacttagacgtcttgcccggaagtgataagtcccggcctgtctgtacacgctgatgcccgt

SEQ ID NO: 655654 - DNA, 160 bp, Homo sapiens
tgagggagtatgtctttgaacacctccctcagtgcggatttatatatatatttttccttcactggtgtcaagtggaaacaaaaccaaaatttttaaaaaaaaatcgggccaggtgaccacattaacatgattctgttggtgcagacattaaatggtaatg

SEQ ID NO: 655655 - DNA, 175 bp, Homo sapiens
gatgagcacaaagtaccagctagctcgctcaccgaaggcgcataacaataagaaagatcataacagactcctgagaagcaaaatgaacgaagatctgttcgcttcattcagggcccccacaatcctaggcctacccgccgcagtactgatcattctatttccccctctatggatc

SEQ ID NO: 655656 - DNA, 194 bp, Homo sapiens
ccaatgcattccctttatactgtgtaagccaggcatggtggctcacacctataatcccagcaatgcaggaggctgaagtgggaagatcgttgaggccaggagttcaagaccagcctgggcaacctaagaagaccctgtctctaaaaaagaattaaatataaataaataaataataaaaatataatgtttaaacc

SEQ ID NO: 655657 - DNA, 101 bp, Homo sapiens
caggaagacatggtttcacaaaagaagcctacaagaagtacatcaatggattacatgaaatcaattcgaacagggaagcttgacagtaatcagagaccagt

SEQ ID NO: 655658 - DNA, 404 bp, Homo sapiens
ccggattattaacaaagtactttctaggagctataatcaaagttttaaaaagaagttaggatatatttagagtattccgatcgtgaaaacagataattgcccatgccaactacaaggacagacatgatgggaaattatgcacctggtcaaacttagcttataagcagacgatgctgtaaaaactaacggattctctgatatatattgtaagttattagtactgatctccttttccagatgctgcacactcctggttaggaactttaatagcgttgcaacgaaatcctatatccagtttcctgtaatataattgaagaaaaatacatccaaataaagactatattattaacagaccagatagcatcagaaatcatgtgactgttatgattatcagaatgtcttaa

SEQ ID NO: 655659 - DNA, 235 bp, Homo sapiens
ctcctgtcagcaattgcaatctggctttatagcatctatatgtccccagcacccagttctgacgccaggcacttcaaatgtctaggaattgactgaatgaactaagaactcctgtgatgggtccgggaactcgcctgggcacaaggtgccacaaggcacgcagcctgcccaggccctctctcctgtccatcccccacattcccctgttgtgtccttgtgatctcgcaaaatcgag

SEQ ID NO: 655660 - DNA, 272 bp, Homo sapiens
atagtgtggtgttatggacattttcctgcaggacatgactcactcaagtaccgcacgtatcttgttaagctcgtatatttcccataattcttcgacctaatccctgatttcgctgcggacctgtatattctcctgttactccactgacttctgcagattgtaatacatcccttagtgacattcccactgtgtactgaggtcgctgtccagaagccaccaagatattcgcatattctacacagagagcataggatcacgcaattccgggtacc

SEQ ID NO: 655661 - DNA, 182 bp, Homo sapiens
gggttctccccgtgctgtgccatatacgaacacacactggtactggggagagacctgtgaattcaacatcgccaagagcctcgtgtatgggatcgtgggggctgtgatggcggtgctgctgctcgcattgatcatcctaatcatcttattcagcctatcccagagaaaccgtcgaattcgag

SEQ ID NO: 655662 - DNA, 560 bp, Homo sapiens
  misc_feature (38)..(38): n is a, c, g, or t
  misc_feature (42)..(42): n is a, c, g, or t
  misc_feature (52)..(52): n is a, c, g, or t
  misc_feature (421)..(421): n is a, c, g, or t
gagataaaattcccatcctatacccacatttttctggnaaangaaaaccggnttcactcaaagacatgaccgatgcccatagcagctttgttcataatagccccaaactggaaacaaaatgtccaggaacagatgaatggataaacacactttaacatacccatgcagtgcaataccacgtggcagtggagagaaacgagctaccggtatgcccaacacacagatgaatctcagaaacgttactgtctgtggaagcaagacacgaaagaatgcagactgtgtgattctgttcataaggaattctggaatgtgcaaagtgaaactgtcataacaggaggcaggtcactcgttgctggaggctttggggtgggacgttagatggccagagaggaggcaggaaggcacttttaggggtgtgggnataacatctacgtgttagttgtgcaagtggatacaccagtacgttaatttattaggggtggttttgcatacacttggagtggcaacattttgttcatattaattatttctcaataaaataaaacaactttcatagttca

SEQ ID NO: 655663 - DNA, 1097 bp, Homo sapiens
gcgctttcggtgaagttctcccacggagaaagccatgttgcagtatcggatggcgccaacgatcgtgaagcccaatggcgagaagccggacgagttcgagtgcggcatctcccaggctcttctggagctggagatgaactctgaccgtcaatggctctagctcacgcgtgagctgacatattactggctagctaacggaaattgaaggttgcgtggtggtccgtgacacagctatcagtaatctttgttcccgttcctcgatcgtgagcatcttgtccgagcaaaatccgaatggtccggctagctacgcgatattcgtgagcaacagaagcttcaggtggggaaggcatgtcggtctttattcgctcagtaggcagcaattctgtgctaacgtccaatctcgaaaaagccgctatccatgacaattaagccacatagcgttcccaggaggccgggtactcctgaacagcctgtgcctgcgaatgccatcctttgagcgacttgggatcttgcccccaaagcgaacaagttggtacgcggcaatgatgaatccccgcgttcgaagagctaatgattgtgccaagacacagggctacagtatcacggtctccattttcgcgcatcaaaaggcaacaagccaaggaatcaccattgtgtgaaccatcctaggtttgtaaccactctttccctggtgggtccttagtccaggaaaggcctccactggggcccacgagattgctacaaacttcttggcaattttcggccagtatgttcctcaactttcgtgacacacctaacaatattggagctgtaagctcaaatgacccgctgctacttagtctttcaccattggtacaaagaatccattggctttcaacaggacataggtcttgcgggagcgctagcgggggttctcctcgtcccgaggattcctcccatgggtggggccggagtttgccccgtctcgcaggagcttcccctgggagcggcgtcctccccggggccgctcgccaggtgattgagtcccctctgtgcacgggggataccctggctggggggctccccgggggggggccttcggggccgtggccccccgg

SEQ ID NO: 655664 - DNA, 135 bp, Homo sapiens
  misc_feature (10)..(10): n is a, c, g, or t
  misc_feature (76)..(76): n is a, c, g, or t
  misc_feature (107)..(107): n is a, c, g, or t
ggggctgccngaccggccggccgccgcggcgcgggggagccaccgggccggccaccatggaggttccttgcagctnacggaggcgcggtgacgtgactgcggacctncctgacgaaggctggccgctgactgtgg

SEQ ID NO: 655665 - DNA, 454 bp, Homo sapiens
  misc_feature (119)..(119): n is a, c, g, or t
ctacactattatactcagaaagagaagctcaggatgctgaatgtaaatgctacagccatacagctagttaagggacagagctaatcccaaccaaggtccctttgactctgaaccctctngagaatgtgcagtccctgtgatcctttttttgcataaatggcaacaaagtagtccagtccaaacagcctccctgctcattcatgaaagctggagtgatggtttgtgcttggagagtgctcaagtagagaagagagacctgtcccctccctgcccttggtgttggcaaagggagcagggaggacacagagggaggcagacgccagctcctttccttgtggctctctccaggtaactggcagcctggaggaggtggcggcttaatgggcctagcccacgaagagaacttggacttgaaggtttaaacagcaacctctcaccaataatgaaagattag

SEQ ID NO: 655666 - DNA, 502 bp, Homo sapiens
actgtatagtcttaaaaatagcattatactggccaggggtggtggctaacgcctgtaatcccagcacttgggaggctgaggcaggagaatcacttgaacccgggaggcggaggttgcagtgaagccggaagaaccggcaaccaatggaatctcaagctcggggcacacgaggatgagaagatccgcgtctccaaaaaaaaaaagaaggggaaaaaacaaatagcattatacctcttcctggtctcaaccggccatgaaaattcggaaccactccaaatgccagcttgagtattcccagaaacaccagtctctcagggtattcaacacatatttctaaccttccttatagtaactacgtcatactttcaaaagcctcagggtatatcatcttcctaaaccggctacaatccagggcagctactttaaccaactagtgtctctagtggcgaaccaactaggcctattccactgctgtgtagcctcagggcctacctgggtgcca

SEQ ID NO: 655667 - DNA, 875 bp, Homo sapiens
gctgtggtctacatcattgccgtgctggtgcgctcatgtctactgcatgaagcgtgtgcaaaaccatgcgggtgctgaagcaggccaagggcgagcgtagccagtagcatggtagagtgcctcagacggtgggccttttgacggagcagggtagcacctcagacagagatccaagaggaattggctcttggacccgcattgggctctcgtggccctgcggtcactcatagcaagacggccacgagcatcgaagtcataggaatgcacattcctcgacaggatcttagccttgaaatgacgcattcaacgcaacaggctggggacagagctgagtcaggcggaagtgatctctgagccacaggcttccgcgggttggcatgcagggcagtttgtgcgtgaacccgtggtctactctgtgtgcccgacggccgtgacgctcggaagggtgctgacgcggcggacggctgtcgtcactctctcgggggcgccgattagtcgctgtagtctggcggaccgacgtcggcgaactcgcccggctgggtagccgcgtcagtgcggacctggttaccctgccaggatcggagcttggcctacactggtggcctgggcatgtgttgcctcgggagggattgcctttgagagcctactcgcgggggttcctgccgagaccaagagcatggctgccttgggaggctcaggcgtgccacgtcccccagcacgccctgggagcggttgtgaggcaggatgtggtgggcccgagttttccaacggggttccagtgtcgggggcctgttcccgggaagggacgattgggctgccttcggggcctaggcgtttgtggcctaactgtcctggttcgtccccccaaggcacca

SEQ ID NO: 655668 - DNA, 340 bp, Homo sapiens
ttcctcttgaataacgcctataccgtaatgtctactttctaagaagcaggcaactagaagtgtaacaatacattccaggccttttatttcaatagtaaaataatacatgtcttgttctaacactttatcctttaccccttttctatttcgatcctctttggcaatcttatgtcatagtttttcccgggttaaaaatagtctccagatgggtaagatatacacagagaaggaagatatattacaaaagcaccttttagaatatcccatgttctggcaatacaaacacgttcttctgaaaggtagctactcccagttttttgcagtaatgttagagatacgg

SEQ ID NO: 655669 - DNA, 297 bp, Homo sapiens
agccctttggggctttgggggcccctaagtagaaaattcctatgggcctgtttcctgggggcctttgtttgctgggggtttgcttcccccaaaatcctaaggggcaggggggcctgggcatgggtttgtgggacccctcccgcccgttgggtttggccaagggcccccgtcggggtgttgtttcctggggcctcccggctgtaggggtttccaaatgggggggggggttgggggggggccccagttttttttttaaaatttaaactttggtaagacccttttatttgggccccccca

SEQ ID NO: 655670 - DNA, 546 bp, Homo sapiens
tagctgtactgtacccccgcagcatagtatcgcacctggcttaggatgcatcgcgactgcgtagagaactacctgtgatctagtagagaatgaatgaaaacagactcagaaaaaagatctggctctgtctcattcggaagaagctgcaggctgtattccccatgcacttgcttcctggctgcaaaccttaatactttgtttctgctgtagaatttgttagcaaacagggagtcctgatcagcacccttctccacatccacatgactggtctttaactgtagcactgtggtatacatgcaaacatccgttcaaaatctgcgtcgcagactataatagaagatgaacacacagaaataacgaataaaaggtcttatcctcataattaggaaattttaatcgaaaacaacacacatgtacacaaaggtgtatctaataagcaatatataaggcagtgtctagattaccgtgctagcctgggcatcatggcaaaacaccaattctacaagaaaatgccacaagttagcagtgcatggtggcatgtgcctg

SEQ ID NO: 655671 - DNA, 130 bp, Homo sapiens
taaaaaaaaggcctttggattgttcaaaaaatcatgggcccttcaaaaaaaaggaatgctacttttttgtggtttacggggatttttttcaaatttttaaaaccctaataaaaggtcccttaaaatccca

SEQ ID NO: 655672 - DNA, 1018 bp, Homo sapiens
  misc_feature (28)..(28): n is a, c, g, or t
  misc_feature (87)..(87): n is a, c, g, or t
  misc_feature (99)..(99): n is a, c, g, or t
  misc_feature (108)..(108): n is a, c, g, or t
  misc_feature (119)..(120): n is a, c, g, or t
  misc_feature (134)..(134): n is a, c, g, or t
  misc_feature (143)..(145): n is a, c, g, or t
  misc_feature (161)..(161): n is a, c, g, or t
  misc_feature (171)..(171): n is a, c, g, or t
  misc_feature (173)..(173): n is a, c, g, or t
  misc_feature (185)..(185): n is a, c, g, or t
  misc_feature (196)..(197): n is a, c, g, or t
  misc_feature (199)..(200): n is a, c, g, or t
  misc_feature (205)..(205): n is a, c, g, or t
  misc_feature (212)..(212): n is a, c, g, or t
  misc_feature (218)..(219): n is a, c, g, or t
  misc_feature (221)..(224): n is a, c, g, or t
  misc_feature (228)..(228): n is a, c, g, or t
  misc_feature (230)..(230): n is a, c, g, or t
  misc_feature (234)..(234): n is a, c, g, or t
  misc_feature (263)..(264): n is a, c, g, or t
  misc_feature (287)..(287): n is a, c, g, or t
  misc_feature (298)..(299): n is a, c, g, or t
  misc_feature (301)..(303): n is a, c, g, or t
  misc_feature (306)..(306): n is a, c, g, or t
  misc_feature (308)..(308): n is a, c, g, or t
  misc_feature (315)..(315): n is a, c, g, or t
  misc_feature (325)..(325): n is a, c, g, or t
  misc_feature (328)..(329): n is a, c, g, or t
  misc_feature (331)..(331): n is a, c, g, or t
  misc_feature (333)..(333): n is a, c, g, or t
  misc_feature (335)..(338): n is a, c, g, or t
  misc_feature (343)..(344): n is a, c, g, or t
  misc_feature (346)..(346): n is a, c, g, or t
  misc_feature (360)..(362): n is a, c, g, or t
  misc_feature (371)..(372): n is a, c, g, or t
  misc_feature (391)..(391): n is a, c, g, or t
  misc_feature (413)..(413): n is a, c, g, or t
  misc_feature (438)..(438): n is a, c, g, or t
  misc_feature (481)..(481): n is a, c, g, or t
  misc_feature (942)..(942): n is a, c, g, or t
  misc_feature (1011)..(1011): n is a, c, g, or t
tctgcacaacgaaactgaggctattganacgtacaccagaaacaacacattcaataacatagaagaaatgtctgcaaaaaaaaaaanaaaaaaaaatanacacttagntcaaccaaccnncagcccccccaacncaaaccccnnnatcaagcctcccactngcacactttncntacaaagattgngggtgggaatnngnnatttngtttgcncggggnnannnngggngnccgncacccgcacccacagcctttcctgcctgnntcccacatcaagggatatcagtntcatagaatannannnaangnggcgcangcgtaccagnganngnantnnnnctttnncnacccagctcatttnnntaaaaacgnngggggctattggggcgaangggggcataatgggggggggcnggagggccagggggggctctttccnatcagcacatcacagagcagacagactacctgcggggggggtnctgcacctcacgggcccagggccgtctcttcccagccctctccctcacatgctctgccagtctacacacactggagcaaaccccagctgtctccacccagatgggtggtgcccctccctccttaccaagatgccagagtcagaggggagggagtagtcaatccacaccgagcctgccacattgcagggccgtcccaccccgactcaggagtcagcacagggaggggtgggggggtctttttcctcgttctctatgccacttacttactacagtgcaccttggcagcagtcagcactgttacccgctgatggccgaggaagaaatgcgaagtaggcttgctcttagcacagcgagagatcactctagatatggctatggaggaaggtttgcagacagcagggtcggttcagaaaatcaattccacaaaatgcatttatctgagatccaaacccttcgcatanccagtgtaaatttattttttttacagcatccaataaatcccagtaaaggggctaaatgaagatcttaanatgaaaa

SEQ ID NO: 655673 - DNA, 250 bp, Homo sapiens
tcaagttcgacaactggtaacctgatgtatggtgaaaggaggtgctaagctaggaagaattggtgtgatcaccaagcagagagaggcaccctggactctatagacgtggttcacgtgagagctgccaatggcaacagctttgccactcgactttccaacctttttgttcttggcaagggcaacaaaccactggatttctcttccccgaggaaagggtatccgcctcacccttgctgaagagaagaaacgc

SEQ ID NO: 655674 - DNA, 113 bp, Homo sapiens
cccaatggcttggctgaagcggccattgtcttgtaatcttttggtataacctttctaacataggatgccgcatcttcctccgtgtgagacctcagcgctgatagcacctcgtc

SEQ ID NO: 655675 - DNA, 1665 bp, Homo sapiens
  misc_feature (113)..(113): n is a, c, g, or t
  misc_feature (212)..(212): n is a, c, g, or t
  misc_feature (987)..(987): n is a, c, g, or t
tgttaacgtggtagactatagagttcggcgtggtacaaaagggcggagtaaatatttgtttttgccgcgccccacgagagaggtcccctctgtgagtagaagtgtgcaatttnctccacctaagacggcgctcgcgtccctctcctgttgtgtcgtaggtgtgagtacaattaagacgggacatgaggcagttgtgttgttggggtggcgcnccccccgccacctatagagtgatagaatgaaggtgtcgcttttcttgtccgcgcgagaaagaattgatgcgccacaccaagagatggcgagtggtgtaattagtgactccttcgttaatttgtgtcctgactagtaggggagttacatatataagttcgctctccatattatagggtcctcctccttctagttttgcctaccgcccccaaagggggaggtaaaatatatattatgaggcgcgccaccagtaataggttggaacaccacgcgagacccctttctggagaaaaagatgttgtcgggcagcatttttggggccctgcaagcaggggaattgttggggccgcaccaacagagagataagataagctccttggtggggaccacaaacaacttcttgttgctgtgaaagtagggttgaagaccgccttgctctcctaccgggagtacttaccctcccccgcaactactattgtggcgccgcgctcttgtttggtgtcaactcgaccaccaggagatttctccaccagaagaggggtaaagttctaccacaacattgtgaggaagaggttggtgaggagcggcccccccacaagagtggtgttctctcgatgaacaaaagtggtggtgttggtgtggcacaggcgtggttgtcgtgtgtcgcgcctcttcttttctgtttttcacacaatgttctttctctacactggtgtgatacaccctccttttgtggttgtgagagagtctctctccaacacaccaggggcgttcttntcgtcgattatgtaaacaccactacgtctctgtgaggagagagatctgtgttgagagaagacccgacactacagtagagtgtggcgcactgctgggggggtgtaacccccccaccactttgctgtgatgagatcctctcgctgaatatatagttgaacgctctatgattagtcctcgacaccaccaggagccgtgctgttgtgtttttattaggcccacaaagtactcactactatagagagagagacgcgcgataaagtgtggctcttgggacacgagatatatcacgcctgtgtgagattggcgctcgcgagatctctcttgtgtgtttaaatatccggcgcatcacatctctgcacactggagagagagattgtgagattcacagtgagagagatctcttatatacctggttgtgtgaaaaccgccttcacaaagagggccacataaacttcccgtggcccttcacacaattgtttgtttccaccgccagaggtggagaatgaaagaaaaaagagccaccccacttttgtatagaaaggtggaagaattctggccacccgggagggaaccacgatcccaccggcttattagaaaaaatgtaactaaggtgtctaccccatgattatattttctaagactggttggtttaataacccgtaccctgctctccaaatt

SEQ ID NO: 655676 - DNA, 364 bp, Homo sapiens
gcacgaggtgaaacatgatgcaatcataagtcataggatgtagtgatttctcacctgtgtggctttccttcaaaaagttgtatgcagcctttctgtctgtgtttgctcactgttgtatccccactgccctgagctcagttcatatttgttgaatgaatgaagagttcccaaaggagtagacaagacagaggatacctaacttgtaatacatttagatttgggttactattccctgatgccttaggatctttcacaagcacacctaacacttgggggttctgtctagcctctaggacccatctgttctctacaggtgctccttaacttatgatagggcaacatcccaataacccattgtaaagta

SEQ ID NO: 655677 - DNA, 329 bp, Homo sapiens
  misc_feature (54)..(54): n is a, c, g, or t
  misc_feature (177)..(178): n is a, c, g, or t
ggctgaggcaggagaatggcttgaacctgagagacagaagttgcagtgagccgngattacgccactgcactccagcctgggcaacagagtgagactccatctcaaaacaacaacaacaacaacaacaacaaaacagttgtatcccagtaaataaaatggtttagatgaagtgcacanntttttggaaagacaaaaactaccaaaactgactcaataagaggaacagacaatctgaatagacctgtaacacgtgaagacactgaaatagtagtcacagaactgcccgcaaagaaacagcctaggcccatatggctttactgctgaatttt

SEQ ID NO: 655678 - DNA, 503 bp, Homo sapiens
gtcaaatcggagaaaaaaagcttttgaggggaaacgaaaagaacaggaagaaaaagaacaccaaattagagaacaaatactttaacaaagaaaacagaagttttgagaaattactgaaaaatttcagcgtgcccatgttcctctttcacagcggaggaaagcagtttcccgaaaaccagttcctccattagaagaggccctcaaacaaattcaggaattcacttaaaatcagaaagtaacctttcccttttccgtagaccaacaaataacttgagagctatagattctggctttgctttcggcttatcaaaaatgatcacaggcttcagaacaactcttattcaaatcaattgtgagaaaagaatggatggaaacatgagggcaactttgctactagcaaaatgtgtttcagcttaaactgggggaacttagaacctcttgagatcaccatctaagcattgctttgtgatgaaggtatcgatacccatctgcctttctattgc

SEQ ID NO: 655679 - DNA, 137 bp, Homo sapiens
tcagaactctgggatgcagagcgtgtgcggttgcctgcaagtcaggatttgagaccagcctggcaacatgtgaaaccctgtctctaaaaaaaaaagaaaatttagccaggcgttatggcttgcatttgttggtccca

SEQ ID NO: 655680 - DNA, 221 bp, Homo sapiens
tcattcttgtttttttgtgcttttttgtgttcttcagttttttctttttattgtgttcatggtctgtgacaaactaaaccaccctttttggggttattctcaaggcaggttttagctatttaagtggggggcccaactaagggctttcatggctggatctacttttcaggctaatttgtccaattgttagcgaggccctggatccctggtgggtgttccct

SEQ ID NO: 655681 - DNA, 326 bp, Homo sapiens
tagggtggtcatggaactttgagattaaaagcattctacaggccaggcgccgtggctcatgcctgtaatcccagcactatgggaggctcaaataggccggatcacaatgtcaggagatggagatcaacctggctaacatggtgaaaccctgtctctaataaaaatacaaaaaattagccgggcgtagtggcgggcgcttgtagtcccggctactccggaggctgaggcaggagaatggcgtgaactcgggaggcggagcttgtggtgagctgagatagtagcgccactgcactccagcctgggggacagagtgagactccatctca

SEQ ID NO: 655682 - DNA, 189 bp, Homo sapiens
aatgtcaggatatcatttggcacccactggatcagcagtcagtgcagcacacatcctcaacaggtgtcataaaaaaatagccagtaaatgataggctacagcaaaaccacactgaaacatttgatgaatttcactgccagtcaaacagacttgtgcaacacttgaaacactcagaaccatgactacacg

SEQ ID NO: 655683 - DNA, 151 bp, Homo sapiens
ggcgtgcagcggcctgggaggagagtggggccgccggcgcacggttctcactgagcctgccgggaggtaagcgcctggtccagccgggccccggctgtacccgccctcggtccaacgcgccttcccaccccgggaaggctcccgagccctg

SEQ ID NO: 655684 - DNA, 739 bp, Homo sapiens
ccgctaccttcacgccaatggtcgcctcaagtattctttatctgcctctgtcctacacatcgggcgagccgcctatagttacggatcatttctctatcgtcagaaacctgcaaacatcggctacttatcctcctgacttgcatagctagtatgcaacacgccttcatatggctattgtcctcccgtgaggccaaatatcattctgaggggccacagtaattacaaacttactatccgccatcccatacacttgggacagacctagttcaatgaactctgacggagtgcctacgtcagtacgacagtcccaccctcacacgattcttatacctttcacttcatctatgcccgttcattattgcatccctagtcagcactccacctcctattcttgcacgaaacgggatcaaacaaccccctaggaatcacctcccattccgataaaatcaccttccacccttactacacaatcaaagacgccctcggcttacttctcttcattctctccttaatgacacttgacactattctcaccagacctcctaagcgacccagcactattataccctaacccaacccttaaacacccctccccacatcaagcccgaatgatatttcctatacgcctacacaattctccatccgtcctcacaaactaggaggcgtcttgcctattatatcatgctcatctacataatcccttctcctattccgacacaagcttatatttgccctaaca

SEQ ID NO: 655685 - DNA, 1084 bp, Homo sapiens
  misc_feature (18)..(18): n is a, c, g, or t
  misc_feature (135)..(135): n is a, c, g, or t
  misc_feature (969)..(970): n is a, c, g, or t
  misc_feature (975)..(975): n is a, c, g, or t
  misc_feature (1004)..(1006): n is a, c, g, or t
ccctcacacccatctcancgcatatgcaagagcaagaggggctgataggatgtcttcatttggtgattttgttgcattgtccgatgtttgtgatgtaccaactgcaaaaattatttccagagaagtatctgatgntataattcccccaggatatgaagaagaagccttgacaatactttccaaaaagaaaaatggaaactattgtgtccttcagatggaccaatcttacaaaccagatgaaaatgaagttcgaactctctttggtcttcatttaagccagaagagaaataatggtgtcgtcgacaagtcattatttagcaatgttgttaccaaaaataaagatttgccagagtctgccctccgagacctcatcgtagccaccattgctgtcaagtacactcagtctaactctgtgtgtacgccaagaacgggcaggttatcggcattggagcaggacagcagtctcgtatacactgcactcgccttgcaggagataaggcaaactattggtggcttagacaccatccacaagtgctttcgatgaagtttaaaacaggagtgaagagagcagaaatctccaatgccatcgatcaatatgtgactggaaccattggcgaggatgaagatttgataaagtggaaggcactgtttgaggaagtccctgagttactcactgaggcagagaagaaggaatgggttgagaaactgactgaagtttctatcagctctgatgccttcttccctttccgagataacgtagacagagctaaaaggagtggtgtggcgtacattgcggcatccctccggttctgctgctgacaaagttgtgattgaggcctgcgacgaactgggaatcatcctcgctcatacgaacttcgggtcttccaccactgattttaccacacactgttttttggcttgcttatgtgtaggtgaacagtcacgcctgaaactttgaggataactttnnaaaanaataaaacagtatctcttaatcactggannnatagttaaaaaaaaaaaggagatgaacgcactacccagagctgacccaaagtacgaacgagacaacgaagctactagg

SEQ ID NO: 655686 - DNA, 1152 bp, Homo sapiens
  misc_feature (18)..(18): n is a, c, g, or t
  misc_feature (135)..(135): n is a, c, g, or t
  misc_feature (1037)..(1038): n is a, c, g, or t
  misc_feature (1043)..(1043): n is a, c, g, or t
  misc_feature (1072)..(1074): n is a, c, g, or t
ccctcacacccatctcancgcatatgcaagagcaagaggggctgataggatgtcttcatttggtgattttgttgcattgtccgatgtttgtgatgtaccaactgcaaaaattatttccagagaagtatctgatgntataattcccccaggatatgaagaagaagccttgacaatactttccaaaaagaaaaatggaaactattgtgtccttcagatggaccaatcttacaaaccagatgaaaatgaagttcgaactctctttggtcttcatttaagccagaagagaaataatggtgtcgtcgacaagtcattatttagcaatgttgttaccaaaaataaagatttgccagagtctgccctccgagacctcatcgtagccaccattgctgtcaagtacactcagtctaactctgtgtgtacgccaagaacgggcaggttatcggcattggagcaggacagcagtctcgtatacactgcactcgccttgcaggagataaggcaaactattggtggcttagacaccatccacaagtgctttcgatgaagtttaaaacaggagtgaagagagcagaaatctccaatgccatcgatcaatatgtgactggaaccattggcgaggatgaagatttgataaagtggaaggcactgtttgaggaagtccctgagttactcactgaggcagagaagaaggaatgggttgagaaactcagggacttccttcttctctgcctcagtgagtaactcaggcagagaagaaggaatgggttgagaaactgactgaagtttctatcagctctgatgccttcttccctttccgagataacgtagacagagctaaaaggagtggtgtggcgtacattgcggcatccctccggttctgctgctgacaaagttgtgattgaggcctgcgacgaactgggaatcatcctcgctcatacgaacttcgggtcttccaccactgattttaccacacactgttttttggcttgcttatgtgtaggtgaacagtcacgcctgaaactttgaggataactttnnaaaanaataaaacagtatctcttaatcactggannnatagttaaaaaaaaaaaggagatgaacgcactacccagagctgacccaaagtacgaacgagacaacgaagctactagg

SEQ ID NO: 655687 - DNA, 174 bp, Homo sapiens
gcacagatggcgggacatgccacgaggagggggggaaggccggcggcatggatggccgtgggggacactggagtcaggctggacagccctgtcggtcagcgtgtcacaccaacatccagctctgtgtagtagaagtcctcctctgtgcgctccgctgcggtggggagtcccggc

SEQ ID NO: 655688 - DNA, 132 bp, Homo sapiens
  misc_feature (26)..(26): n is a, c, g, or t
  misc_feature (103)..(104): n is a, c, g, or t
acggacgtccagctgagatctcctangcgaaaaaaaaaaacactagttaatcaacatttgtggtccgccgaaataaccattcgtaacgttagacccccacctnntcgaaatgtagactggtgtgagtgggag

SEQ ID NO: 655689 - DNA, 389 bp, Homo sapiens
ttacacggagctgtccggataccacagctacagcacctatgctcacggatcactctcgatagatcatgtatcacagacgagcacgatgagcagcaactgccgactaggtacagcttcccgagaaaaaaggtcatcgctcttctggtggcagtcctccttgaaagaggttgctgatgatgttgctgcccgcagggacacaaattgttcttgagcactgaggtggtcacagcagtcagtgtgctggagccacagaagtcaatcgtctcgtgaaaggtcttcaccacagccttggcgtagatggcgtcatcatccaccacggactgctgtagggcctggtcatagaactgcttcacatccttggcgatctggtccttggcctgtggtaaaga

SEQ ID NO: 655690 - DNA, 887 bp, Homo sapiens
  misc_feature (474)..(475): n is a, c, g, or t
  misc_feature (527)..(527): n is a, c, g, or t
ggtctagctgcgttcatgggtatatcttaccctgctgtggaaaaagagcgagcaggagatagagagaggaagggagaggcatgtcagaggagggaggcttcccataaatgtcagttaggacaattcaagccaaacttcaggggagatgccccctccgaatattcagccttcttattgaaaaatatgatgatggagaggcagggaggatttgcagagaaacgtaaacgaaatggtcaaggaaaattcaattagagtccttaagtgatggggagagggtgagaacaccagacaaaggcagggaaataacgaaagaaaaagattgaaagctgagcgagctcttattggaactgagtgtatgtgcgttggacttgatttatgacctttaagtgttttggcaaagatggaatattgctgtcatagccataaagtcactttgaattattgagagagagagagagtagtgggagagagacnncgaagagagagggtggagggcacacgagactgcaaaagggagtctgcacatngagaaagagacaggctaaatgaaagagtgctagagtcatggtaataaacaaaacagtcaatttaatttattcaaaatgctacactccacgagggaatttcgtggagacatggtgctaagaatattgacggttgcttttaagcgttgagaagagcagaggcggagacacaaggaaggacaaaaggaaaacaaaagacaaaggcgagggaacagcatattggacaaagccattaagttcattttgcgttccaccggtcagtcgttttttccgagcttcagacagtgcgtgtcaccagctctgtggaaaccgttgggtgggaggaagggaggagggatttggcttgtaggctaaccctgggaa

SEQ ID NO: 655691 - DNA, 526 bp, Homo sapiens
tatggatgtgatttgtactctttctttaaacaagcaaacaaacagacaaaaaaccttccaagctctgtaagctttaggctgcccaggcccagactcgggcctcggctgtgggaagttttagtttgggctacgatgttggtgccacatctgctgcatgtcctcagggggctctcatcccatagcagagatctgtcataggtgagagtcatccctacggaagcaacacctgaaaggcatccagggtgagccagttctggggcaggctgaagcctgtcgagcttcactggccaggtaaatcaggagactggaaaggcttctctgacttcaatcttcctcttctgcaaatatggagatgagaccttcctggaaaggttaaaatattgaaccataggtgaaactgcctggtctagccccaggcttgtgctgggagctcaggaactgctgatgaaagctggatggagatggctcaggggagcgcatgcctttcatggggatagtctggcctgctgtctgtcaaattaacctg

SEQ ID NO: 655692 - DNA, 341 bp, Homo sapiens
gcaccaccatcactttgccttgcctggctccagatgagtaagaacgtggccacgccaggccaagtggtggcagtggcaccagaagagttgtctgcagggagcccaggcagcccgaaaggcagggcagtggtgcagcaggacgtgtgtgcggcccaggctggtgctagcttcccgctgggctccagagtccggacgcacacacagtggctgaaagcggctgctggcgacctgacgcctcggcccgggctgccgtcctcgcaccacaccagcggcctcggagcgccgccactgccacaactcggctcccccgcccggacacagctcggtgtctgcagcggcgc

SEQ ID NO: 655693 - DNA, 171 bp, Homo sapiens
tggtgggttgctgggtttcagcgcgattgccttcaaccatggtgaggtctgcactgccggctcgcgctgctggtcgagcgttcgatcaaagacaccttcctgccgtcgggtgatcgaggccctcaagggctggaaaccctggcaatccactggaccagaacgacccaccga

SEQ ID NO: 655694 - DNA, 186 bp, Homo sapiens
gcgttgctgggggaaacagaatgggtacttgagtctaagctttagtggcaggccacagggcggggaggggattcaggcctggaccatgcccaggacagaaaagcaggagcagaacactattccaagaaagaccttacggaggaactcttgaggcgcaggttgcagcaggaagttacaccccgggct

SEQ ID NO: 655695 - DNA, 416 bp, Homo sapiens
  misc_feature (165)..(165): n is a, c, g, or t
  misc_feature (372)..(372): n is a, c, g, or t
  misc_feature (389)..(389): n is a, c, g, or t
  misc_feature (407)..(407): n is a, c, g, or t
agtctgtaaactccttcccagcatagggacccatgtttccatgttgctttgtgccccccagtgccctagccatagtaccctagcacatgataaccctcccacgtttttgctgaatgtgaaatataaagaattaagcagctgggcacagtggctcacacctgtaancccagcactttgggaggtcgaggggggcagatcacgaggtcaggagttcgaaacccaggctgaccaacatggtgaaaccccgtctctactaaaaatacaaaaattagccagatgtggtggcgcacacctgtaatcccagctactcaggaggctgaggcaggagaattgcttgaaccccggaggcagaggttgcagtgagccgagatngcaccgctgcactccancctgggcaacagagtganctctgtcta

SEQ ID NO: 655696 - DNA, 177 bp, Homo sapiens
  misc_feature (176)..(176): n is a, c, g, or t
gacctgggacgtaaatgatgagacgggtactttggcggacatgaaggaactggcatatggaaccttggctgtgaagctgcagactataagacagcatgagacgacaattctgctactgcaatgatgacatcgtttcagaccacaaaaagaaaggcgatgaccagagccgcaaggcng

SEQ ID NO: 655697 - DNA, 666 bp, Homo sapiens
ttccggtgtcgatgggtcatcggcacgggcggtccgctctatgggtctgcaagtcggtaccacatcacggatcatctgccttatgggctcgggtgatgatggttcctcgacatcgagcttgcccctgtcgggtttgcgtacgagttccacgtcactgagcttccgcgtcctgggttcggtaggtggttccatctaaggcgtcatctgcatcatgggtcagcgtggtagtactgcctcagcctcctgcgtagctaatgagagtgtcttgacattatcatcgtctcagggtgtgagcagtctccgcagacgtcgacagtgtgtcctgatacagtcatcagctgagggtggagctgagggtgaaatggtagtgagctgacgctcgataggtgtctggagatgatcatccattgagggtgtaagcggctgccgcagacgctcggcaggtggcgtgatattatcatctgctaagggtggaaggggagttagctcacgcaggaaaggtgtcttgagattatcatccgctgagggtggaagcggtcgcctcagacgctcggcaggtggcttgatattatcatctgctgagggtggagctgagggtgtaacgtgagtgagctagcgctcgaaaggtgtcttcagattatcaagcgctgagggtggaagcggccc

SEQ ID NO: 655698 - DNA, 1527 bp, Homo sapiens
  misc_feature (55)..(55): n is a, c, g, or t
  misc_feature (171)..(171): n is a, c, g, or t
  misc_feature (472)..(472): n is a, c, g, or t
  misc_feature (541)..(541): n is a, c, g, or t
  misc_feature (613)..(613): n is a, c, g, or t
  misc_feature (697)..(697): n is a, c, g, or t
  misc_feature (767)..(767): n is a, c, g, or t
  misc_feature (938)..(938): n is a, c, g, or t
  misc_feature (1387)..(1387): n is a, c, g, or t
catcatgctgcaaatgaatgagtgccaggcatcaccatcactaaccatgtatatncatgatgaatgtgcaatgtgtacgatgcttgttcccaaccactgtatatcaacacccatacccatgccatgcaccatccattacagtgattacattcaattggcatgacatatccnacagaactcatgaacactgttgcttgacaatacatatcacatcactaagccaaaatttgctcaatctaatgaccaaagtcctcgacattgtgacttgctcaagtggattgccatacccatcactccaatatccaacaatattgaccactggatgcctaatcctgtacatatgctaggcctccataagaacacacacaatttacagtaccatattgatggacacagacatataatttctatatgtgtatcctacatgaatgtcaattgtccaacacaacaagactgttgtatggcataaacntcaattcaatacaccatggacacacatgagagatacacacctgatcactagtcactgcctttgctattntcttgtctgcatgtcataactacacatggacatagatccatgacaaccactgtttaccaaccatgttactcntacatcttattgtctggacatgtggagcgtaacggccaaagatcccatcacgaaaaacaatcctatacattgactacatgttcntccaatagtatacaaatatgcaaaacaaagcactgactggttcaatggtacaaatgtgttcctgggatantctttcgaccttgcttttcccattaggtttgggagaatcattgggccacacatcacttcaaatgaatgcctaatatattgcataattgtttgagggattgaaacatgaagaatggtaaaccattcaatgatatacacaagggaacgaattggaaacccattaatttcttgntcttggtgtttattatcttaaccagggagaataggattgtgatgtgagaaatttgatatcaatgtcacggacaacattgaatatataattatggatatgatgtagtttttctagtgttttaatttaccggaatttcttataatggtgttggtatagaatacacatgtatatcgataggataatatgacaagagaaccaaactaatgtatataattgatagatgatttgtctagttgtgctgttattttatgttggcatcccggggtgttcacaaaatgttagaacatggatccggtggactcatgtaaaacaaacattgttttcgtgctgcatacactactaaacatacagtagaactcaatgaatagagacaacaaagaagaacaaaaacagacagcgacacttattctgttgcatccgtagtgagttacttgtcatttacgcgatcnctacacactagaagagacctcagtcgcaggtgtcattatgtatcttccttctcgtctgcctctcttcttcttctttttttcgttctttctctttgcttctctggtagcctcgtcggctccacaagaaaacacacaaaaca

SEQ ID NO: 655699 - DNA, 119 bp, Homo sapiens
gacacagttcatgtcagcccagcgtagccaagctcaggacaactccatgtacagtcccagacccagcctgtgtctttggctaacacccagccccgagtgcccccagcctcatctccggc

SEQ ID NO: 655700 - DNA, 357 bp, Homo sapiens
cgcgtagtgacgctctctccgctactgctgctacgacaagaccactggaggactaagctgcaggacgaaagcatgaagagcctgatccttcttgctatcctggccgtcttagcggaagtaacttggtgttatgagtcacatgacagcatgggatcgttatgaacttaatcccttcattagcaggcgagatgcaaataccttcatagtcccctcagcagagagtggagagctagagtccaagagatggatccgagaacgctcttaggcctgtccatgagctcacatagggaagccgtgtgatgactacggacttggcgaacgtaaggccaggggggatggatacaatgctgcctatga

SEQ ID NO: 655701 - DNA, 326 bp, Homo sapiens
  misc_feature (71)..(71): n is a, c, g, or t
  misc_feature (216)..(216): n is a, c, g, or t
  misc_feature (254)..(254): n is a, c, g, or t
  misc_feature (282)..(282): n is a, c, g, or t
  misc_feature (289)..(289): n is a, c, g, or t
  misc_feature (316)..(316): n is a, c, g, or t
acctgaggtcaggagctcgagaccagtctgaccaacgtggtgaaactctgtctctactaaaaatacaaaanttagctgggcacggtagcacgcacctgtaatcccagccacttgggaggctgaggcaggagaatcacttgaacccaggaggtggaggttgcagtgagcccagatggcaccactgcactccagcctggggaacgtagaaagaccgtntcaaaaaaacaaaaacaaaaacaaaagcacaggctgtnttcaagaaagagcaagatctggtctgantggagtngggatagagcatggggggtcaggggtnggaaaagact

SEQ ID NO: 655702 - DNA, 224 bp, Homo sapiens
  misc_feature (46)..(46): n is a, c, g, or t
cgctgacgagatgctaggcgctcggctggttaccgaacatctggancggtgatcactgcatactataatggggtgcactgcaaaatcttcagtctagagaacgagactaattgagaaccatgctcaatacttcctcaggttagaactgcagctgcgagctgatcttaaagtgcacaatctggctctgtttcgtcgaacgtcagctcgtgttccgggcagcgggc

SEQ ID NO: 655703 - DNA, 220 bp, Homo sapiens
aaagaattgaataatggcatgctctactctgggtctctaacgccacattggatacagaaggtttcttaactacttgattagaaaatcaaaattatatgtatcatgttaaaaaacaaaattatacagttcagaaggctgagacatggtcatttaaaataactatcattatggcggtgaaccgagatcgcgccattacactacatacggggcaatcaagctg

SEQ ID NO: 655704 - DNA, 311 bp, Homo sapiens
  misc_feature (73)..(73): n is a, c, g, or t
ctggaagactaataaaaggactgtgggggaaaagttaaagaaatctcacagaaagcaaggaaaaaagattttnccagtggcacacacctgtaatcccagctactcagaaggctaaggcagcaggatggcattagctcaggagctctaggccagcctggtcaacatatgaaatatcattagaaaaagaaaaaaaggtagaatctttaattaaaaaaaaaaaagatggatagaaaagactaccagtctaggaggtcaaacagccaaacatttgaaatcaagaacaagaaaaaacagaggtggaaaatcaatta

SEQ ID NO: 655705 - DNA, 1065 bp, Homo sapiens
  misc_feature (300)..(300): n is a, c, g, or t
gtcgcggcccatctcaactcactgggggcgcgctgtccatggcacgatcattgttatatcgtccccatagtagcccacaccgaaactttttgtccccaacaccctttgggtaaacgtgccacacatatggtgtgagcccaccccttgcgtttaaaaaatcttccgggcgttttcagggataatcgtccctagccaatctatatcttggtgtgggctctacgggaatcaactacgtgaaccacctgcttttctggcggccatcatgggagcaaaccttatggcccaaaagtattgcacctntatggtctttgtgaccctatagcccttcctgtggggacccatactgtttgccttcgcagatgtgctcccttttggccggccggcccctttggggcccataaagtttcgcagcgaccaataccctgttggggccctttccaattcggccagttggcatttggcgcttccctcaataggggatttcccctccacgtcccaggcggtccatgggggcccctttgtcgaagccccttccccggccgctgctcttgttccaccccccgtattcccctttcgccgtttcgcctgtcggcccccttactatcccgggcttggctctccattacctggcaacggggtgcaacttttggtcccctgtttccgtggcccctccactccggggtcattctctcgtccgcacgtgaacgcacaggcgatcgcgcatggcaacgcggcgacatggacgcgttgcgcgaaacgagttgactcgaatcccaacagcgtctccgatagaggagactgggccgcagcgactgacgtatcatatggagcctagcatacagtgccaagtgttgacccctttggaaggaacaagtggctccgcgtacagaggacccctcaagtaccttagggattgacatcctgggcctcaggtcagagcgcagccctgggctgggcggctcctcaggacccagagctgtcgcctggaaccatctcctgatgccatggctagagtggcccccatgacttctgcccggggtgttgaataccctcaggttcacagac

SEQ ID NO: 655706 - DNA, 444 bp, Homo sapiens
  misc_feature (438)..(438): n is a, c, g, or t
ctagagatcacgcagcatttcagcagcgtgaagggactcgtagctggtatcactgcagtgcttgtagcagctgtagaatctctgagctgcgtgcagtgtaattcatgggaaaaatcctgtgtcaacagcattgcctctgaatgtccctcacatgccaacaccagctgtatcagctcctcagccagctcctctctagagacaccagtcagattataccagaatatgttctgctcagcggagaactgcagtgaggagacacacattacagccttcactgtccacgtgtctgctgaagaacactttcattttgtaagccagtgctgccaatgcaaaggaatgcagcaacaccagcgatgccctggaccctcccctgaagaacgtgtccagcaacgcagagtgccctgcttgttatgaatctgatggaacttcctgtcgtgngaagcc

SEQ ID NO: 655707 - DNA, 1530 bp, Homo sapiens
tttggaaacacaaaggtttatttaaaaaaaaattgggtgggtagttctttaacatttctcaggggtgtgaggccaattctgtgggacccagtgtgccccaccacaaaagtgtggccacagctcgctgtgggggcgggggaaaaaggggaggggggtgaaagtgaaaaagagcccggtttttctcctctcagaggggcgtggggggtgtgtggagaaacacaccacacccctctttgctgtggtgtgccctctcctctgctggggctctccgagagagagaggagaacagacgagaagtgaaatatctctcgaggcgctgtgtgtggggttcttctccaacaaacccagtgtgtcgccccccgcagagggtgtgggagagaggagacgcatatagagagagcagtgtagacacagagaggggcgacacacagagagcgcacaagaacaagagagcagtgtgtgtgtcactcttagaacacacagacagttgatacacacacgcggaggggcgcgtgtgagagggccgtgtgagagagagagagaacactctcaagagatatcacaaaaactcacccgagtgttcatcacacaacaacacaaacacaacacacaaacacacaacacaacaacacacacaaatagaaaacacacacacagacgaaagacgacacacacaaacacacacaacacacacaaaaccaacaaacagagagagcaccacaaacagacaactaacacagacagacacaaaacacacagcaagaatacacaacaacagacacacacaagagggaggggcgcgcgccgcgagcgagcgagaggcaggaccacaagacacatctctcctccctcggagggcgaggagggcggaacctgagcgaagccccacgaacgacgacccacacacaacacagatggtagagaagaacaacgcaagaaaaacaagagacgaagggcacccacaccaaccaagaagaagggctacaacacctcaagcaaaaagacaaaacgagcaacgacacaaacccaaccaacagccagcgacgggagcgatgcagcagcaccacacagcacacaggggcgacaaaaacgcagcgacgaccacacaagagcagagcagcgacatcatagaggccccccaccactacatagccgagcaaacacaacaacacagccaccacacccgacggcaaggcaggcggcgacgaccaaaaccagcaccagacggcggtacaacaagacaccccacccaccagccacgaaaaacaaaacacctacggcaaacgacacgccccgacgaacaacagccggccaacagaagaggcagcacatcacaagccagcgccgaccacacccagccgcccgagacggaggacgaccaaaccgcagcagtaccacccacccaccgggtgggcgcgacgcggcaagagacaacgcagcaggccgaacagccacaacagacacgacacgaccccgacgagaagcccggcacccaacatcacgcacgcccagaacacaaaccacacgggg

SEQ ID NO: 655708 - DNA, 458 bp, Homo sapiens
caacacaaaacttcaatcttggcttcggtctgctttctcttcctctttagcaaatccatatcttgagtagaagttgcctttgagcataagatatctcttgtttcactctcgtggcgcttgtgaattctctcaagggtactcttttcccgaagaacgcgagcttcagatttggcttgacaagctttctcaaaatcattctggaccatggtaaagtccttttcatgactttctgttagcctccagttataatgtttgctatctcggtatcttaaaaaagctgcatcttttggacgcatttgtgcccgaagttgctctctctatttctctcttatactcatctagctatatgactaaagatccgaacttgatacgctgagggtaaggatctgcaaacggatcatcaatatgctgaaggttctcagcgagagaatctctgttaaatgtcgaacttgtatgag

SEQ ID NO: 655709 - DNA, 790 bp, Homo sapiens
aattcgcggccgcgtcgacagagacagaagggatggcacatgcagcgcaagtaggtctacaagacgctacttcccctatcatagaagagcttatcacctttcatgatcacgccctcataatcattttccttatctgcttcctagtcctgtatgcccttttcctaacactcacaacaaaactaactaatactaacatctcagacgctcaggaaatagaaaccgtctgaactatcctgcccgccatcatcctagtcctcatcgccctcccatccctacgcatcctttacataacagacgaggtcaacgatccctcccttaccatcaaatcaattgggccaccaatggtactgaacctacgagtacaccgactacgggggactaatcttcaactcctacatacttcccccattattcctagaaccaggcgactgcgactccttgacgttgacaatcgagtagtactcccgattgaagcccccattcgtataataattacatcacaagacgtcttgcactcatgagctgtccccacattaggcttaaaaacagatgcaattcccggacgtctaaaccaaaccactttcaccgtacacgaccgggggtatactacggtcaatgctctgaaatctgtggagcaaaccacagtttcatgccatcgtcctagaattaattcccctaaaaatctttgaatagggccgtatttacctataggacccctttacccctttagagcaaaaaaaaaaaaaaaaaaattgtggggcgcccgaaagtttaacactcgtggggcgcc

SEQ ID NO: 655710 - DNA, 176 bp, Homo sapiens
  misc_feature (3)..(3): n is a, c, g, or t
tcnatccgaggttagtcatgtccaccacgcccgccacccccaaggtaggtttcgtaagcctcgcccgcccaaaagccctggtcgattccgagcgcatcctgacccagctgcgcatggaaggctatgaagtcgtgcccacctacgaggacgccgacgttgtggtggtcaacacccgc

SEQ ID NO: 655711 - DNA, 103 bp, Homo sapiens
aagtatcttcctctttgacctccccaagcgctagggttacaggcatgaggcaccaggccgggccaatcatgtattttctaagtatttaaattgcttttcattt

SEQ ID NO: 655712 - DNA, 567 bp, Homo sapiens
  misc_feature (466)..(466): n is a, c, g, or t
  misc_feature (478)..(478): n is a, c, g, or t
  misc_feature (523)..(523): n is a, c, g, or t
  misc_feature (525)..(525): n is a, c, g, or t
  misc_feature (556)..(556): n is a, c, g, or t
aattcgcggccgcgtcgacagagacagaagggatggcacatgcagcgcaagtaggtctacaagacgctacttcccctatcatagaagagcttatcacctttcatgatcacgccctcataatcattttccttatctgcttcctagtcctgtatgcccttttcctaacactcacaacaaaactaactaatactaacatctcagacgctcaggaaatagaaaccgtctgaactatcctgcccgccatcatcctagtcctcatcgccctcccatccctacgcatcctttacataacagacgaggtcaacgatccctcccttaccatcaaatcaattgggccaccaatggtactgaacctacgagtacaccgactacgggggactaatcttcaactcctacatacttcccccattattcctagaaccaggcgactgcgactccttgacgttgacaatcgagtagtactccnatgagccccatngtatataatacatcacagagtctgatcagagtgtcccacataggntngagcatccggagtcaaccaacattcacgganagacggggccg

SEQ ID NO: 655713 - DNA, 395 bp, Homo sapiens
gacgtacatataaggtggggtgacctgaatatcaattaacacagtatataaaatcctctgcatctgcgcctttgaaaaagcatcacagggctgggagcagtggctcacgcctgtaatcccagcaccttggaaaggccaagacgagtgaattacctgaggtcaggagttggagaccggcctggtcaacacggtgacaccccgtgtctaccaaaaatacaaaaattagctgggcatggtggcaggcgcctgtaatcccagccactggggaggctgagacaggagattcacttgaacccgggaggtgaaggttacagtgagctgagcttgcgccactgcactccagcctggcgacagagggagactccgtctcaaaaaaaaaaggggcaacgctaata

SEQ ID NO: 655714 - DNA, 626 bp, Homo sapiens
  misc_feature (70)..(70): n is a, c, g, or t
  misc_feature (73)..(73): n is a, c, g, or t
actgaacataagaaaattcattctggagagataccttacaagtgtgaagaatgtggcaaagctttaaccnctnccatcccttactcacataaaagaattcatactggggagaaaccctacaaatgtgaagaatgtggcaaagcttttagccgatcctcaaaacttactgaacatagataattcatactggagagaaaccctataaatgtgagagatgtgacaaagcttttaaccaatctgcaaaccttactaaacataaaaaaatacatactggagagaaactacagaactggaatgtgtgataatgattttgacaacacctcaaatttttctaaatataaaggaaatcatactggtgaaaaattctagaaatgtaaagaatgtgtcaaagactttaaatggttttcacacttcattgtatgtaagataattcatactggagaaaactacaagtgtgaagaatttggcaatactgttaattaaggctcaaaccttattgcacaggaaagcgtttatacttaagaaaaattgtacaaatataaagagtgtaaaatagccattaatatctgttgacatcttaatatcagaatgttggtacttaataaaagcattataaatgcaaaaaa

SEQ ID NO: 655715 - DNA, 535 bp, Homo sapiens
  misc_feature (154)..(155): n is a, c, g, or t
aaaaaacttgaattgagagagtacacaataaaaattaaaatgctacggacttttaacttgtctttgtttaaaaaatttgcctgcaaagtatcatgaccatgccaagtgatgaaaacaagtttgatagagaaaacattaattttttgtactatcnnaatattataatacggtctctacactataagtaggctatgttctcaaatccattgtaaattggttgcttagacctggtatgtcacaaggaaccatgtaccagccacaaagcacacttgactttctgcagtcacttacaatgttgtttctagggaacaactcattctgaatttgctgcacctctggccctgagagctaagacttcccagtagcattgctttcgatctagtttccggtctagatccccacttctgtaccgtctccaccaaagcgattaggagactcagaatagcttttgcttttgctaggattctggtgagccctgaaagtccccagtagtggcagggagggaatttaaagcctccgagccggaagaaataat

SEQ ID NO: 655716 - DNA, 1056 bp, Homo sapiens
aattcgcggccgcgtcgacagagacagaagggatggcacatgcagcgcaagtaggtctacaagacgctacttcccctatcatagaagagcttatcacctttcatgatcacgccctcataatcattttccttatctgcttcctagtcctgtatgcccttttcctaacactcacaacaaaactaactaatactaacatctcagacgctcaggaaatagaaaccgtctgaactatcctgcccgccatcatcctagtcctcatcgccctcccatccctacgcatcctttacataacagacgaggtcaacgatccctcccttaccatcaaatcaattgggccaccaatggtactgaacctacgagtacaccgactacgggggactaatcttcaactcctacatacttcccccattattcctagaaccaggcgactgcgactccttgacgttgacaatcgagtagtactcccgattgaagcccccattcgtataataattacatcacaagacgtcttgcactcatgagctgtccccacattaggcttaaaaacagatgcaattcccggacgtctaaaccaaaccactttcaccgtacacgaccgggggtatactacggtcaatgctctgaaatctgtggagcaaaccacagtttcatgccatcgtcctagaattaattcccctaaaaatctttgaatagggccgtatttacctataggacccctttaccccctctagagccataaaaggtactaatgtggtggatgctggctcgggaagtactgccgcatgcgtgggagcatttaaccagttgtaaccaccgagggccaggtcatggcctgatctgtacttcttatggaagatgcgtgcccacatggggagccgataaacaggctactgatgtggacggctttgaccaagcccgattttgcggatgacttggcctgggccgtcctggaagcacgcctattcggggggagcactagggacaacaccggcacagttcccctgcgagaataaactaggtaagggtgcacaccgcatgtctggtgatcagcacgat

SEQ ID NO: 655717 - DNA, 451 bp, Homo sapiens
  misc_feature (394)..(394): n is a, c, g, or t
  misc_feature (434)..(434): n is a, c, g, or t
  misc_feature (448)..(448): n is a, c, g, or t
ctccgcatcctccaatccccactctctggtaacctctattctactttctgcctctatgaatttgccaattctaggtacctcatataagtggaatacagtatttatccttttgtgtctggcttctttcacttagcataatattttcaaggttcattcatgttttacatgtatcagaatcttgttttttcaggtggagtaatgttctattgtgtgcatatgccacatttggtttatccattcatcagttgatgcacatttcggttgttcccacctttgggctattatgaataatgttgctgtgaacactggtatacaaatatctgagtgggaattgctgggatcatatggggaattctgcattttaactttttaagggaactgccaaactgttttnccacagaggctgttaacatttttacatccaaaccaggcantgggaccgggggtnaaa

SEQ ID NO: 655718 - DNA, 994 bp, Homo sapiens
ttcgcccagcatagaacagggtatcaacattgtcactgagtacgcgacgtcataatcactttaccctatctcgtttcctatgtcctgtatgcccttttcctaacactcacaacaaaactaactaatactaacatctcagacgctcaggaaatagaaaccgtctgaactatcctgcccgccatcatcctagtcctcatcgccctcccatccctacgcatcctttacataacagacgaggtcaacgatccctcccttaccatcaaatcaattgggccaccaatggtactgaacctacgagtacaccgactacgggggactaatcttcaactcctacatacttcccccattattcctagaaccaggcgactgcgactccttgacgttgacaatcgagtagtactcccgattgaagcccccattcgtataataattacatcacaagacgtcttgcactcatgagctgtccccacattaggcttaaaaacagatgcaattcccggacgtctaaaccaaaccactttcaccgtacacgaccgggggtatactacggtcaatgctctgaaatctgtggagcaaaccacagtttcatgccatcgtcctagaattaattcccctaaaaatctttgaatagggccgtatttacctataggacccctttaccccctctagagccataaaaggtactaatgtggtggatgctggctcgggaagtactgccgcatgcgtgggagcatttaaccagttgtaaccaccgagggccaggtcatggcctgatctgtacttcttatggaagatgcgtgcccacatggggagccgataaacaggctactgatgtggacggctttgaccaagcccgattttgcggatgacttggcctgggccgtcctggaagcacgcctattcggggggagcactagggacaacaccggcacagttcccctgcgagaataaactaggtaagggtgcacaccgcatgtctggtgatcagcacgat

SEQ ID NO: 655719 - DNA, 685 bp, Homo sapiens
gcagggctggctcaggtgcacaggtacccagtggtgtgtccactgtgagggcaggcgctgtgcaggtgggtctgtggcaggcggtgggctcccaccagcgcgggactccttggaggaccccgccatcgccgcttgcggagggctctgttgtcagcgtggacttcgcggggcctcgccgcccgtcgggactggattctgcgaccacaaatgttgcgctgtactgtgtgtgcgcatactgtaatgatcactcttgccgtgcacgcgatcccacgtacttctccttttctcgtggcgacgtcatcgccatcagccctaaaatgctagcttctcggggtcggtgttcttctctgggatgcgtgtctggaacgtgtagttggccatgttccagaaggctgaatccgtcgcccgggcacagctgcatggggatatgccaggggtatccgctcagctcataagtctagctagatgtgtttgcacatctggtcctgggtggtggaggagtgcctcctcagggagacgtggtgcactggccgactccctgggcaggcataactccatgcgcgaaggttctgcattcgttcacgcgtccgggcgacagccacctgcagagactcaggatcggaatggccctacactgacccttgcaaggtgcatctgccgctgtggctctgggggggtacgctcc

SEQ ID NO: 655720 - DNA, 960 bp, Homo sapiens
tggggtatgtcagccaccacattaacaacagtaaatatctcattcacacgagagagaggaccctcgtgctcatactagcccaggtatgcaatactaacatctcagacgctcaggaaatagaaaccgtctgaactatcctgcccgccatcatcctagtcctcatcgccctcccatccctacgcatcctttacataacagacgaggtcaacgatccctcccttaccatcaaatcaattgggccaccaatggtactgaacctacgagtacaccgactacgggggactaatcttcaactcctacatacttcccccattattcctagaaccaggcgactgcgactccttgacgttgacaatcgagtagtactcccgattgaagcccccattcgtataataattacatcacaagacgtcttgcactcatgagctgtccccacattaggcttaaaaacagatgcaattcccggacgtctaaaccaaaccactttcaccgtacacgaccgggggtatactacggtcaatgctctgaaatctgtggagcaaaccacagtttcatgccatcgtcctagaattaattcccctaaaaatctttgaatagggccgtatttacctataggacccctttaccccctctagagccataaaaggtactaatgtggtggatgctggctcgggaagtactgccgcatgcgtgggagcatttaaccagttgtaaccaccgagggccaggtcatggcctgatctgtacttcttatggaagatgcgtgcccacatggggagccgataaacaggctactgatgtggacggctttgaccaagcccgattttgcggatgacttggcctgggccgtcctggaagcacgcctattcggggggagcactagggacaacaccggcacagttcccctgcgagaataaactaggtaagggtgcacaccgcatgtctggtgatcagcacgat

SEQ ID NO: 655721 - DNA, 814 bp, Homo sapiens
gcgggtggatcaactgtggtcaggagtttgagatcagccaggccaacctggtgaaaccccgtctctactaaaaatacaaaaattagctgggcgtgatggtgggcgcctgtaatcccagctacttgggaggctgaggcaggagaatcacttgaacccgggaggcggaggttgcagtgagccgagatcgcaccattgcactccagtctggcaacagagtgagattccgtctcaaaaaaaaaacggaaagggacaaaaacaattagcatttatacctcttcctgttgtctcaaccgccatgaaactttctgaacactccaaattcagtggaataatccaaaacaaactttatacagtattcacactaatttaaccttcttatacgtaatagtatactttaaaaaggcctcagggtcatataatcttctaaacaggctacaacttcaggtggcagttacatttaaccaactatgtcctctagttgacgaccaacttacggcctattttcaacctggcttttgttagccctcaggtgccatacacattgggtgccaaaattaaactatccgtaagaactcacactgcaattggtcaaaaaacccattccgttataaggtttacaactggcccaaaaatctcaaaagaggcccggctatttcatgctaatccttggcaacatcattactttaagttggaattttctccagtaatggacgtggctgggtgtgactttagtacatacgtactccaatattatgaacacctcaaataatggattggattacaaccacaatcctctcctttgcacacgtaatcc

SEQ ID NO: 655722 - DNA, 298 bp, Homo sapiens
ctgggtattctacaggatctctggtatggaggtggcttggaaggtggctattgaggtggccttgtgagttggatttggtgggtgttttgctggtggctttgtagactttggtgcttgtggtggcggccatcctcactggcaatgagaagatcaccatgcagaacctcaacgaccgcctggcttcctacctggagaaggtgcgcgcctctggaggaggccatgctgacctgtaggtgaagatccgtgactggcacttgaaacagagcccaggtagccctgagcgggactacagccccag

SEQ ID NO: 655723 - DNA, 828 bp, Homo sapiens
aattcgcggccgcgtcgacagagacagaagggatggcacatgcagcgcaagtaggtctacaagacgctacttcccctatcatagaagagcttatcacctttcatgatcacgccctcataatcattttccttatctgcttcctagtcctgtatgcccttttcctaacactcacaacaaaactaactaatactaacatctcagacgctcaggaaatagaaaccgtctgaactatcctgcccgccatcatcctagtcctcatcgccctcccatccctacgcatcctttacataacagaagaattcatactggggagaaaccctacaaatgtgaagaatgtggcaaagcttttagccgatcctcaaaacttactgaacatagataattcatactggagagaaaccctataaatgtgagagatgtgacaaagcttttaaccaatctgcaaaccttactaaacataaaaaaatacatactggagagaaactacagaactggaatgtgtgataatgattttgacaacacctcaaatttttctaaatataaaggaaatcatactggtgaaaaattctagaaatgtaaagaatgtgtcaaagactttaaatggttttcacacttcattgtatgtaagataattcatactggagaaaactacaagtgtgaagaatttggcaatactgttaattaaggctcaaaccttattgcacaggaaagcgtttatacttaagaaaaattgtacaaatataaagagtgtaaaatagccattaatatctgttgacatcttaatatcagaatgttggtacttaataaaagcattataaatgcaaaaaa

SEQ ID NO: 655724 - DNA, 221 bp, Homo sapiens
cggtcctcgcgaacgtgtttccaatcatgacttcccgggtgattcttgttcttcgaactgtggatgctcaatgctgccaggttgtccgggcatcagtactggtctggtgccaggcagctgccctgtgaattgtcaagcgttacctcatcacccagtcatcaacgtgattcgggcacgtagatgagaagattgggcatcttgtgcgcttcattgaaacaacg

SEQ ID NO: 655725 - DNA, 309 bp, Homo sapiens
  misc_feature (298)..(298): n is a, c, g, or t
tgcagcgtgccttctgtcgagaatctgttccgacgtcaggccgaggcaaccgtccagaaggatgcagatgctgtggacaaggtaatgaaggaactggatgaaaacggagatggggaagtggacttcaaggagtatgttgtgcctggtggctgctctcacagtggcttgtaacaacttcttctgggagaccagttgagcacagtcctgtgagcagtgccttcctctcccacttgtcaagatttccctttagcgtgcttgctcctcaccccacctgtacctccctatgtcccaatctttncccagtctcga

SEQ ID NO: 655726 - DNA, 140 bp, Homo sapiens
cgaacaggacacgcgcgagatagaaccttccagaagtggtcagctgtggtggcgccttctggagaagagccaagatacacatgccttgtacagcatgagggtctgccaacgcccctcaccctgagatggaagccatattg

SEQ ID NO: 655727 - DNA, 1195 bp, Homo sapiens
  misc_feature (919)..(919): n is a, c, g, or t
agcggagtgctcatgttcgctgtgatgtgtctgacggccaggggctcgcgtctctgatgccgtagtgaggacatgatggcggtggatgtcccgtcgtttactccatggacgtccacattgctgaaggagccagagaaaccgatcgatccgccagatagacatgcccactgtctgctagcgggatctttacccactatactggccgtcaacatactgcaatggaggacgttctcccgagcgacatttgtacctgctccatcctgacattgcaagaatctagctcattgcgactggcatcgctccgttccgtactagatacttggccctggcatttagttaaagaggattgtctacctccagtaatgcttacgaataagatagtggccacattcacctttcactctcatgcataatccgatagtacgatcaggactagttatacacaataccatgtgccgtagtacgggtatcgattcactgggagactttgtgctagacaaacgcttgtgatttttgggccacgattccaggggaggggcaactcgaggtgaattatcccaggtgaaccccatatgtatgttcggccggtaaatgcttccccgagatatttggcgaagaattgacgtttgggtaccaatttatggccatcatttttaactatcctctttctccaaaatattcggtgggactaccccattcacgatacccctgtcccaatgtggccagccactggaaagaacccgagttattttttacaacttttccttgacttccataaccatgacatatctgtgtttggaaaatctttattttttgtcttacgccggattccacaggttttatagttgtgttcaaccttggatctattcgtcctgttcccacttcccttattccttttctctatccccctcacttggantttagtgttggaccgcgagtttaatagtccgcgtttttcaaagcttttttgccttgaacaggcgagaaaattttagatcatattgcccaattcagagttccttaattgcccagagccacgttttagagcactgtgtggtggaattggttgccgtaagtgtgggacaattgcaattttggacgaaacaatcgaggtgtctgagatggtggtttcaccaagagggtccacttttctggtgcgaacattatcgcacatgggaaaatgattgactacatg

SEQ ID NO: 655728 - DNA, 207 bp, Homo sapiens
cttggcgtgggcgtattcgtctctacgtggtgcacacctgctggtcatgtacggcatcgtctacacccgcccgtgctccgggacgcccactgcatccagccctacctggcgcggcggcccaagctgcagctgagcgtgtacaccacgaacgagttcccaccatggttgctgagaaacaacattcgacctggtaagaggatggctgtc

SEQ ID NO: 655729 - DNA, 571 bp, Homo sapiens
cgcgtgattagccagtatatgcgtaccccgacttgaccagaagtcaaagagaaaacgcaggttcggttaaaatcttgggagacagctttttggaaaagttcttttcctacccaagcagaactggatcggctaagggtggagaacaagctgagcaggagagagaacgattcctggttctcgggagaggcggaagcttcgggacagcattggaacaaggtgtcttggattccctgggggtctggcaaaaaagggcaagatttggtgagccccaatggtggtctttctcgactcgagcatctctccggtcgccagttaacaaggtctctgaccaagccttcgccaacaatttgaaaagttcaagaacaggttcatctcctgaggagcacgtttggaaggacccagtgggctactccccaggagtacgaccagttagcggccaagactggcctggtccgaactgagattgtgcgttggttcgaggagaacagatggttgctgaaaacgggaaccgtgaagtggatggggcagtacagcaccagccattggaggttcatcgacttaagtcgataaa

SEQ ID NO: 655730 - DNA, 171 bp, Homo sapiens
gtcagccaaaatatgttgtcatagagacagaacatctatttcccagcggacttcagtaacaaaggctacgttgcaggggctgcgatctaccatcagagacatgtcagcgtcccttgttatgtcattacagaaggaaccttaagggaatgaccgattgtaagcgctgcaatt

SEQ ID NO: 655731 - DNA, 1060 bp, Homo sapiens
tcaagggttcagtttccttaaaggacccccatctccctgaaggggcagtgggcagggcagctaggtggatgggcaaagagatggttcatctggaaagattctggcccggattggaagggcttggcccacatggctgggaagggccccctcccaggaaaatgtactctcgaaccaggcgttcgtgggctcttcctctgcgcgtgccgaggattccagtttctccggccaagtgtgtgtttgtgactctcgtatagctccacctgtgccaattctgggacttcaggggaaaaggcaagcttcctgggccctcggagaaacccaagaacctccaagaaaagagggggagcgtgcttagtgggtggggtcccaaaaagagagggagtgcaccaggggcggaagaggcgatatcttcccctcaaggcgtggcgtccgagctcgcggggacaacactatcccaagtgtgacagggaacaagtgtggcgagccctcaagtgaagaggctccgtgaaaggggggagattccctctcgaggggaagcaggcgaaaattaccctcgtgggagtatacccagcgagggcacaccaaggcgcggcccctataactcaaaggaggggggcttccccagaacaatctcgtgggccagggggcccaccaagtacagacggtggtgtgttccctcaagtgggagcggcataccgtgtggcgcgcatataaaaatttttcaatccccaaaacacaaaaggggtcacctctttgggggcccaggtttgaaccagaaacgggggggcccctattgggcgccattggggggccctacaagcaacgcccaagcgcccgtgcgctcaacattttccataccaaaattcatcccctcccttcaagaaaagccaggggcgtgccaacgccccgccttttatattctcctcaatcaatcaccggcctacaagcactgggggggcatactgtgagtctcttatataccccggtagaaaccccatatcattctttaccgggaaggtaggtgcccattactaaacgggtgggggatcattatgagaca

SEQ ID NO: 655732 - DNA, 355 bp, Homo sapiens
ggtccacatgtgcattacacagctagaaacccagaatttagtcctcaaggcataatataagagaaccatacgtgcttaagaggttcttaagtctaatgaaccattagaccagcatttcccagccacagctttgtgacactcaatacgtgtccaatttcttctaagggcttcacagaattctccaaaaagttaatccaaattcagattcatttaaaaatatatcttgtgttgcccaatccctttgtgaaagggaatgtgttacaaccgtggaggggaaaaaaatgtgtataggcacaggcgcgtatggctagggggtctgtgtattagacatagtggatcatatgtgctcgcgtgc

SEQ ID NO: 655733 - DNA, 256 bp, Homo sapiens
gtttgggcttcccagggtcctttgaaaccgttttttgttttgtttgggaattattgtggaaacctttcaagtgacccaaagggtggggtccccctgtggatgagggatgacccaggggatggctttgatcccatggggcctggggggggggccccaaaagcttgtctgtagcgggttttgggggggggacccccttcccctttttgcccccctttcctgggggaggggtcccgggtttgggttttgtttttcccaa

SEQ ID NO: 655734 - DNA, 850 bp, Homo sapiens
gatacgggagttcctccttgctctcgcccctactctttctggtgttagatcgagctaccctctaaaagcagtttagagtggtaaaaaaaaaaaaaaaacacaccaaaggctcgagccacaaaagggatgaaatttcttctgggacatcctccggcttctcccgttactggatcgtctggctccctagagtccttcgtgaagctttttatccctaagagggagaaaatcagtcaccgggcgaaatcggtgctggattacagggagctgggcatgggaattggggagactggactggcctatgaatttggctaaaccttaaaagcaagctgggtcctcctgggatataaataagcattgggactggtgggaaacagctgccaaattgcaagggactgggtgccagggttcataccttgtgtggggtagacgtgcagcaacccgagaagatttttacagtctgcaaagaagggtgaagggcgaaatgtgggatgtcagatttaggaaataaatgggggggaggctatacatcaagatcgttggtaccaagatcccagattggaagcctttgagtattggtcttgacatttgtgggattaaagggggttttttcctggaggggaagaaaaaccctgggcattttggcagtggtggtccggaaaggggattttttcgggccttttagtgggtatgtgcagcaatttgcggttgcgggtcacaccttggcagagagagggggcccaaaaatggcggacccacgttggcgtttgaaagggtcgcaacaccagtgggccgcggagagaagaacggtgtgggaaggagattcttaaaagagaggcggggaaaagaattg

SEQ ID NO: 655735 - DNA, 161 bp, Homo sapiens
ctgagatcttgatcttcttcaccgtcttgttgcgtgttgttcggtgacgtgtacgttgacgctgatcggttctccactggtaatagatctccttatccatagaggcttctacggtgcaaagggcttaatccgactgacagtggctaccgatgctcgaactt

SEQ ID NO: 655736 - DNA, 808 bp, Homo sapiens
  misc_feature (760)..(760): n is a, c, g, or t
tccttccaccctcatgctggtgggggcatgccaggagaagctggacaatgacagcagagacggactctttggtgtctgcccagcgagatgcggccacgccggagggatggcccagagcatgcaagcccggctaaagggaactgcgagggggaacggtggggagaaccatgggggtgagtgatagctcatccaaaccttatgagcagtgagctggagaccagccagcttcgtttgactcagatgaggatgactccaccagcaggttcagcagctccacagaacagagcagtgcctcacgccgtgatgagaagacacaagcggcggcggcggaaaggcagaaggttcctcggcattgagcggtcctcgtccttcagcagcatcacggactccagcatgtcactcaacatcatcacggtcactctcaagcatggaacaaatataacttctgtgggcatctccattgtgggccaaagcaaacgagcgtggtgacggcggcatctacatggggctctatcatgaaggggtgggcgccgtggctgctgatggacgcatcgagcccaggagatatgtgtcacaggtacaccgagatcaacttttgagacccttgagttaatgacgcatgccagtccgggtactgcggccagattggtgcacaaagccgggccatcgccctgacgtgtagccaggtgctggggcccaggtccaagtgggttgctccacattgccatggggcgaggccctccggcccttgcccctgggnctgggttccacatgggctgaccggccttcctggtaggggggcctctgg

SEQ ID NO: 655737 - DNA, 735 bp, Homo sapiens
ccaggacgagctctcgtggaaccggagggagctagtctcacgactgcctataatgcgggtggctcaggtgtctgtatgtgtctctcatcgtcttgcctcctctcttcgacacgcgtagtctgtggtgcagggcactggagaatgtccctggatgtacattgcaccgacctcctcctatgtgtactttctcagcagcctcatggccattctgcttttcatgtccttcgtgtcatcatgtaatgatggtcatgcagttcctcgtgtgggcctttgagatggtgctaaggcagtgatgtggcccactaacaaggttcctcgcgctgcgcctgtgcatctggtggttctctgctgccctatgctgaccattgtgcttttcctcgtcctccttgatcttccttcctctgccttcactccgtgagcgtcgggcgagcttggcatagttacgttcgcgaatgcgtcctggtacgtccaagggatatctaagtggtttgcaactaggatccttagccctctctcctttaactatgcgccataattagttccccattccactagatcatgcctccatataaataccgtatacccatcctactcattttgccttccgagaaggttgtacgcgcatctaatctaaatgagtcaacttcctggatacactgacgagtatgctcaaattaataagacctcggacgataggctatcacgcacaaataaccaaaaacagccacccgtcgt

SEQ ID NO: 655738 - DNA, 1285 bp, Homo sapiens
aggtgctcggcagatgaactgccacgccaagtggggaaagctacgatatgggcatgtgtgctgttcgacgtgcaccgatgtgcgctgggagtagtggccgcgtgatggttggaggtcctgtgatgggcgtcatccttagcgtgggcctaggctctctgctaatgtctcctacggtagtcagtcgtctcaagacgtccagtgggggcagggagtctgtacagcaccgagggagacgagagagacagtcattgcgtcgcagcggtctgcttaacatgtgtactaccccagaaggtagaatatgcacacggctgtcggctcgccagcgacgaggcctctgtgaacgcggcatctcccctcgaagttgggcgtgaattgtcgtcacaagtgactataacatacgaataggcctggtatctagcgaatgcgtcgagatgctcgatcgaccaagctcgcacgtctatccgggggtcttcgcccatctacaaacaggctcgcgaagtcgacatcaaccgggagggcgcagggcaatgcgcgaccagtgtcgatttaagcatggaatccgtttcacaaggcgaagaggaacgggagtgaggcgcgcacgagaaggaattgcgacgagtctggttgcccgaggtaaggccagcgcgattatagaatgtgaccggagagggcacagagagattcctggaggaagagcaccaaacgtaggtaacacgggaaactactgggtcccatgggtcctccgagtgagggtcggttaccgagttaagttaactactctacttagggtctctgtaaagtaactacgagcgttgagccgcgaggagcacaagtctgtctgtaaggcgacgtggtacgtgggccctttcgtcaagtgttcggggcccgcggagacggcaattttagcgtgccaggtgtaaccccttgaggttaatccccgttcgtggtacacaatgggggctgggccaattctccctttgaatgagacatgagaggctccgtgttacattgtcacgttcacccgtgccgttagggcgccaaatcctcgagaggcacaagacccgcattctagtaacccaaacgcgggttcggaaggcaaacctgtggagcgcatgcacatgcgagggctttcatttcctctgtagcgaaaagttctactcccggtgtggcaagaggcgagaaaaactcctttataaatttttccatgagtgtgcctgctatgtacccatttagagatattgggcaacatcaaacttttaatcccctaattaaaggcaatttacta

SEQ ID NO: 655739 - DNA, 791 bp, Homo sapiens
aaattcgaagggtatggttaccaaagaaatttgggacacttttgaaagcagacattttaaaatataattattgtttaaaactacatttataaacttttatttcagttacatctatttaattcactcattcttaacaattatgcttggaacactcatgaaaattacatgagacatgagacaaagctgccatcacctcaagttattttcctattatccatcttgacagcacatgcatgtcaggcagtcatgacaatgcaagagccctaaagttaagtacatgagtattgttgacaactcagaagacacaaatgttctcattaaactgacaatattaaacgagtcttattacagatttactcaagtcatgtaaacctgaaaagcatttagactagttcctatatttctaggaattttaggtatactcatttatctctaagccaatttgaataaagcctttaatatttgtagaaaagacctttacaatttttcatttgctcaatattcaaatagtcaaaaatcatgccaacaagggaagaaagtggacagaggggcagagcatataaagttagcaggggcttttagaaaaggaatttcagttgactaagacgttcccatgggagaagcaagatttaatagaacagaggggcttaaaaaatgtatggataagctgaatattaggttccagtgaattctggcatagtgttccttaaaaaattcctctcgggctgggcagaggattagcgggtaatccaagatttggggggtgaagtgggaggatcacgaggtaagag

SEQ ID NO: 655740 - DNA, 218 bp, Homo sapiens
cccgacaaaaaaaaaaaaccccccccgcgggggggggggggggcccccccccccctttttttttttgggaaaaaaaaaccccccccgggggccccccctttttttttagggggggggggggggggggttttttttccccctaaaaattttgtgcccccccccttttttttttttttgtgggcccgcggctttttttttttggggggggccccccccca

SEQ ID NO: 655741 - DNA, 180 bp, Homo sapiens
ttctttctttctttctccttccttcctttctttctctctttctttctttttcttttgagacagagtctggctctgtcgggccagcgtggagtgcagtggtgcgatctcggctcactgcaacctccggctcccaggttcaagtcattctcctgcctcagacccaatgagcggctgggatta

SEQ ID NO: 655742 - DNA, 993 bp, Homo sapiens
tgtcttggggacgtgcaattgtgtggtccggagtggcacgctgccctctctgtatgggggcattctacatggactagccgatatataggggccccccatgtgcgcttgtcagcggcggtatgcagtagcctccgggacacggtggacgtttgttgtaagaataccaattggcgtccgcctcagttttaatagtgagcgtttgctttcgctatttagtggttgagcctgttgcgccccgcgagttagtcatgtcgtacctcctcctaagccgacacctgtggcgtgtggtttataccccacgcccgcgtgttgcccctgaattctctcgtcagctgtcccctggcttgtcccccacctaaaggggtgaataaaatgacgcgtttgtttggccgttacgccctatgtgaaaggatacccgacttgttgggtaatatgactgatgattagttgtggcgtagatgttggtcaaccgccgaggtccgtatgccacggcacgctatgtgtcctgcacgccgctcgccgttcgcccgtatacccttctttgggtcgcgcccgacttggtgaaaagaggggacccaagtgcgcgtaaccccccccgtgtggtgtgctccgcccccccctcgtcgtttcttcccttgagtggagctcctttgccctcgcctaaataccgggctttttggctcccaagtgcgcaataatgaatagtttccccgattacctaattcctttggtatttccccccgcgttttgcaccgccccgacgacccactcacttgaatcgtcatcttcctactccaacgcgtattttatttcccccccccttatccaaacatggtaatccccagcttatgcaaccacattgtaataagaaattacgctcccgttttcaaaacacctacccccgcccccgctcctcctcgcacccacacatgctttgccccctccccgattccttcctttttccccctttaaaaaaaaaaagcccacaaaaca

SEQ ID NO: 655743 - DNA, 665 bp, Homo sapiens
cgtttcccatagggtcggacctccgtttgttcgggggaacatgaagctaagcctgggtgggctcatttcctgatcacactcacaagaggctgtcataggaaccacgatgggagcgtcactttgcagggcactgagaccctcgcgatcgtcatcaccgggcaaagtggagcaacacgagacccaatgacgcgtggttgaggtcccgaggatccatctcaggagcctcaggatagactaggctgcatggggccctagaccctgaggagggcgtcctatgatggcgtagcactgaccctgcgtgaatttaggtcagccagcgctctagggactcaccagtcaatcagcgttcctaatattcagcctgcagggctaaggtgccatggcgcactcacccacagaagccatgccccactaggggctcggaggcagaatacgaggaatgaaccgcgaaagcaaccctaatagccgaattgctgaggaccacgaattcggattctccgggagtgcgtattcagccatgagcaccgaaccccagagcagtatccagctaggaacgccggaaggttcctagaccggactgccggaagtccctacggccttgcgctcgctcagattcctctcatcatcctcacggcagaaggacgagaaagcttgcttctggaccc

SEQ ID NO: 655744 - DNA, 279 bp, Homo sapiens
gctcgacggcactgcaccgcgacgaaagccaggaagacctggccgcccacaccagcgcctgcgccgcgcgttcttcaatttgccgggcctcgactgaagcggcattgacccatatcaacaattgcctccctgagtagcggcacaataatggcaccttgccaaaactgtttccgccctatcagggaagacccaccatgcgtgcctggcttagcaatatctcgctgaaatacaagttctgggccgtgaacgcggtcgcttgtgtcaccaccctgttgtcga

SEQ ID NO: 655745 - DNA, 100 bp, Homo sapiens
gctcactatgtttgtgcccgcttgcatcttttctcagtagatgttggattccacttcatggccaaggcctatagcatagccttgttgctgtggctctggt

SEQ ID NO: 655746 - DNA, 865 bp, Homo sapiens
ggcccgagaagctggggagcatggaccagaccccgcagcgctggcaccatgacgctcgcccgcttcgtgctagccctgatgttaggggcgctccccgaagtggtcggctttgattctgtcctcaatgattccctccaccacagccaccgccattcgccccctgcgggtccgcactacccctattaccttcccacccagcagcggcccccgacgacgcgtccgccgccgcctctcccgcgcttcccgcgccccccgcgggcgctccctgcccagcgcccgcacgccctccaggccgggcacacgccccggccgcacccctggggctgccccgccggcgagccatgggtcagcgtgacggacttcggcgccccgtgtctgcggtgggcggaggtgccacccttcctggagcggtcgcccccagcgagctgggctcagctgcgaggacagcgccacaactttgtcggagccccgacggcgcgggcagaccctggtgtctctacggagacgccctggcacggtggactgcggctactgcgactgcagacacggatcagtacgacttcgtggcggccaaaaatgacgcttcgaacggccccagcgcaagccatatgcaagctggcaccccacgggcgcccctgcactggcaccagcccactgcgaactacacccggacgacacaaccaatcagcccccacccacccgcctcggaccgcaacccgaccaccccccaaacccggatctcgccccgccctcatccccttaccggccccctccctcccagccaccacacccaacacgccccgcacaccaactccaccgcgagcccaccccaacccgccccgccaccaccccacacagcaccccc

SEQ ID NO: 655747 - DNA, 494 bp, Homo sapiens
ggcttgtcccatgtgttattgttctcttttctttgtttcctgctgccttttcaattgagtagtttttatctccctgcttgtcttattggttatgaccagtccttgcccctcagaagatatgatatggattataaggatctagtatggattctttatagatccaattggaacatggataatggtcaggtaacttcaattatagctatgtgcttggcaagtattgactctttattcattcccatcttaaaggtataggatatattcttgcagttaaaatatttaaagtattaatgttttgtcatgggttcaaattaaaggtccgagattatttttattatattttattttgatgtagattgttatagttaggtaatatttcaaaatcgaagaggtttatccttcacatgaaatgaaactgttttgatgtaattgattaatatatttaaattacgtgtatgttctagaaaggtaacatattaatttcttaggctatg

SEQ ID NO: 655748 - DNA, 175 bp, Homo sapiens
atttgcgaccaaaatcatctgggtttatatttgaaaaaaccttgttttccaatttaaaaatgccaagaaagttgtgaataccgttcattatcactaggatcaagaaaaagcaaatggtttaagtttttacataggaaatctaagaactactcatcaataaaacgcaacactatca

SEQ ID NO: 655749 - DNA, 358 bp, Homo sapiens
gttatgtgttcatatgtcctcagccaggagctatcactattaggaaagctctgccataaactactagcgggtgccaatggtcacctgccacactcgaaccaggatgtacgagcagccagcagacagagactgaccatcagcagaccagtccagggaggtgcactgatgtggaactgccttgactgctggactgttgatgcaggagcctgtgacagcacacagccagtagcgatgagggctgaaccacagggcgttgatgatgtccccaccatataccgtgtgatgttaggctatgtagagagcccataacatgatctgaccatacttgcctacaggcacagagggatccatccggagg

SEQ ID NO: 655750 - DNA, 374 bp, Homo sapiens
tggttcaggctgattatagaagttgcacacttgtatgccttggagtccctgcctccccttttgacgtgtagggactcattgtaatgcttttaaatgtgaagcctccaccccaaagtgaacatgggacgcatgtaacgtgcatgttcagtgggcacggctcaggactctctttgtgaatattcatagctcctcctggaacctgaatatgtatgtttggccagctcaattcagcatgaggctcatgctgcaacaccgcctccttccaggtgcctgccagctgtttctgccagaggctgcgtctcccggcctgtcagaatggccaccctgcaggctgtaatcctttagaagaaataaagatcccctttccagatgta

SEQ ID NO: 655751 - DNA, 494 bp, Homo sapiens
  misc_feature (483)..(483): n is a, c, g, or t
ttggctcatgcctgtaaccccagcattttgggaggccaaggtgggaggattgcttgagcccaggtgttcaagatactgagaccttgtctgtacaaaaaatcaaacaattagctgagtgtggtggcatgcacctgtggtcccagctacttgggaggcagaggcgggaggatggcctgagtctgagaggtcgaagctgcagtgagctgtgattgagccactgcaatccagcctaagcgacagagtgagaccctgtctcatttaaaaacaaacaaacaaatgaacaacaacaacaaaatacccaagagttttaattagcttttctctcaggagtgttatgaggcttagatgatgtgatgaatatgaaagtgctttaaaaagtagaaagtgcaaggtgactgtaaaaggctgatggtattgtctcatgccaagcagcttgaaggctgtgctgccttctgccatcgtaatgcccttggcaggatgtangccagtcattc

SEQ ID NO: 655752 - DNA, 394 bp, Homo sapiens
ggaaggcccaaaccaactttttattgagcttatgcagttaacaaacttgtaaacagggccagtcgacaaagttttgttgaatattacagcttgggcccactaaacacacctttttttgagattaaaaacaaaaaaaccaaagtaaacaaattctgggagagaatgaagagacattttttgagttttccaaaaaggcaaaataaaaaacgccacatggtttggtcccaggcgttcaccatgcctaaaggggtgttgttataaccactgtttcccctccttgccagtggttaggtaaaggtaggggaaaagggtcattttggacatgctgcaaatacagcatttgctggtgttgacaccctcctggggctgtggtggcaaactgctgtgtcaggag

SEQ ID NO: 655753 - DNA, 105 bp, Homo sapiens
gcaagattgtattctataggggcctagcggtgtagcagccgaacgaccgagcgccagggaggtcttgagcgaggaagcggcgcataacttcgtattgcatacatt

SEQ ID NO: 655754 - DNA, 153 bp, Homo sapiens
ggcgagtaggacatacttctaggtgggcactgtgcggaaacttgaggatgaaatcagtgagctgcatgcacttaaaaaggcatggcctgtctacctcactatgagatgcaaggtcccactcgcccaaaagccctgattctgcatcaatactcc

SEQ ID NO: 655755 - DNA, 141 bp, Homo sapiens
cggagcccggggcattgagttgactggaagtacatccagagtagcatagactccaacatcagtctggtccattacatcgtcgcgtctgctcaggtcctggatgataacacgctatgatctgtaccacacccatcggcgttg

SEQ ID NO: 655756 - DNA, 506 bp, Homo sapiens
  misc_feature (5)..(5): n is a, c, g, or t
  misc_feature (453)..(453): n is a, c, g, or t
cctgngactgactgcagctcaggatgtttgccatcacaacggcagagccgcagttcacacccaggcacgttctccccaagacctgtggctgcaaccactgctatgcatggaatgtgagacggacggtgctcgcctagccaacagttgatgctgaatacatcttcatctgtgtattgaccatctacccttttcccatgatttgtttgtcaaaattccttgctaatttccttattaaaaatggtcagtattttaattctcctgattcatgataatttctttgacaaggaaattaatactttgttaaatgagtacaaatatttttaaacaatctgttttacttttaatctttgtttatggtgatattttgggcatacaaaggtctttaatatccatgttattaaattcacaaatatttccctttgtggattttgggtttcagtttataattctaancatattctccactccatgattacaaaataaaaataaaacaacactggtatttt

SEQ ID NO: 655757 - DNA, 591 bp, Homo sapiens
cctcagcctccgctgggactacaggcgtatgccaccaagcccggctaatttttttgtatttctagtagagacggggtttcactgtgttagccaggatggtcttgatctcctgaccttgtgctccacccacctcggcctcccaaagtgctgggattacaggcatgagccaccgtgcctggccttaaattctttaaacttagatataatatctgttcatcaagtcaaacaaacaaaactctaaataccagtgcacatagccattctaagttaacacatctatgatcttatcagatcggcgttaactgtgaagggccagaaaccaaacacggttttaacaggggggcacaggagcatcaggacaaacgcctatgaaccacacagtcacactcccccaattggaccaaaactgagcaacactgagcgggacactgtacagacacatacccatggacaccgtaacaacaaaacgaaaccagatcccagaaatggaaatcgccaaatcgtgacaccacaggtcggggggtacaaacaacgggcccgaaatacaactgcacgcggatgaacacggtaatagcccaacaccacatatgg

SEQ ID NO: 655758 - DNA, 958 bp, Homo sapiens
  misc_feature (5)..(5): n is a, c, g, or t
  misc_feature (453)..(453): n is a, c, g, or t
cctgngactgactgcagctcaggatgtttgccatcacaacggcagagccgcagttcacacccaggcacgttctccccaagacctgtggctgcaaccactgctatgcatggaatgtgagacggacggtgctcgcctagccaacagttgatgctgaatacatcttcatctgtgtattgaccatctacccttttcccatgatttgtttgtcaaaattccttgctaatttccttattaaaaatggtcagtattttaattctcctgattcatgataatttctttgacaaggaaattaatactttgttaaatgagtacaaatatttttaaacaatctgttttacttttaatctttgtttatggtgatattttgggcatacaaaggtctttaatatccatgttattaaattcacaaatatttccctttgtggattttgggtttcagtttataattctaancatattctccactccatgattacaaaataaaaataaaacaacactggtattttaaaacaaaaacacccatatttaacaccctccccccacccaacacccatttatcaattccgctcctttttttcccctcccgctcctcctccccacctaacaccgaaataatggggtctctttgggtcttcggggcgggatcctcggacgcttttcctttatgggaggataatccacacccttcccatttctccggtcccttgggcctgtcgtgggggagacggtcccctttttcacggggtaccgctttacccaaaaacgggaatcctgaacaaatttcgttcaacgcccaagccccaaccctaaagtcccttgtggcgtttcctatccccccctggaattaacaatccttattgagggcgaacccagactaaaaccggcgttccctagcttttcccttccttcccccccataaaactcccttttcctgaaagggcttcatacagcaatttag

SEQ ID NO: 655759 - DNA, 640 bp, Homo sapiens
cgtactgattacctaaatgatgaaaaaatctgtacaccaaaacactgaaacacccaatttacctatttaacaaacctatacttggacccataaagctaaaataaaagtgaaaaaaatggcaagcaacaggcatatgaaaaggtgctcaacatgattgatcaccagagaaatacaaatcaaaactacagtaagatatcatctcgccctggttaaaatatatccaaaagacaggcaataacaaacactggcaaggatgtgtagaaaagagaatccttgtacactgttggtgggaatgtaagctagtgcatccactatggagaacactttggaggtttctcagaaacctaaaaatagagcaccatatactacagcaatcctactgctgggtatatacccaaagaatggaaatcagtatattgaagagtatctgcatccctgcatccgtatgttttacacagcactattacaatggccaagattgggaagcaacctaagagttcatcagcaaatgaacgaataaagaaagctggtcatatacacagtggaatattatcagctattaaagagatgagatccagtcatttgcctaaagtcaatggactggagatcatctgtcagtgaaatagccaagccaaaaagg

SEQ ID NO: 655760 - DNA, 446 bp, Homo sapiens
aggaacagagagggagcagagggttcggacttcaggaacttaactattctggaataaggaatgaatcagctgacctgggccagcaggttttgaacgtagaatagtatacttgcctttctcacccagattaatcagtctctgtacttgtttcccttttggacactagtgtctaggttaactaattctgttttatggttgtgctaaattcatagcaggtgccttaattcttggcttttagtcaaaccattccatatcagaattttccttggtttactatagatatttggctttaagtagtagtaggtgttttttaatgtacaaggttcataatatttgagtggtaaattggtataggtaggaatcattttacatttgtagaattggattccctttggatttcatgtgtaattcaacaattaagtggcggttatattcaggttggatta

SEQ ID NO: 655761 - DNA, 262 bp, Homo sapiens
cacctaaccaggcagcatcaggagtatatgccattccataagtcaagactcagttatccagtgagactagtaaattaaaaaaataaaatattccagccaggcacagtggctcatgcctgtaatcccagcattttgggaggccaaggtgggcggatcacctgagttcaggagttcgataccagcctgcccaacatagtgaagccccatctctactaaaaatacaaaattagctgggcgtggtggcacatgaccgtaattccag

SEQ ID NO: 655762 - DNA, 647 bp, Homo sapiens
  misc_feature (598)..(598): n is a, c, g, or t
  misc_feature (614)..(614): n is a, c, g, or t
  misc_feature (625)..(625): n is a, c, g, or t
  misc_feature (643)..(643): n is a, c, g, or t
ctcctgccaagggactggggcctcaggtctcaggcaaggagagtggccccgaggactgtccggagaggggtggccagccctgctgcccagagggactgagccactggcagggaaggaggcggtgttccccctggcctgactttcctccaaaggacgtccccctgaggcttaggggctgagcatgcccttgtgctccctggaggacgcggccagagcccccacaccatgaacagcacccccaggaatgcccaggccccgagccaccgtgagtgcttcctgccctctgtggctcgcaccccctcggtcaccaaggtcacgccagccaagaagatcaccttcctcaagcgaggggatccacggtttgctggggtccgcctggccgttcaccagcgcgcctttaagaccttcagcgccctcatggacgagctctcccagcgcgtgcctctctcctttggggtgcgctctgtcaccacaccccggggcctgcatagcctcagcgccctggagcagtggaagatggaggctgtactctgcctgataagaagcccccaagacccccagtggaccaggccggcacaggagagaaacccactgtcanagttggggatgtgaangcaacgtgaanccaagaactcttcttccngaaa

SEQ ID NO: 655763 - DNA, 323 bp, Homo sapiens
gtgaaacttcacaaaatgctcaaataaattataacattcagcttccttcagtaaacactgttcattttaacagatgacccgattcttctccgcttttcctcctttataagtgtcatgccaacagagagtaacattcctcagtctgaaggtatcacataaggaggatcagatacaggagattttagaaggcttacagagattagcttagagaatgacctatccactccagcatcccaatgtgtactgataaatacatcagtgacactgactcccacgcctgtgagttcaactgcggatatcacagttattcagccagtttctga

SEQ ID NO: 655764 - DNA, 925 bp, Homo sapiens
gtatgggcttcctccaaatccatgagtgggcccgcgtgagaatgtaaggtgccacaaggaatctgcctgatgatatatcgtacacatgatatatgccccgtggccaagagagagtctgatgccatggatgtacaccctgatgtattccttgatggactgtcaggtctacaacctgctggagatgtaaatttgtcattgagcttcctggaggacagcagcatggagaaagatcctagaagaggcctctgacttccctcactcccaaccatcattacaggaaacgactgtgaactcctgagtacagcttggtttctgactacatcccagaaagctctggcgatcgtgtggattaaaatcccgtggatctcctctcagcggtgtagtggagtcacatcttgcgagtatgctggcagggagccacacctattaatacagatatctcagaagccctcaccccttggccgggagcctgggaaccttggttttgacacaccagggttgtgcaggatggggagggggttctggccttgggccttccttatgatgcagacatggtgaattctacattccaagggagggagggcgaatgtttacggcagggtggttatatgtgggcaggattattttcatccatggctccacatgttggtgaggtcctctcttgtggctagggtctgcggcgaccagaattatacacgtgagctcatctgctggttaggatgtccgccagtggtccttctggatctttttgggcctttttaaacattttcgaaccggtgtcgcagtccactttatttcttcaccgctccagatgggttgtgcccacagggtgtgtgggcctggccctggtggcctggttccctctgttggcgtgggaggagcctggcgccttaaggccacatgtgtttgtggtccaaaggagtgg

SEQ ID NO: 655765 - DNA, 172 bp, Homo sapiens
gcttgggctgctcaggctctgtgctgtgtcatggcccgtcatttctccaggctgccgcttgtacatgtggctatttttctgttgtgtctcgtttctatcctttctttttccactggctttgcgtaccgttttttttttttttttttttttttttttttttctttttctattt

SEQ ID NO: 655766 - DNA, 775 bp, Homo sapiens
aagatggcggacattcagactgagctgtgccgtaccgagataaggcatgcctgaccgatctttcaaacacgaatgaagacgggtcctgctgggtagacactgtgggacggagaagctcccgcgggtacttacaagaacatcggtctggtgcttcagagacacgcctaagggaggctattgatgggcaccctacgagttgtacgagaggacaatgccccgtatcactggttgagtgtgtccattcagaggagcggatcctcatcatggacgtggtgacctgagatgcaagtatgcgagtaggacctagttgtcaatccggacctgtagcactcatcttgcaacgttacaatcgcagtcgagaagatacaaacacgtcgtatcagagcaaagacgggccagctgaagaaacaagtagttcttcgatacgacccgtgtcccccgcatgtgttccagggtgaacgagttctcgaggactctggggtgtactaattctgtctgccatgtggcggagacgaatgttgcccaagtgcttcttgaggccaaagaacattgtggccggcctttcgatacggttagcgtcctagagggtcaagcccagcagggggatgctctgggccaacccgagaggaaacggcaagtatcccgaagagaaggtaacttggatcggcttggggaacccattcagtggccaccgacgtctcccggcaacaaattcgcaacattgacacaggtaaattgttgcgtaccaattctttgaaacaacaacatgctagta

SEQ ID NO: 655767 - DNA, 203 bp, Homo sapiens
atgaagccctccccgggtactcactaatctattcttcatctttacagtttgtgtcactttgagaatgtcatataaatggaactatataatatgtgacctcttgagataagcttttccactaagcacattacccttgtagtctattcaaggtgttgcaggttatctatagcttgcttgttcctttggattactcagtagtattc

SEQ ID NO: 655768 - DNA, 1125 bp, Homo sapiens
tgagacgtggtctctgtcgccagggctgggattggcatgggtgtgagaaatcttgggctcactggcaccctctggcctcctgtgttgtccaggcagattctcctggcctcagcctccggagtacgctgggagattgcgcaggcatccgccatcacacccggctaaaattccagaatttttccaggtaagaagacaggggttttggcgcgccagggctgggtctcaaatctccctggaccttaaggtggatccacctggcctcagcctcccaaatgtcgctgggagattcacagcgctgtagaagccgcctggcccgggccatcagataaatttgtctaacaaatgtgctccactttcacaatacaatgtggctttgaccatgcgtggccatataagagaacacaaaaacaattcttgggcgtggtggcgccatacgaaggaacgaaccgggggagtgaatcgcaaggcccttgtggccctttccccctttaagcctcctctcaactctctgcatgaggctataaacacagctgtggagagcccgtagagtagtggctccactcagttgaggaactctccgcgaagaccccacagctgttgggaccacatattctcccctgttaggattatataagccctgttggggagcgaacaacgcacgacttgtgtgataaccaatcacaatatgcctagttgaggggagctccccccacaagaggcgcactcatccatgttggagccccaaatgtggatcacaagcgttgtgtgccccaccactgcctggtggcgccccacctcttacgagggacaacgctcgttgggccaccagttgtatctgcacttctaattaaatggattcctaccgacatttagtcaataattctaacgacaacctgtgtgggaaggtggtcatcccccagggatcaccaaaagaaagatttctctgcccggggacgttgcttgcaaacacacgttgtgtgttcttacacaaacagtttgactccacctcattgtgtgttaggggggaggaaaaagccgatcccaatgtgggggggcactttataccacaaacgaccatccaccattactcgggggtgaagaaaaacacttccgaggaataaaaag

SEQ ID NO: 655769 - DNA, 119 bp, Homo sapiens
gtttcctgccccagttttaggccccataaagattttttagaaggcttgccaatcatcatcttccggtaagttcttacacggctacgccctaaactaattgcctttccccctcaacccta

SEQ ID NO: 655770 - DNA, 258 bp, Homo sapiens
tctatttgacagattgtgtaaagacagagcgagagcggtttgttgagtttcgtggataacgaaccgtggatgggaatgatgtgacaaggaagagacctaaagactggatccttccctcagaactatgtatcatgcagtaggcaggaagccaggcacctgggcgtatgaagtctgaccacaaacaaggattggcaattcttaccaagtgaggacgatcgttgacacagtatgatctctatttgtttggcatgcctaggc

SEQ ID NO: 655771 - DNA, 583 bp, Homo sapiens
  misc_feature (307)..(307): n is a, c, g, or t
atatcctggatgcgagctgcgtgggaggtgctagctccgccgtcgccttattcgagaggtgtcagtgcctgggagactaggatgtcggacacgtggagctctatccaggcccacgagaagcagcatggactctcggcgggagaggctgcatgtggaggcggaagcaggactcggggcgcttggatcgtacggaatccagaggcagcatggtctccaaccttccgtagtgacagcccagtgcctactgcacccaccgtctggtggcgcttaagcccagcacagcgttcaggcacgcttccgtgatatngaggctaccagatcctgatgttatgaggaagaaggttgctactagcactctctctgactctgggccttaaccagttggcccagctggactggcttgtgtccagtctggtcttgcccagtgcatccagggccatgatgctcctgccattcaagatggcggtagaaagcctcctgcagaagttagcagctcaggagctggatagacggtaaagcgaggtctcctacagagatgatgcgacatcctactcttgtaacctatgctgaccattccaagctc

SEQ ID NO: 655772 - DNA, 742 bp, Homo sapiens
  misc_feature (235)..(235): n is a, c, g, or t
gccgccttttttttgtttttttggacttccctacatcagttttattataaaacacaaacaagtattctctctttctgtaagggcaatgggtctcaaatcaatgcggaacacgaaacattgactaatcaccaagtgcttctaaattatgcaacaccaacaatttattttttcaaaacaagcacaaagcaatcaaccgcaattattatcaccaacagagggcaccgtggaatcgtgntagagggtgattcccaaacacacgacaataagtcagaaaaatcccagtgggtgaacaccgtgaactattcctcaccatcgtagtcttgcggacagacagaggggcgcttcactccaactcacccacacactttctcgagtctcccagactgtgacacagacagtggacatgctggctagacagggtggtgcttctaatcacctatcacacacctctcgagctccatattgtgtgcctgtgtgtggccagacacatcctatcccccaaatctttccgcaaagacacgtgaatatggcgcagagatccctctagtgggatccttttctttccctctttttcccctatataattgcacccacaaacccagaggctcttaccgtttgaaaatgtttcccacatcttcttgtgatattgaaagccccggtctttaacacaaaccgagacagagttttcccctttgagggggagcccccaaacctagtgacacgaggggggggggcgtcccaa

SEQ ID NO: 655773 - DNA, 179 bp, Homo sapiens
agggccagcatccacgcaggtccaggcagcatcccagcaccatcctggctcaaccacggtgcacaacccggtactctcactcaaaccaatcaccacacacacatattcagcttgggccatggtgggccagtgtgcctgtcagtccgccagctcctcaaggaaggcatgcaggccaggca

SEQ ID NO: 655774 - DNA, 106 bp, Homo sapiens
tactgactaccccgttttcagtggaccctgtgtgcaggtgcgttttccctatccacaggggtgttcgtgtgtgtgcgcgtgtgcgtttcaataaagttagtacact

SEQ ID NO: 655775 - DNA, 803 bp, Homo sapiens
gcgtgtggggacggcggtactgctttcggacagagttgttcgtagaacttgtgctgttccccgtctccgtaactatctcgtgtcggttagatagagcctggagtacacaacatgtagttggtcacgtctacgcttgaacactagcaggtgggctagtagtcgtaggatctggatgcgctcgggcgttagggcgggatccagagccgcctcgaccgtgagagctagaggtctgggtgacggcggccttactaattatatgccaacgcgcgcgaagtgccaagcgtgagcccatgtgaatctcggagtaggcgccacataggtcaggtcgatagtatctcgcacgtttgcactcccagacagatgttacttgcactcggtggacggcagtgttgagattgcctgcatatggaatcaagatccttgccctgaagtacacacgtgggttcacaggcgataagcgtatcaagggaatccggctgtgcctaaaatttgcaggtgccttcagttgggcaagtccgttctagattcaaggctgggcacggccctggccaccaagagcgaggggccaaaggcccaaactggccctgtgtgcctagccctatttgaagggacattggacgcgtccagcaggttacttgcgcaagtacacccgtcacgaactcgaattgtttgctaatctccgggaacccccgtccatggagacattactgcacgattaaacttactagatccactgtattctgtgcaagggttaccgtccgtggctctttacaagcttggcagcgaagggatagagtcgtcca

SEQ ID NO: 655776 - DNA, 684 bp, Homo sapiens
gagattttggtttatccataatagaatgtatttcattagattctctgattctatataagaatgtgaaaagattgatatattgttgttagaaataatgttatttctttccaatttttttttttttttttttttggaaatggagttcgtcgcttcgtgttcacccaggcttggagttgcaggtggtgtgactcctcggctcacgtgcagcctcttaactcccaggttgcaggctattctccgtgcctcagcctcccaagttagcgtggatttacaggcattacaccaccacgccgtggctagtgtttggatattttctcgtagagattagggtttcaccagtgtttggccaggcgtggtctcaaactcctgtgacctcaagttgattccacccactttcagctttcccaaagcacgtgggattacaggtgtgagccacgtgtgcccggcaaatttttttacctttacagaaggtttggctatatttaatggtgagctcaatttttcttggtacactttggtccccccagattggggggcacaaatataaatattaatcttttaaatatgttgtcagccatattgtaatggggctcccattgggggtgatgagaaagttctggaactagataggggtcagggttatacaacatcataaatgcaattactggccactgaatggtatgc

SEQ ID NO: 655777 - DNA, 151 bp, Homo sapiens
aaaaccccccccccccccccccccaaatttttttttaaaaaaccccccccccccctttgggggggggggggggggtttttgttttttttgggcccaaattttaaccccccccccgggggggaaaggggtttttttttttttggggggggta

SEQ ID NO: 655778 - DNA, 356 bp, Homo sapiens
cacgaggtggaaaatggggatcatgctgccgacctcgcagagctggtgtgaaagtaaacaaggtcacagggacatgcatgtgtccacaaaaaagtgcatgacagcactttgtaaaccatcactccatgggtagagatgtttatccgtggccaggcacggtggctcatgcctgtaatcccagcactttgggaggccaaggcggacggatcacctgaggttgggagtttgagaccagcctggccaacatggtgaaaccccgtctttcctaaaagtacaaaaaaattatcctgccatggtggcgggcacctgtaatcccatctactcaagaggctgaggcaagagaatctcttgaaccc

SEQ ID NO: 655779 - DNA, 126 bp, Homo sapiens
atagagtgttatcaagacggaccctgcataacccaatacaaacgcccttcttcgtctgatccgtcctaattacagcgagtccgtacttactcactatcatctcccagtttccctacggtcttggat

SEQ ID NO: 655780 - DNA, 1447 bp, Homo sapiens
  misc_feature (326)..(326): n is a, c, g, or t
  misc_feature (443)..(443): n is a, c, g, or t
  misc_feature (1447)..(1447): n is a, c, g, or t
gcctcgttgtcgcgcactctgttcattccgctcgacttcgagccgctcgcagttctcatctgccggttcgcaatggaagaagagatcgcctggccagctggtgattgactagatgtgcatccggccatgatgcaaaagcatggatttatgctgtgaggacagtacgctcacctcgaagcacgatggttttccattccgatctggttctgggtcgcctccgagcaacaacacctagaggtcgtagatggttaggagtcaatggggctcgagaatagggtactccttaacgttggagcgacgaagggccgcagtagacatagtctgtnggcaatctcggcacctcttgcaagtaacctcccgatgcggaacgatcgtgcatatttgtcgagcatacacattggcgtactgactatgggaggacacgtatcataggcataccgacnatcttaatcttacaatcggagcgtgcagctgattgggccccccgagagggtagcaaccgcgagttagtcgttgccttgaccggtaggcgcccccttgatacctcccataggggccagccagcaggatgacatgtatcggacatcctatgacttatcgttgtcggatgcaccttatcaaactagcgcgcaggacgcaatgtaactgttggatcgatactcaagggagcggatggctttgatctccatcttaaacggccgttcttggagcgctacaccaactgagtctacttgtaccacttgggtacatcttgcggatcatctgggcggtctacactctaactatcggcgatggccccctaattcctaaccgaaagtgcgccatacctgccctcattctcctccgacagcgcaattacccgtgtggagtcatagagcaacctcgcgccttgaggcgcagagtgtaacccttgcacccagtatctaggcaccttcaatgtacaagcaattcttcttcaaacctcgtatgaccgaaagggcctaactacgggatttgcaagcggcaccccctacggggggtccgaacgtctggtgcaaaaatcctgtcggtcgtccagaattaatctaggaagcgaattgaaaagcactttgtatgcgtcattcgatgccggagccaaccttgtcaactttatcgggaggaccacgcgaagaactagggtccattaaccgcccctggaagattacattccccttctttaacatactagggcacacattacgaagcgcattaaatgaaagcgttgccccagatttggagtacccaatgggctaattgtcacgcgattttggggcaaatttgtccgccgcggattcccgggtgcgccacagagcaaggggccgccgtggattggccgggtccctgtgcgcctctcttcatgggaggtattgcgcaaaactcttcgagtcgcgtaagtcaaatgaaaataccccaacttctctacatcttn

SEQ ID NO: 655781 - DNA, 459 bp, Homo sapiens
tgtgtctgcaagaagctttcttctaggagatagaatcaacttttgtagtactagatattctatatggtttttgatatttcttcaccctacagaaactaatgtagtcagagctactacacaatctataaaaggcaggtgctttatttttggatagatatttctttcttatactaggggtaaggctaagtaatgaccttaacttctgagacccctttttcaaaaaacttggggaaccctataactacctatactattgaagcaagttctattgttagatacctactttatacacatacaagtaaaagcagcaatggaaactgatttggtagtagtagccactatggagagtatctactaggtaactatcctacctacatacctacctaccaagtaatgagtcacatatgtgcatagcttttagaactatttcagcaaatcttctttgggcttttctggttg

SEQ ID NO: 655782 - DNA, 197 bp, Homo sapiens
cggaccggtgctgggtacctcggtatcagaagtgaaagggggctatatcctagttttattgctatagcccttatgatgataactgatgagtattgatggtagtatcggttatggttcattgtccggagagtatatcgttgacgaggatagctattagaaggatcatggatgcggatgtttgcgtgaggaaatacttg

SEQ ID NO: 655783 - DNA, 250 bp, Homo sapiens
ggggcgagcagaggctcttactggtgagtgcaaagagctggaaaagaagaacgaggctctaaaagagagggcgattccctgccaagaagatcaggtaccctgaaagatttgatagaagagggtccgacaagggcaagggggaaaggaaaaggggtcccctaggttgaggatagtcaggagcgtcaattgtgcttgtacatagagtgctgtagctgtgtgttccaataaattattttgataggggaaaagg

SEQ ID NO: 655784 - DNA, 346 bp, Homo sapiens
  misc_feature (27)..(27): n is a, c, g, or t
  misc_feature (38)..(38): n is a, c, g, or t
  misc_feature (130)..(130): n is a, c, g, or t
  misc_feature (135)..(135): n is a, c, g, or t
  misc_feature (188)..(188): n is a, c, g, or t
  misc_feature (196)..(196): n is a, c, g, or t
  misc_feature (326)..(326): n is a, c, g, or t
atggtcaccgtttggctttccaagagncgaaaaacggntggcagagaggaatcagaaagttatcctaggctgggcgcggtggctcatgcctgtaatcccagcactttgggagactgaggcgggtggatcncctgnggtcaagagttcaagaccagcccgggcaacatggtgaaaccccatctctactnaaaatacnaaaattagctggccgcggtggcgcatgcctgtaatcccagctacttgggaggccgaggcagaattgcttgagcctgggaggcggaggttgcagtaggccgagatagcaccattacactccagcctgggtnacagagcgagactccatctc

SEQ ID NO: 655785 - DNA, 891 bp, Homo sapiens
tgccgcctccttcttctggcgctcctggtgctgcttgtgtgactcgttcggtagcggtggcactctggctacctcttttgtgaagcggatgctgctgagactccggcgctctctgtggccgacgaaaacttccacggactgagtcgacgactgaggaacagctgatcatattagatttgagacgcgtggcggaggccaggagtggtttctgtggtgcactttagatcattatgaggcatacaccgacttagatagacactaatgaaaaggcctaatggtgaaccggaactagggatatgtacagatgaggcagaatcactattccgaatcatgagggggcaagcaattcacctgagaccagagacacctggctgcatgttggagacctggatggaatgacagactgcatacttgatgtgttccacatcgaggcatgaacgggcatgtgcgtctacgtgaggcttaggggaacccgtgctatcgtattactccagaagcatcatgtatcttgtatcgagccaacgattaacattctcggctgtgagaatactgcgagttctgagttccgaccaatggttcctggacctcgatccggtaatagattgacatctattttccgtgtcatttctcgccttcctccaatgcctttgttggtccagtccggtacactggggttcttctggtgcgcgagcatgttgcctttcttttggtttattgtaactggatagcccgccggagggttcgtgctttgctgggacgtcccggggtggcacccggcttgggggccgcatcttgccttcggtgaaaaatccccgtccttcccgggcggggcgcccctccggcgttttgctatgtcccgcggtcgtcttgtctcctgtgtgtagcacacga

SEQ ID NO: 655786 - DNA, 307 bp, Homo sapiens
  misc_feature (10)..(10): n is a, c, g, or t
  misc_feature (37)..(37): n is a, c, g, or t
  misc_feature (63)..(63): n is a, c, g, or t
  misc_feature (270)..(270): n is a, c, g, or t
  misc_feature (282)..(282): n is a, c, g, or t
gggaggccgncagtcgcggcgatcttctcctcgcttntggagtgttatcgtcaccatgtccanaatggtctcggctggccggggcctgggggccgtgtggtccccaacccacgtgcaggtgacggtgctgcaggcgcggggcctgcgggccaagggccccgggggcacgagcgacgcgtacgcggtgatccaggtgggcaaggagaagtacgccacctccgtgtcggagcgcagcctgggcgcgcccgtgtggcgcgaggaggccacctncgagctgccatngctgctcgtccggacccgcggccgc

SEQ ID NO: 655787 - DNA, 660 bp, Homo sapiens
  misc_feature (10)..(10): n is a, c, g, or t
  misc_feature (37)..(37): n is a, c, g, or t
  misc_feature (63)..(63): n is a, c, g, or t
gggaggccgncagtcgcggcgatcttctcctcgcttntggagtgttatcgtcaccatgtccanaatggtctcggctggccggggcctgggggccgtgtggtccccaacccacgtgcaggtgacggtgctgcaggcgcggggcctgcgggccaagggccccgggggcacgagcgacgcgtacgcggtgatccaggtgggcaaggagaagcaatggcgcgctacgcctgtggcgcgcccgtgttggcggcgaaggaggcccaccttcgagctgccatcgctggtgtcctccggaccccgtggccgcctgccaccctgcgggtcaccgtgttgcaccgggcggcttgtcggccttcgaacaagttccctggaaccgcgccgagggtggaccctggcgggaatcgtggcaccggcggaccccagggcccgccaagggcaagaacggcagggccactaggtgggaaaatcccacacccgggacaagcaaggtgcacacagtgaggctgacgcgcccacacttggagggttggacaattccagcttaactgacgacaacaagcttgactgcccaggcattgttggcacctttcaatgcaccgcaaacagttctcggcacatcccattggaaacagctgacggatcaaagaaccaagggggcagcct

SEQ ID NO: 655788 - DNA, 119 bp, Homo sapiens
agtgagcagggtatcctgttgggtaagattcataagaggggatgcagagtgagaaggtcgtccacatattgaataaggtgagaaacagatggacagaaagaaagtaaatcatgagaaag

SEQ ID NO: 655789 - DNA, 82 bp, Homo sapiens
catggatttgctggtgcagtacaactaggcttaatagggactgcactccaacctgggtgacagagccagactccgtctaaaa

SEQ ID NO: 655790 - DNA, 570 bp, Homo sapiens
  misc_feature (12)..(12): n is a, c, g, or t
  misc_feature (92)..(92): n is a, c, g, or t
  misc_feature (96)..(97): n is a, c, g, or t
  misc_feature (133)..(133): n is a, c, g, or t
  misc_feature (136)..(136): n is a, c, g, or t
  misc_feature (139)..(139): n is a, c, g, or t
  misc_feature (141)..(141): n is a, c, g, or t
  misc_feature (143)..(143): n is a, c, g, or t
  misc_feature (153)..(153): n is a, c, g, or t
  misc_feature (161)..(161): n is a, c, g, or t
  misc_feature (171)..(171): n is a, c, g, or t
  misc_feature (225)..(225): n is a, c, g, or t
  misc_feature (255)..(255): n is a, c, g, or t
  misc_feature (258)..(259): n is a, c, g, or t
  misc_feature (271)..(271): n is a, c, g, or t
  misc_feature (276)..(277): n is a, c, g, or t
  misc_feature (284)..(284): n is a, c, g, or t
  misc_feature (298)..(298): n is a, c, g, or t
  misc_feature (323)..(323): n is a, c, g, or t
  misc_feature (332)..(332): n is a, c, g, or t
  misc_feature (364)..(364): n is a, c, g, or t
  misc_feature (388)..(388): n is a, c, g, or t
  misc_feature (392)..(392): n is a, c, g, or t
  misc_feature (447)..(447): n is a, c, g, or t
  misc_feature (469)..(469): n is a, c, g, or t
  misc_feature (480)..(481): n is a, c, g, or t
  misc_feature (483)..(483): n is a, c, g, or t
  misc_feature (495)..(496): n is a, c, g, or t
  misc_feature (504)..(504): n is a, c, g, or t
  misc_feature (542)..(542): n is a, c, g, or t
aattaaattgangacatagctttactctcttctttgatcataactaaaataatattttagacaaaagctaaaacaaaaagggggtattatangggnnggggcttcttttccaaacacttctcaatatcatcangcnccngngngggggccttngggattcnagtcccaggnccaaatacattgggaacaccaacttcaaacagaaattcataatcctgggggggnatcacccctccacacatgacaagaatatcnggnnggccaggggggngaggnncttggangggttcggggactngggttttatggccagcggcgagggngcttatgcncacagcatgcacatccgcatccacagcctgcngggccacttcacgaggagtctggnaaanacggcctatgtccacatcaaaaccaagatcagcaaatcctgtagcaataactttngcccctctgtcatggccatctngtcccatttcnncnacaagaagacgnngcctgccnccttcacgttccatgaatttatgaaccctcttgatagnagatgttatctctttactttctccaaat

SEQ ID NO: 655791 - DNA, 688 bp, Homo sapiens
gagaagaagaaggaggttcctgctgtgccagaacacccttcaagcaaaacagcgaacgtgaatttctgcagcagctgacagatcaagcgcctgagaaagaagttttgcccaaaatgatgcttcgaacagtgcaaggagtgaacgcttatctatcaacacaagcaaatgcactatcacacatggcaactataacggcacgatgctacaagaactgaacattcgacatggcgaggattgtgcacagaaaagctggcaacttctatgtacctgcagaacccaaatttggcgttttgtcatcagaatcagaggtatcaactggatgtgatgcccaaaggttcgaaaggtgttgcaagcttcttctgccttcgcacaaatcttcaactggaacctttgttgaagctcaacaatggcttcgattaacattgctagacggattagtaagcagccatataatttgcatgggggtaccccaatctgaaggtcaggtatacattgaacttaatctaacaagcgtggctctatgcgcaaacactcaaattacaggaagccgaaatttgcttagacagagattaactgcttagatatgctcgatcctcttgcgtcaatacggcattcatcttgcctggaacgatttagcctcatcgagatctatacctgtaggcaaacacgctatcaaataagcaaaata

SEQ ID NO: 655792 - DNA, 482 bp, Homo sapiens
  misc_feature (13)..(13): n is a, c, g, or t
agaggatccccgnccgacttgggactgaccaccgcaaggtacctatccatgaacgatacgtaatgacgcggaggccccatccggcgaaatcgtcgcggttttctaagaatgattctcgactaggcgcgcgggtcttgggcaggcgggcaatcgcgggccacgcgcgcggtctcagcggcttggcaaccgctggcgatgcgcgtatgcagccgatggaccaacatgcggacgggctggcgccgacgcgcgactcatttcgaggcgcgtcgatcgcaagggggccgatcgtgtgtcgtaataagcaagtcggcgcggcgagaccttgagagaggtcaaatccgccgaaacgggccgtgagggaaatgaaggcgcaattttcggggattcggcggatcttgacgggcgcgtcggcgctcgccgccacgatgatgttcgcgggacatgctctcgccgaggatctgctgggccagccgacgccgggt

SEQ ID NO: 655793 - DNA, 422 bp, Homo sapiens
  misc_feature (376)..(376): n is a, c, g, or t
gtatcctaaaatccccacccccaggaacccataggcatcaccgttgaccgtccccatttacccaagtccttcccccctggcaaagattcctcctgaattgtgcctgcccttggcccaaaagaggtatgggaggggctgggccgcagtggcttgtgccctgtaatccccaacattttgggaaacccaattcaggtggatcgttagaggtcaggggttcaagaccatccctggccaacatggtgacatcccatctctactaaaaatacaataagttagctgggtttggtgttgggtgcctgtaatcccagctactcgagaggctgaggcgggataatcgcttgaacctgggaggaggaggtggcagtgagctgagaangtgccattgcactccagcgtgggcaacaagagtgaaacgtcgtctc

SEQ ID NO: 655794 - DNA, 404 bp, Homo sapiens
  misc_feature (356)..(356): n is a, c, g, or t
  misc_feature (368)..(368): n is a, c, g, or t
  misc_feature (399)..(399): n is a, c, g, or t
tgagactgcatagggctcggcgcgggggttggggggaatctgtgcagggggaagcatattacagaagcaagaaagacagttattcaattaactgagacatgcattacatcatttcttacttttcaaggaaaatcatgttttacgacttgagtttatctgtctagttaccttgcagctgcacagctaggagaaacagggtatttacaatgcctggggaaaggaggagagataaggctcactagccacagaaaaacagggcagttaatttttaaaggactccagctctttctctttctcacgggggaattgggattttcttacatggcaactggaatttctggctttacacatttttnaaatttcttttnaatttgctttttccaatggcattggctgganttatt

SEQ ID NO: 655795 - DNA, 859 bp, Homo sapiens
gcagttcgcaatgctgcttttcttaacacgctgtaaatttctgggtggggttaggctgaggggcggcaggatgaattatgatgttatgttatggtatcgtcttttaatcaggcatgtttcaggtttggatttcgtccttttacttccagcacaagcggttccttgccagtttaggatattgagatgtgcagtgccgcatgcatctcgagggaactgagataatggcaggaaaagttccttcagctgttggaaaacggagtcaggaggttgagggaggcctccattaaggcatgtcttagaatctaagactcagatctaatgatgggctaaatgtgtacaggatcacagagtggagcatcttagagtcttccgtctctcccagtacaattcactgcgtcgtctacatttacttgttgcgtatagaagggcatctggtcccaagtcgagaagtgacatgagaatttttgctaagtgaccgggtgacttaagttgcatgatgccctgttcgtcatgcgcttcccagagggaggaagaggcctaacttgctgctgagatactgtctcttgtgtccagtgtatctaaccggactcaagtggagcagacagcttctacagtccagagcttggcggatgagtaggcttgcaggttgggttcggatttgctaagtctttgctgtagccatacttgtatttaacatgtaagggaagtgatagggaaagtatttattgagaattattgatactacagaagttgtcaaattagttccttgtgattcctggaataatttatagttatttaagatttgaatgggggtaataggctggatttattcataaaggatcttggggagagttactaa

SEQ ID NO: 655796 - DNA, 439 bp, Homo sapiens
tccttcagacccagaatcgtaatagctatgtaaggacacttaaataaactcaagctaacacagagaaggaatacagaattctatcagataaatttaacaaagagattgagataatacaaaagaacctagcagaaattctggagttgaaaatgcagttgaaagactgaagaatgtgtgttttttaatagctgaattgatcaagaagaagaaagaattggtgagcttcaagacaagctatttataagagacaaaataataaagaatgaaacatgcctagaagactctagaaaaatgcctcaaaagggcaaatctaagagttattgaccataaagaagtggtagagagaagtagaggtagaaagttttttcaaaaggaaagtaacagagaacttctgagacctagagagagatatcaatatctatcactttctaagaaagtt

SEQ ID NO: 655797 - DNA, 739 bp, Homo sapiens
tacgggggaaggcgcttggtgaagtaggccttatttctctgtgttcctattcgtacaggggaggaatttgaagtaaataaaaaccgacctggattactccggtctgaactcagaatcacgtaggactttacatcgttgacacaaacgaaccttaaatagcggctgccaccattggggatgtcctgatccaacatcgaggtcgtaaaccctatggtagattatggactctagaataggattgcgctgtaatccctagggtaactggtcccgatgtggctcaagtctatgggactcaatgtgagtaatagatagtctcgcatatgagaacggggtgaaagctctatagcactgatacgggcctcggagagataggggatacgtgcctccgaggttcgccccaaaccggagaacttctttaatgacacggttgtgggaaacgattcacggaccccctgtgtgcgagattcggacaaaggataacgggaaatggacaatatacactacaaaatttaaaagccccccataggggggatcaaaaacaacagaaattagagagtaggtgacttcaattgcacacgggcattactatccacagatgggccaaagggttcaaacatttcaccgagtgggtgttaaaagaagtcttcatagaaagcactaaggcttggtaaccacttcgtgtgtgaagccatttacatattaaaggggtttcccctataatatatggtggcacccacgg

SEQ ID NO: 655798 - DNA, 90 bp, Homo sapiens
gacccaagtgcagaataaattgcctaagtagaaaatggaggaaccgaactccttcggacttgtgatgtgtgtggctcgagaggacacaca

SEQ ID NO: 655799 - DNA, 135 bp, Homo sapiens
atctagagatcccggctcagtgatctctcactcagctctgagtacagggttgaggatgatcacacacctggttatttttaaaacttttttgtggagacagggtcttactatgttgccatggtggtctagaacttc

SEQ ID NO: 655800 - DNA, 385 bp, Homo sapiens
cctcactggctttcgccaatacactgtcctcccacagagacaagctgttccctgcatttggatttggggcccaggttccccctgactggcaggtgagctacctctctttctgccattcctgttaacagttccagggtcctgatttagagggatgtgtagattactagctacttggcactcaggctttaacaggagatgcatggggttggattcctgcaggcacgtagacagcaagtgctcaggactccatagctcctataggaatcttggcacacgccagtgtcctttttcattcttagcagaggtcatggggaaagaacctcattttcattcttgtctccaggtctcgcatgaatttgccttgaatttcaaccaagcaacccct

SEQ ID NO: 655801 - DNA, 339 bp, Homo sapiens
tagtaacgcaggtttggtagtttagcactctgtgggtttgttaggccgtgtttcgcattaataatttaaagctccatagggtcttctggtcttggtgtgtcatgccggcctcttcacggccaggtcaatttcactggttaaaagtaagagccagttgaaccctcgtgaagccattcatacaggtccctaattaaggaccaagtgattatgctacctttgcacggttagggtaccgcgcccgttacacatgtgtcactggacaggcggtgcctctaaccgtggttatgctagaggttatgtttgtggtacacaggcggtgtaatatttgccgagctccct

SEQ ID NO: 655802 - DNA, 662 bp, Homo sapiens
cagttatctcaagtactttttgtccttgctttattactacataatgttttaaaggaaattcagggagcttttttggcatagtgtgggaaagatagagtcaatttcatttcaactctgaacatttatctagtggcttctggtagtcagggtttgaattttcatgattatttaattgttactttttgcattttgaagaatttcacaataaattaagctatcccttctaataaatcctgtttcttaccttaggaacgaatatgacttctgacttgcactggacaaactttttcttgttgagtgcttgtagtcctcacacaggccctgggtatgtcaccatacttcgtaagcacctgtccatgctacttatcattgttgaatccagggcctttctgagccttcccagagttgacctagtgctatgcatttgggcccaaggactgaaagctgcactaagaagagcttaaaaagaaagctcatggcatgagggtgtgtggaggggaattatatatacatgtatatgtatagatctggtttgtttggttttccccaagggtttagactcccttttatgctttttggaagcttcaaagccattctttggactatttgggaaactgttaaaaagcaacaaggttcaaaaacaaaaaacatgggattcaagg

SEQ ID NO: 655803 - DNA, 577 bp, Homo sapiens
agcaccggatcttttccatctaattccgcaaaaatgatcatttgcaaagtcaaaactatagccatatccaaatcttttccccctcccaagagttctcagtgtctacatgtagacgtattccttttctgtataaagttcactgttaggatttcaagtcaccgacgttattttacgattttgagtcgatgcaaagattcaagtagtttgcgaataagtacttatctttattgtaatgaatttagtctggtgatcaaaagcatagtcttaatttttgagaacgtggttttagcatttgacaaagctaaattccagttaattaattaatagctttatattgctttcctgctacatttggttttttccccgtgtcccttggattacgggctaaggtagggtagagtgggtgtagtgagtgtatataatgtggattgtggccctgtgtattatgatatttggtagtttgtgttatattatttacatttcagtagtggttgttgtgtttccattttagtggataaaattggtattttgaactatgaatggagactaacgcccagcattagtttcacatgagata

SEQ ID NO: 655804 - DNA, 712 bp, Homo sapiens
  misc_feature (163)..(163): n is a, c, g, or t
  misc_feature (254)..(254): n is a, c, g, or t
  misc_feature (262)..(262): n is a, c, g, or t
  misc_feature (485)..(485): n is a, c, g, or t
  misc_feature (497)..(497): n is a, c, g, or t
  misc_feature (513)..(513): n is a, c, g, or t
  misc_feature (544)..(544): n is a, c, g, or t
gcttacccaatcagattgacgcggcgttagtatggccgtgtacccgaaaaactgattgactgggctggcgttaactgtgcggaggcaggatttccctggggaaagtcttcactcagagcttcgctgacagccaaggatggcaagcaaggggccctcggcctcntgcatctcctgagaactccagtgcaggggggcccaggtgggagcagcaagtggcgcgtggcgagagcggagggcaggacagcactttcgangtgcaacnatctgcttggacacagccaaggatgccgtcatcagcctgtgtggccacctcttctgtggccgtgtctacatcagtggttggagaccagacctaacagacaggtgtgtcctgtttgcaaagctggcatcagccgagacaaggtcatccccctctatggaaggggcagacactgggcaacaggaccccagagagaagacccctcctcgtcctcaaggacagaggngcagagccggangaatagagggggattncaaggattggatttggagatggtggcttccnagatgtcttttgaatggggcattcccttgagatatttgcacagcatttaatatacatgatgggcggctcctccagctgtccctggaaacccagtatgtgacgagcagtcctgtcacgctcttctatttgtggcctgtgatcatgtctggctctgatgctaaaggtggc

SEQ ID NO: 655805 - DNA, 561 bp, Homo sapiens
  misc_feature (206)..(206): n is a, c, g, or t
  misc_feature (414)..(414): n is a, c, g, or t
  misc_feature (492)..(492): n is a, c, g, or t
  misc_feature (502)..(502): n is a, c, g, or t
  misc_feature (511)..(511): n is a, c, g, or t
  misc_feature (541)..(541): n is a, c, g, or t
ttttcttcaagactaggcaagtgaagcagtgggaatggagaaggaacaaagaaatctacaaactggttgtgatcaattagttgtaaataccactgcacttggatcagccaggaacaagttctttgaaatacgccagagaattaacattatcagtgggccaaatgtgtggaagatgtattatcctagtctcttttcctgttctctanaagtatgttactggctcttaaaagatttcacaaaaatacgctttgaggagaatcacagctttcttgattagtatctacaaggcacttaatgcacattttcatgaagaactgatggaaaaaaaaagattacatgaacatcctcttattctgaacgccaaaattcctggatgttaaataacattccattgttctgcctcctgtttaacanggccaattccacatcattccacagcgttggccatgttcaataggttccactgcaagttttccaaaaaccaaatcccanattcaccatnctcccacanacacaatcctccactgttgaataatttccnattgtcacacggccgtccct

SEQ ID NO: 655806 - DNA, 513 bp, Homo sapiens
aaatggagtagcctcagcctaaaagatcaggcatcctgggtcggccctacgcagcttgtggtcagaacatcgtgagatcatgcagcctcacggcggggaacatacgggatcaggtccaacagcaggttggagttagggtacatgatttcaaagtcaggatcgtgagggcacccaagatgattaccgagaaggcaaaagcacgtgccaggtaatggccatgtgaaggtctgggaaacagccaaaacgtagcgtgtcaggaatgtgggacagagtccctagggcagtcgtttcccaaagacatgttccaagatatactagctctatgggatgtggagttacaataatatgtggtgaaaaggtttgccagacaaacactgagttcagagtaaagcaggtcagatactatagcagacgctgtcatagctgctgataggcgcaatagaatagtaagtgtacaagatgaaggtttcaaaatgggcaaataacaaatatgtcatacagaatcctggatgt

SEQ ID NO: 655807 - DNA, 402 bp, Homo sapiens
tcacgccatgtcacaacagtataggacggccaggcgcagtggctcacgcctgtaatcccagcatcctgggaggccgaggcaggcggatcatgaggtcaagagacagagaccatcctggccaacatggtgaaaccccgtctccactaaaaatacaaaaattagctgggcgtggtggcgtgcgcttttagtcccagctactgatggtgggtgaggcaggagaatcgcttgaacctgggaggcggaggttgcagtgagccaagattgcaccactgcactccaacatggatgacggagcaagactctgtctcaaaataataataatagttattaccattacctggtcccgaatattaatagtgcaaggacaagaaatcctggtttaaagtgatgggcaccaaagca

SEQ ID NO: 655808 - DNA, 276 bp, Homo sapiens
tcaggactgcaaattttttatcaaaacaattgttttttctaatagtaaaactttgacccctccaatctaaaaaataatcaccccccataatcataccaaatttttttcctaaccagcctcttaagcgttttaactccaattttttcaatctaaaaatacagggaaaactcgataaataccaggtaagagaaagctctttttaggtacttattaggctccttcgaaaaaagtgagtactgcgaacatttaaaatatcataataccaagataatgttt

SEQ ID NO: 655809 - DNA, 964 bp, Homo sapiens
acagagcatagcaaccccagattctggtgtcctccgtgcccacggatccacctggggcccagagaggagaggagaggagtcttcaggtcatttcctggtctgctgccacaggtacatgtggctggtggggatggctgtggggcacttgatcatatgtgccatgatccccaacgcttgtgtggatgcaagccccaatttacgctcccacggaaaaaattcgagcacatccaacaattagcacacgataggagcaatacatcacacaaacaaacaacgaaatgacccaccgagagaaagagcgacagaaggacaaataccacacacaaaagaacaatgaaaacacgcaccggcacgcgacaccacacacaaacagactagacagtgacaacgacaccagaacagcagagcacgaggagcccacgagcaacgagggcgcagcgagcgagcagcgagggcgcgagtaggtaccgacaaacgcagcgcgacgagcacagcgaaaggcagccagggggagcaacacaaccaagcggaccacaagaaagtggaagggagctgcaaacagcagggtcaaagagaacaaccaatgacgagaccagcacaacacccaaatgagacgacccagatagaacaacttgcacacccaaacaaaaagcgaacacacacaaaaaacagcagacgaaaaaaacaacaccataccaaaaccacacgggacgaaacccaataacaacaagacgagaggttggacacaactaacatagacaagaaaacagaaaaaaaggaacgcaaagcacaaagcatacaaaccggaggcaaccacaagaccgacaacgaacaactcaaccctggctcccacaaaccacagggtaagcagacacgaacaacgagactaccaaaataccagacaagaggccacaacaagaaagaaggaagagaacaaaaacagaaaacagaaacacaacacaaa

SEQ ID NO: 655810 - DNA, 309 bp, Homo sapiens
  misc_feature (31)..(31): n is a, c, g, or t
  misc_feature (81)..(81): n is a, c, g, or t
cgttatacatctccgcttacgggttctagcnattctcctgcctcagcctcccgagtagctgggattacaggcgtgcgccancacgcccagctaatttttgtatttttagtagagacggggtttcactgtgttgctcaggctggtcttgaactcctgagttcaagcgaccttcctgcctcgatcttccaaactgctgggattacaggcatgagccaccgctcccagcccaggattgaagtctttaaagtggactgtgtttgccagtggattccagggatacaggcagggcacaagcagaagtgtccacgt

SEQ ID NO: 655811 - DNA, 562 bp, Homo sapiens
agccacgactagccagatctgtctgctgctagatatgataggcattttaagactcaactggaaatctcaacagtgctggtaaaccattaaccataaaaacgtgcttttgaacaccagtgctgaaaaaaatatttttttttttattttggagggtgaaaggggctgggatttaaaataggacaaggtggagaagggggggaagatggcaaaaggatttagtactcccttagtggtgtgtactgtgtgcaacggggaacctcttacttcatataccctcgtgcagaaatcattcaggggagaaagaaaacccgtggaactggattgagggcgtgactctgtggtttgggtgcacgggggcccgatgccgggcatatagtgaaggtgattgtcttctccctcagaaaaaattgggtccctggcggtcccagtagggctatagcttttccagccctaatttaaaaactcagtgaggccttagtaggggaaagatggaggtaaatacaagggtatggcgggacaccaactacagcgtggtgtcccggggggtaggagggggggaccc

SEQ ID NO: 655812 - DNA, 127 bp, Homo sapiens
  misc_feature (74)..(74): n is a, c, g, or t
tgtctcctctcgtgcgtgagtggacacaactacctggtaaggggaaggagacgctgcttcacctggagcccccnaagacacacgtgaatcccacccctttaacctaaacttcatgtacctatatctt

SEQ ID NO: 655813 - DNA, 204 bp, Homo sapiens
ttaaaacctaaggtaattgaagattagagaaccatgttaacactaccgtttgatgagtctgctatgtaatgccagagtcccagatgtgcagcaagttttctagagattgcgaggaccagaagcaaattaagaagccagaaagctttaccaaacagattgtccttcgaggaaagagcatcaaagggcccctggggaagaaaccca

SEQ ID NO: 655814 - DNA, 216 bp, Homo sapiens
cgtgctgctggaaatctatggctgccttttcaggtgcattaatctcctcctcagaaggaatgctctgaaattcttctgtatgatcaccacacaataaaggacctttctgtattgttttcgtgctaagcagcccaagacatgggcccgaatcaccatggccgcgtgggtcacttcctcttcccgtccgattctccacggattctcatccttgggaag

SEQ ID NO: 655815 - DNA, 178 bp, Homo sapiens
gatagtgagtaaaacagaggttatggagggagagaagggtagaatggggagttactatttaatgggtacagagtatctagtttcgggtgatagaaaaccttctgtgaaatggataatagctggtggttacacaacattgggcaatgtaactaatagccactagaactgtccactataa

SEQ ID NO: 655816 - DNA, 251 bp, Homo sapiens
gagctcggtaccccccttactgagtagctgggattcaggtgcacacaccatgcctggctaattttttttgtatttttattagagaggggctcgtgccctctgtggtccaggctgaagtgcagtggcatgatcacagctcatggcagcctcaacctcccagccaggctcaagcaatccttctacttcagcctgtcaagtagctgggactacaggcacatgccaccacagccagctaatttttaaattttttg

SEQ ID NO: 655817 - DNA, 352 bp, Homo sapiens
acgactttacaccaaattagttaggtgtggtggtgtgtgcctgtagtcccagctactggggaggctgaggcaggagaatcgcttgaacctggaaggtgaaggttgcagcgagccgtgatcgtgccatcgcgctccagcctgggtgacagagtgatattctgtctaaaaaaaaaaaggagaatcctgtccatctttcacagtcaaattcaaatactgccccctgacattgggccttttaaatttaactggtattccaagtgtccacaaaatgttcgttgaatgactaactgatagaatccttctaattgtgatacatttcccgtgcttcctgagaactttgttagtgccactt

SEQ ID NO: 655818 - DNA, 778 bp, Homo sapiens
acaaatataattatactattatataaatcaaaacatttatcctactaaaagtattggagaaagaaattcgtacatctaggagctatagaactagtaccgcaaggacaagatgaaagactaattaaaagtaagaacaagcaaagattaaaccttgtaccttttgcataatgaactaactagaaaacttctaactaaaagaattacagctagaaaccccgaaaccaaacgagctacctaaaaacaattttatgaatcaactcgtctatgtggcaaaatagtgagaagatttttaggtagaggtgaaaagcctaacgagcttggtgatagctggttacccaaaaaatgaatttaagttcaattttaaacttgctaaaaaaacaacaaaatcaaaaagtaagtttagattatagccaaaagagggacagctcttctggaacggaaaaaacctttaatagtgaataattaacaaaacagcttttaaccattgtaggcctaaaagcagccaccaataaagaaagcgttcaagctcaacataaaatttcaattaattccataatttacaccaacttcctaaacttaaaattgggttaatctataactttatagatgcaacactgttagtatgagtaacaagaattccaattctccaggcatacgcgtataacaactcggataaccattgttagttaatcagactataggcaataatcacactataaataatccacctataacttctctgttaacccaacaccggaatgcctaaaggaaagatcca

SEQ ID NO: 655819 - DNA, 353 bp, Homo sapiens
  misc_feature (61)..(61): n is a, c, g, or t
  misc_feature (278)..(278): n is a, c, g, or t
tcccttaggaccctttaaccgatttttccagtgatgcagtgatgatatgtaatatataatnaataaaatcaggcccaggtgccagtggttcacacctgtaatccccagcattttggcaggcgaaggtgggagaattgcttgagctcaggagttcaagactggcctgggcaacatggtgaaacctcgtccctactgaaaatagaagaaatagtcgggcgtggtggtgcatgcctgtagtcccagctactcaggaggctgaggtgggaggatggtttgancctgaaaggcagagattgtagtgagctgagatcgtaccactgcattccatccaccctgggcaacagagcgagacc

SEQ ID NO: 655820 - DNA, 410 bp, Homo sapiens
gggttaaattaaaatccatctgatgagaatttatggtttgtagggcaggactcctcaggccccttaggaatttgggcaagagagagaaaagtcagagtttagtcctcacaagtacagaggaataatctgaaactattcatgagattttaccttggatttttaaattaagacgttgtttgttaccctgtgtgagagacattttaaattaaaggtaaatgagattaccaagagttgaggaagggtctgtaggctttttttctttttaatcttgtgaacagtataggaggaatattcatatttatttggataatttatgattctgacttttagaaagtttgtttgttttttgttttttgagatggagtttcactccagcctgggcaagagagcgagagtctgtcaaaaaaaaa

SEQ ID NO: 655821 - DNA, 196 bp, Homo sapiens
aacacggtaaacgtcacgttctgcggcgttaccgtgaccacatcaaaaaggcggtagaataggccgtcagccgtcgctccatcaccgatatggagcatggcgaacaatatcatgcattcccggacgggacatctacgaaccgtgtgcttcaccatggtccgcggtcggcaaacagtaccgtgtgtgcatcccgtgc

SEQ ID NO: 655822 - DNA, 238 bp, Homo sapiens
ctgttgtagtgtaacttagtctatgcagtaggggaagggagcctactagtgtgtgtatgaatacggaagtatgtgcctgcgttcagagcgttctggctggttgcctcaatctgggtgatgatagccacatgtggggcataagtgtggtttcgcagcatgatataaaatattgattagttcttgtggctgtgactgttatacttaatgcgatttgtagggagattagtctagagagtgt

SEQ ID NO: 655823 - DNA, 185 bp, Homo sapiens
tgcaggacgtctgaggactttacatgatacttcatggattgggaggtttttttactctaccctattggaatacaaactatcatagccttgtgtgagagtttcagaaattatttggcctttgtttttttttttttttttttggttggcaatccctttcccaacccccaggggtttccctcccaaac

SEQ ID NO: 655824 - DNA, 818 bp, Homo sapiens
gactcgactgcgacctccacctcctgggttcaggccattctcccgcctcggctccagagtagctgggactgcgggcgctgccaccacgcctggctaattttttgcacttttagtagagacggggtccactgtgtcggcaggatggtctcgatctcctgaccttgtgatccgccgcctcggtctcccaaagtgctgggattacaggcgtgagccaacgcgcccacgcccacttacaaattctttatagagatgaggtcatgcttgttatgttgcccaggttggcctcatgagatcctgtgcttagccctcccaaagttgcgtgggattaccagatgtgagacactgtgcaccaaaaagcccacccagttttttggaccctatatcttctctcgtgggaggacagtcttactccgtcggcccaggcttggagtgtatctgtcgtgatctcggctcacttgcaacctccgcctcccgggtccagggcaattctccgtgcttcagcctcccgagtagctgggatggcaggcgcctcgcaaccacaccggagtagtctaccgtcattccaaccgtagcacgcaaggggttctcccattgttggccagggcatgtccttgacctcactggaccttcagggtgctcccactctggggtctggttcccacacaagtggctggcgatactcgcggtcgtgcagccacttgcgctggttgactccaagccactttctcaaatgatgcccgtccacccagcgtctgcgcctacttggacaccacatgtctctggtgtgccactgaggcgcctccatgcacgtcacccgg

SEQ ID NO: 655825 - DNA, 633 bp, Homo sapiens
  misc_feature (104)..(104): n is a, c, g, or t
  misc_feature (111)..(111): n is a, c, g, or t
  misc_feature (125)..(125): n is a, c, g, or t
taaacggaatgagtgtcactctgtcatccaggctggagtgcagtggtgcagtctcggctcactgcaagctccgcctcccgggttcacaccattctcctgcctcngcctctngagtagctgggacnacaggcccccaccaccatgcctggctaattttttatatttttagtattcttatatatttataatttatatattatttttgtatatttagtaattttttgtattttcaccatgtcggtcaggctggtctcgaactcttgaccttgtgatccgcccacctcggcctcccaaagtgctgggattacaggcgtgagccaccgcacccggcctcctgaattaacattttctaaagatgcttctggcgtgctatcctgaaagctgccagaggtgtcttggctgcattggtggtaataaaattcatactcatatttgactttaaaaaaaaaacaaaaaaccccgggcaccaaaatgaggggggggagaacaaagcgggtataaaatgagccgtgggacaaaaagtggtgcagggaccccctttttgaaaccagggcaacacgcggacccccaaaggggccgaaaaccgcacaccgggaccgtgaaagagagcaaaagaaaaagagaccgcaagac

SEQ ID NO: 655826 - DNA, 420 bp, Homo sapiens
tatgggatctgcctgagttctaggaataatgggggaagtatgctaggagtcatagattagtccgctcgtagtcaggctgtactcgttaggttcagtaccattggtggccaattgatttgatggtaagggatagcgatcgtggagctcgtctgttatgtaaaggatgcgtatggatgggagggcgatgaggactaggagtgatggcgggcaagatagttcagacggtttctatttcctgagcgtcctgagatgttaggtattacgtctagattttgcttgtgcacatgttaggaaaagggcatacaggactaggaaacagataaggaacctgattatgagggcgtgatcatgaaaggtgataagctcttctatgataggggaagtagcgtcttgtagacctacttgcgctgcctgtgccat

SEQ ID NO: 655827 - DNA, 112 bp, Homo sapiens
gtttcaacagtatccagttagtggagcatctgacatgtgaagggtcgggcttgaggagcaaagaaggcttggtttgttcccaaccttttaagaacatagtcagtgatcggga

SEQ ID NO: 655828 - DNA, 570 bp, Homo sapiens
gctcgaggagagagagagagagagagagatagagagagagagagagagagagagagagagagagagagagagagagagaggcctggctaattttttatatttttagtattcttatatatttataatttatatattatttttgtatatttagtaattttttgtattttcaccatgtcggtcaggctggtctcgaactcttgaccttgtgatccgcccacctcggcctcccaaagtgctgggattacaggcgtgagccaccgcacccggcctcctgaattaacattttctaaagatgcttctggcgtgctatcctgaaagctgccagaggtgtcttggctgcattggtggtaataaaattcatactcatatttgactttaaaaaaaaaacaaaaaaccccgggcaccaaaatgaggggggggagaacaaagcgggtataaaatgagccgtgggacaaaaagtggtgcagggaccccctttttgaaaccagggcaacacgcggacccccaaaggggccgaaaaccgcacaccgggaccgtgaaagagagcaaaagaaaaagagaccgcaagac

SEQ ID NO: 655829 - DNA, 371 bp, Homo sapiens
  misc_feature (36)..(36): n is a, c, g, or t
  misc_feature (38)..(38): n is a, c, g, or t
  misc_feature (97)..(97): n is a, c, g, or t
  misc_feature (270)..(270): n is a, c, g, or t
ccacctctgtgtctaccatgaccccccttcctcaanantgacctgtgttcccttccctgttctcttttctattaaaaataagaacctgggcaaagtncggcagctcatgcctgtaatccccagcacttagggagaccgaggagggcagatcacgaggtcaggagatcgaaaccatcctggctaacacggtgaaaccccgtctctactaaaaaatacaaaaaattagctgggcgcagaggcacgggcctgtagtcccagctactcaggagncggaggcaggagaatggcgtcaacccgggaggcggaggttgcagtgagccaggattgtgcgactgcactccagcctgggtgacagggtgaaacgccatctc

SEQ ID NO: 655830 - DNA, 1976 bp, Homo sapiens
  misc_feature (96)..(96): n is a, c, g, or t
ggggagaggcgctggtgagccagccccggccgcacgccaatcacgagcacgtgatgaggagcggcctgtgggcagcccccgccccaacgttcagcntcagacgcgccatgtgggccctgcgggccgccgtacgcccggggctgcggctctcccgcgtgggccgcggccgctcggctccgcgggcagccgcgccgtcctgccccgcgcgcgcgctagccgctgtcggccgcaggagccccgggaatctggaggggccgtggggcggagggcggggcctgcgggcggacggcggccgaagccgcacgggagacgacgaggaggagccggaagatgcggacgagaacgccgaggaggagctgctgcggggagagcctctgctgccggcggggacccagcgcgtgtgtctggttcaccctgacgtcaagtggggcccggggaagtcgcagatgactcgagccgagtggcaggtggcggaggccacagcgctggtgcacacgctggacggctggtccgtggtgcagacaatggtcgtgtccaccaaaacgccggacaggaagctcatctttggcaaagggaactttgagcacctgacagaaaagatccgagggtctccagacgtcacgtgcgtcttcctgaacgtggagaggatggctgccccgaccaagaaagaactggaagccgcctggggcgtggaggtgtttgaccgcttcacggtcgtcctgcacatcttccgctgtaacgcccgcacgaaggaggcccggcttcaggtggccctggcggagatgccgctgcacaggtcgaacttgaaaagggacgtcgcccacctgtaccgaggagtcggctcgcgctacatcatggggtcaggagaatccttcatgcagctgcagcagcgtctcctgagagagaaggaggccaagatcaggaaggccttggacaggcttcgcaagaagaggcacctgctccgccggcagcggacgaggcgggagttccccgtgatctccgtggtggggtacaccaactgcggaaagaccacgctgatcaaggcactgacgggcgatgccgccatccagccacgggaccagctgtttgccacgctggacgtcacggcccacgcgggcacgctgccctcacgcatgaccgtcctgtacgtggacaccatcggcttcctctcccagctgccgcacggcctcatcgagtccttctccgccaccctggaagacgtggcccactcggatctcatcttgcacgtgagggacgtcagccaccccgaggcggagctccagaaatgcagcgttctgtccacgctgcgtggcctgcagctgcccgccccgctcctggactccatggtggaggttcacaacaaggtggacctcgtgcccgggtacagccccacggaaccgaacgtcgtgcccgtgtctgccctgcggggccacgggctccaggagctgaaagctgagctcgatgcggcggttttgaaggcgacggggagacagatcctcactctccgtgtgaggctcgcaggggcgcagctcagctggctgtataaggaggccacagttcaggaggtggacgtgatccctgaggacggggcggccgacgtgagggtcatcatcagcaactcagcctacggcaaattccggaagctctttccaggatgaacggacgcccacagaggcctgcggggtgggggcatcgctgcctggggagctgaggcgttaccgctgtgttgggggcagcttggtgtcaggtgcagcagggtcctccttgtctggttctgcacccgtctcgctcccagccatttgctgggatgaccgtgcaggccggtgacacggccgcacctgccccaaagcgggccgcccgagcgtccactccaagcctgagcatccacacaattccagtgggccctcggtgcctgctgtgaactgctttccctcggaatgtttccgtaacaggacattaaacctttgattttactt

SEQ ID NO: 655831 - DNA, 2524 bp, Homo sapiens
  misc_feature (96)..(96): n is a, c, g, or t
ggggagaggcgctggtgagccagccccggccgcacgccaatcacgagcacgtgatgaggagcggcctgtgggcagcccccgccccaacgttcagcntcagacgcgccatgtgggccctgcgggccgccgtacgcccggggctgcggctctcccgcgtgggccgcggccgctcggctccgcgggcagccgcgccgtcctgccccgcgcgcgcgctagccgctgtcggccgcaggagccccgggaatctggaggggccgtggggcggagggcggggcctgcgggcggacggcggccgaagccgcacgggagacgacgaggaggagccggaagatgcggacgagaacgccgaggaggagctgctgcggggagagcctctgctgccggcggggacccagcgcgtgtgtctggttcaccctgacgtcaagtggggcccggggaagtcgcagatgactcgagccgagtggcaggtggcggaggccacagcgctggtgcacacgctggacggctggtccgtggtgcagacaatggtcgtgtccaccaaaacgccggacaggaagctcatctttggcaaagggaactttgagcacctgacagaaaagatccgagggtctccagacgtcacgtgcgtcttcctgaacgtggagaggatggctgccccgaccaagaaagaactggaagccgcctggggcgtggaggtgtttgaccgcttcacggtcgtcctgcacatcttccgctgtaacgcccgcacgaaggaggcccggcttcaggtggccctggcggagatgccgctgcacaggtcgaacttgaaaagggacgtcgcccacctgtaccgaggagtcggctcgcgctacatcatggggtcaggagaatccttcatgcagctgcagcagcgtctcctgagagagaaggaggccaagatcaggaaggccttggacaggcttcgcaagaagaggcacctgctccgccggcagcggacgaggcgggagttccccgtgatctccgtggtggggtacaccaactgcggaaagaccacgctgatcaaggcactgacgggcgatgccgccatccagccacgggaccagctgtttgccacgctggacgtcacggcccacgcgggcacgctgccctcacgcatgaccgtcctgtacgtggacaccatcggcttcctctcccagctgccgcacggcctcatcgagtccttctccgccaccctggaagacgtggcccactcggatctcatcttgcacgtgagggacgtcagccaccccgaggcggagctccagaaatgcagcgttctgtccacgctgcgtggcctgcagctgcccgccccgctcctggactccatggtggaggttcacaacaaggtggacctcgtgcccgggtacagccccacggaaccgaacgtcgtgcccgtgtctgccctgcggggccacgggctccaggagctgaaagctgagctcgatgcggcggttttgaaggcgacggggagacagatcctcactctccgtgtgaggctcgcaggggcgcagctcagctggctgtataaggaggccacagttcaggaggtggacgtgatccctgaggacggggcggccgacgtgagggtcatcatcagcaactcagcctacggcaaattccggaagctctttccaggatgaacggacgcccacagaggcctgcggggtgggggcatcgctgcctggggagctgaggcgttaccgctgtgttgggggcagcttggtgtcaggtgcagcagggtcctccttgtctggttctgcacccgtctcgctcccagccatttgctgggatgaccgtgcaggccggtgacacggccgcacctgccccaaagcgggccgcccgagcgtccactccaagcctgagcatccacacaattccagtgggccctcggtgcctgctgtgaactgctttccctcggaatgtttccgtaacaggacattaaacctttgattttacttccgtgagcagcatttccagttcctcctgcacctgccgtgagccgtggccctggtgggcaccgacggcccctccgcccggctgtctgtgttcacagatggtctcgtttcccatggtggtgtcggggaaatgacgaaaaatcaggtttcccggcagcacagagaacccttccacaaaagtagaagggaaagcaaatagttttactaaagaagcagcttcaaaccagaccgtgagccaccgcacccggcctcctgaattaacattttctaaagatgcttctggcgtgctatcctgaaagctgccagaggtgtcttggctgcattggtggtaataaaattcatactcatatttgactttaaaaaaaaaacaaaaaaccccgggcaccaaaatgaggggggggagaacaaagcgggtataaaatgagccgtgggacaaaaagtggtgcagggaccccctttttgaaaccagggcaacacgcggacccccaaaggggccgaaaaccgcacaccgggaccgtgaaagagagcaaaagaaaaagagaccgcaagac

SEQ ID NO: 655832 - DNA, 2298 bp, Homo sapiens
  misc_feature (96)..(96): n is a, c, g, or t
ggggagaggcgctggtgagccagccccggccgcacgccaatcacgagcacgtgatgaggagcggcctgtgggcagcccccgccccaacgttcagcntcagacgcgccatgtgggccctgcgggccgccgtacgcccggggctgcggctctcccgcgtgggccgcggccgctcggctccgcgggcagccgcgccgtcctgccccgcgcgcgcgctagccgctgtcggccgcaggagccccgggaatctggaggggccgtggggcggagggcggggcctgcgggcggacggcggccgaagccgcacgggagacgacgaggaggagccggaagatgcggacgagaacgccgaggaggagctgctgcggggagagcctctgctgccggcggggacccagcgcgtgtgtctggttcaccctgacgtcaagtggggcccggggaagtcgcagatgactcgagccgagtggcaggtggcggaggccacagcgctggtgcacacgctggacggctggtccgtggtgcagacaatggtcgtgtccaccaaaacgccggacaggaagctcatctttggcaaagggaactttgagcacctgacagaaaagatccgagggtctccagacgtcacgtgcgtcttcctgaacgtggagaggatggctgccccgaccaagaaagaactggaagccgcctggggcgtggaggtgtttgaccgcttcacggtcgtcctgcacatcttccgctgtaacgcccgcacgaaggaggcccggcttcaggtggccctggcggagatgccgctgcacaggtcgaacttgaaaagggacgtcgcccacctgtaccgaggagtcggctcgcgctacatcatggggtcaggagaatccttcatgcagctgcagcagcgtctcctgagagagaaggaggccaagatcaggaaggccttggacaggcttcgcaagaagaggcacctgctccgccggcagcggacgaggcgggagttccccgtgatctccgtggtggggtacaccaactgcggaaagaccacgctgatcaaggcactgacgggcgatgccgccatccagccacgggaccagctgtttgccacgctggacgtcacggcccacgcgggcacgctgccctcacgcatgaccgtcctgtacgtggacaccatcggcttcctctcccagctgccgcacggcctcatcgagtccttctccgccaccctggaagacgtggcccactcggatctcatcttgcacgtgagggacgtcagccaccccgaggcggagctccagaaatgcagcgttctgtccacgctgcgtggcctgcagctgcccgccccgctcctggactccatggtggaggttcacaacaaggtggacctcgtgcccgggtacagccccacggaaccgaacgtcgtgcccgtgtctgccctgcggggccacgggctccaggagctgaaagctgagctcgatgcggcggttttgaaggcgacggggagacagatcctcactctccgtgtgaggctcgcaggggcgcagctcagctggctgtataaggaggccacagttcaggaggtggacgtgatccctgaggacggggcggccgacgtgagggtcatcatcagcaactcagcctacggcaaattccggaagctctttccaggatgaacggacgcccacagaggcctgcggggtgggggcatcgctgcctggggagctgaggcgttaccgctgtgttgggggcagcttggtgtcaggtgcagcagggtcctccttgtctggttctgcacccgtctcgctcccagccatttgctgggatgaccgtgcaggccggtgacacggccgcacctgccccaaagcgggccgcccgagcgtccactccaagcctgagcatccacacaattccagtgggccctcggtgcctgctgtgaactgctttccctcggaatgtttccgtaacaggacattaaacctttgattttacttcgtgagccaccgcacccggcctcctgaattaacattttctaaagatgcttctggcgtgctatcctgaaagctgccagaggtgtcttggctgcattggtggtaataaaattcatactcatatttgactttaaaaaaaaaacaaaaaaccccgggcaccaaaatgaggggggggagaacaaagcgggtataaaatgagccgtgggacaaaaagtggtgcagggaccccctttttgaaaccagggcaacacgcggacccccaaaggggccgaaaaccgcacaccgggaccgtgaaagagagcaaaagaaaaagagaccgcaagac

SEQ ID NO: 655833 - DNA, 735 bp, Homo sapiens
  misc_feature (146)..(146): n is a, c, g, or t
  misc_feature (181)..(181): n is a, c, g, or t
  misc_feature (222)..(222): n is a, c, g, or t
  misc_feature (235)..(235): n is a, c, g, or t
  misc_feature (255)..(255): n is a, c, g, or t
  misc_feature (259)..(259): n is a, c, g, or t
  misc_feature (267)..(267): n is a, c, g, or t
  misc_feature (271)..(271): n is a, c, g, or t
  misc_feature (275)..(275): n is a, c, g, or t
  misc_feature (280)..(281): n is a, c, g, or t
  misc_feature (297)..(297): n is a, c, g, or t
  misc_feature (311)..(311): n is a, c, g, or t
  misc_feature (314)..(314): n is a, c, g, or t
  misc_feature (316)..(316): n is a, c, g, or t
  misc_feature (368)..(368): n is a, c, g, or t
  misc_feature (383)..(383): n is a, c, g, or t
  misc_feature (448)..(448): n is a, c, g, or t
  misc_feature (467)..(467): n is a, c, g, or t
  misc_feature (630)..(630): n is a, c, g, or t
  misc_feature (634)..(634): n is a, c, g, or t
  misc_feature (653)..(653): n is a, c, g, or t
ttaccagcgtatcataggacactttagaatggtttcccctgagtttttgtttgttaaaattctggtgtgtgtgtgtgtaaaatgcccaattaagaacactgggttcactccacgtagagcccttacaccagtgtatgtaggtttcnagagattgtgatgattcttaaattttaactacctncacttaatatgcttgaactgtcgccttaattatgttaagcntctagactaaagnccaaaatataattattgctncttnctaaaaancccnaaangtagnnctctattaacgaaaantgtacactagcccngancngtttaatggaacttactgagctatagcatagctgcttagttgtttttgaganttttttagtcaacancataatggaaacttctttcttctaaaagttgccagtgccacttttaagaagtgaatcactatatngtgatgtaaaagttattancactaaaacaggataaacttttgactccccttttgttcatttgtggattaagtggtataatacttaattttggcatttgactcttaagattatgtaacctagctactttgggatggtcttagaatatttttctgataacttgttccttttcctgactcctccntgcnaaccaaatgatagttgacnctttatcctgatttttttcttctttttggtttatgtctattctaattaaatatgtataaataaagttacattttagtctgtc

SEQ ID NO: 655834 - DNA, 2050 bp, Homo sapiens
  misc_feature (96)..(96): n is a, c, g, or t
ggggagaggcgctggtgagccagccccggccgcacgccaatcacgagcacgtgatgaggagcggcctgtgggcagcccccgccccaacgttcagcntcagacgcgccatgtgggccctgcgggccgccgtacgcccggggctgcggctctcccgcgtgggccgcggccgctcggctccgcgggcagccgcgccgtcctgccccgcgcgcgcgctagccgctgtcggccgcaggagccccgggaatctggaggggccgtggggcggagggcggggcctgcgggcggacggcggccgaagccgcacgggagacgacgaggaggagccggaagatgcggacgagaacgccgaggaggagctgctgcggggagagcctctgctgccggcggggacccagcgcgtgtgtctggttcaccctgacgtcaagtggggcccggggaagtcgcagatgactcgagccgagtggcaggtggcggaggccacagcgctggtgcacacgctggacggctggtccgtggtgcagacaatggtcgtgtccaccaaaacgccggacaggaagctcatctttggcaaagggaactttgagcacctgacagaaaagatccgagggtctccagacgtcacgtgcgtcttcctgaacgtggagaggatggctgccccgaccaagaaagaactggaagccgcctggggcgtggaggtgtttgaccgcttcacggtcgtcctgcacatcttccgctgtaacgcccgcacgaaggaggcccggcttcaggtggccctggcggagatgccgctgcacaggtcgaacttgaaaagggacgtcgcccacctgtaccgaggagtcggctcgcgctacatcatggggtcaggagaatccttcatgcagctgcagcagcgtctcctgagagagaaggaggccaagatcaggaaggccttggacaggcttcgcaagaagaggcacctgctccgccggcagcggacgaggcgggagttccccgtgatctccgtggtggggtacaccaactgcggaaagaccacgctgatcaaggcactgacgggcgatgccgccatccagccacgggaccagctgtttgccacgctggacgtcacggcccacgcgggcacgctgccctcacgcatgaccgtcctgtacgtggacaccatcggcttcctctcccagctgccgcacggcctcatcgagtccttctccgccaccctggaagacgtggcccactcggatctcatcttgcacgtgagggacgtcagccaccccgaggcggagctccagaaatgcagcgttctgtccacgctgcgtggcctgcagctgcccgccccgctcctggactccatggtggaggttcacaacaaggtggacctcgtgcccgggtacagccccacggaaccgaacgtcgtgcccgtgtctgccctgcggggccacgggctccaggagctgaaagctgagctcgatgcggcggttttgaaggcgacggggagacagatcctcactctccgtgtgaggctcgcaggggcgcagctcagctggctgtataaggaggccacagttcaggaggtggacgtgatccctgaggacggggcggccgacgtgagggtcatcatcagcaactcagcctacggcaaattccggaagctctttccaggatgaacggacgcccacagaggcctgcggggtgggggcatcgctgcctggggagctgaggcgttaccgctgtgttgggggcagcttggtgtcaggtgcagcagggtcctccttgtctggttctgcacccgtctcgctcccagccatttgctgggatgaccgtgcaggccggtgacacggccgcacctgccccaaagcgggccgcccgagcgtccactccaagcctgagcaagccaggcctggatagctcaggtctaactaagccaatcgaacaactacaacctccctggttatcgcaatggttaacagctggacacgtgaaccaagccaactcacagtgagcttcagaatatctgcagaaagtaccacaagacaacaagaactcactctctcttaat

SEQ ID NO: 655835 - DNA, 2759 bp, Homo sapiens
  misc_feature (96)..(96): n is a, c, g, or t
ggggagaggcgctggtgagccagccccggccgcacgccaatcacgagcacgtgatgaggagcggcctgtgggcagcccccgccccaacgttcagcntcagacgcgccatgtgggccctgcgggccgccgtacgcccggggctgcggctctcccgcgtgggccgcggccgctcggctccgcgggcagccgcgccgtcctgccccgcgcgcgcgctagccgctgtcggccgcaggagccccgggaatctggaggggccgtggggcggagggcggggcctgcgggcggacggcggccgaagccgcacgggagacgacgaggaggagccggaagatgcggacgagaacgccgaggaggagctgctgcggggagagcctctgctgccggcggggacccagcgcgtgtgtctggttcaccctgacgtcaagtggggcccggggaagtcgcagatgactcgagccgagtggcaggtggcggaggccacagcgctggtgcacacgctggacggctggtccgtggtgcagacaatggtcgtgtccaccaaaacgccggacaggaagctcatctttggcaaagggaactttgagcacctgacagaaaagatccgagggtctccagacgtcacgtgcgtcttcctgaacgtggagaggatggctgccccgaccaagaaagaactggaagccgcctggggcgtggaggtgtttgaccgcttcacggtcgtcctgcacatcttccgctgtaacgcccgcacgaaggaggcccggcttcaggtggccctggcggagatgccgctgcacaggtcgaacttgaaaagggacgtcgcccacctgtaccgaggagtcggctcgcgctacatcatggggtcaggagaatccttcatgcagctgcagcagcgtctcctgagagagaaggaggccaagatcaggaaggccttggacaggcttcgcaagaagaggcacctgctccgccggcagcggacgaggcgggagttccccgtgatctccgtggtggggtacaccaactgcggtgagcacgcgcccaggggaggggccttccgcggtctccgtgtcaccggtgaggactcgcccgggggagggcagggggtccctgtcgtctcagtggtgccgtacgacagctgcggtgagcacgtgcccaggagagggggttcccatggtcgccgtgtggggtacaccagctgctgtgagagctcacccaggagacgggtttcctgtggtctctgtgtggggtacagcagccaaggtaaagaccacgctgatcaaggcactgacgggcgatgccgccatccagccacgggaccagctgtttgccacgctggacgtcacggcccacgcgggcacgctgccctcacgcatgaccgtcctgtacgtggacaccatcggcttcctctcccagctgccgcacggcctcatcgagtccttctccgccaccctggaagacgtggcccactcggatctcatcttgcacgtgagggacgtcagccaccccgaggcggagctccagaaatgcagcgttctgtccacgctgcgtggcctgcagctgcccgccccgctcctggactccatggtggaggttcacaacaaggtggacctcgtgcccgggtacagccccacggaaccgaacgtcgtgcccgtgtctgccctgcggggccacgggctccaggagctgaaagctgagctcgatgcggcggttttgaaggcgacggggagacagatcctcactctccgtgtgaggctcgcaggggcgcagctcagctggctgtataaggaggccacagttcaggaggtggacgtgatccctgaggacggggcggccgacgtgagggtcatcatcagcaactcagcctacggcaaattccggaagctctttccaggatgaacggacgcccacagaggcctgcggggtgggggcatcgctgcctggggagctgaggcgttaccgctgtgttgggggcagcttggtgtcaggtgcagcagggtcctccttgtctggttctgcacccgtctcgctcccagccatttgctgggatgaccgtgcaggccggtgacacggccgcacctgccccaaagcgggccgcccgagcgtccactccaagcctgagcatccacacaattccagtgggccctcggtgcctgctgtgaactgctttccctcggaatgtttccgtaacaggacattaaacctttgattttacttccgtgagcagcatttccagttcctcctgcacctgccgtgagccgtggccctggtgggcaccgacggcccctccgcccggctgtctgtgttcacagatggtctcgtttcccatggtggtgtcggggaaatgacgaaaaatcaggtttcccggcagcacagagaacccttccacaaaagtagaagggaaagcaaatagttttactaaagaagcagcttcaaaccagaccgtgagccaccgcacccggcctcctgaattaacattttctaaagatgcttctggcgtgctatcctgaaagctgccagaggtgtcttggctgcattggtggtaataaaattcatactcatatttgactttaaaaaaaaaacaaaaaaccccgggcaccaaaatgaggggggggagaacaaagcgggtataaaatgagccgtgggacaaaaagtggtgcagggaccccctttttgaaaccagggcaacacgcggacccccaaaggggccgaaaaccgcacaccgggaccgtgaaagagagcaaaagaaaaagagaccgcaagac

SEQ ID NO: 655836 - DNA, 361 bp, Homo sapiens
  misc_feature (84)..(84): n is a, c, g, or t
  misc_feature (93)..(94): n is a, c, g, or t
  misc_feature (97)..(97): n is a, c, g, or t
  misc_feature (146)..(148): n is a, c, g, or t
  misc_feature (160)..(160): n is a, c, g, or t
  misc_feature (178)..(178): n is a, c, g, or t
  misc_feature (180)..(180): n is a, c, g, or t
  misc_feature (300)..(300): n is a, c, g, or t
  misc_feature (338)..(339): n is a, c, g, or t
agacaagtcggcctaacttcctggcttaacattaaaaaatcctagaaaagcgatagatatcaacttttattctttctaaccttnttctatganngangaactgagcaggaattaccagttcttccgttattttatgggtaattaannncccatgctcttnggagaatcttcgaataantncctaacttcaggctttgctaagtgaatagaataaacaacatcactcacttcaaacgccttcgcttagaaatggtctatctgcatgctttctctggctgccaaagggaggattcataacancagtatcaacattctcagagaattgagaaacatctgannctttgacttctacaacatttct

SEQ ID NO: 655837 - DNA, 178 bp, Homo sapiens
caccgccgatggtcagtggctcagtggttaacaaatccaactaggaaccatgaggttgggggttcgatccctggcctcgctcagcgggttaaggatccggcgttgctgtgagctgtggtgtaggttgcagacgtggctcggatcccactttgctgtggctctggtgtaggctggcagc

SEQ ID NO: 655838 - DNA, 1859 bp, Homo sapiens
  misc_feature (96)..(96): n is a, c, g, or t
ggggagaggcgctggtgagccagccccggccgcacgccaatcacgagcacgtgatgaggagcggcctgtgggcagcccccgccccaacgttcagcntcagacgcgccatgtgggccctgcgggccgccgtacgcccggggctgcggctctcccgcgtgggccgcggccgctcggctccgcgggcagccgcgccgtcctgccccgcgcgcgcgctagccgctgtcggccgcaggagccccgggaatctggaggggccgtggggcggagggcggggcctgcgggcggacggcggccgaagccgcacgggagacgacgaggaggagccggaagatgcggacgagaacgccgaggaggagctgctgcggggagagcctctgctgccggcggggacccagcgcgtgtgtctggttcaccctgacgtcaagtggggcccggggaagtcgcagatgactcgagccgagtggcaggtggcggaggccacagcgctggtgcacacgctggacggctggtccgtggtgcagacaatggtcgtgtccaccaaaacgccggacaggaagctcatctttggcaaagggaactttgagcacctgacagaaaagatccgagggtctccagacgtcacgtgcgtcttcctgaacgtggagaggatggctgccccgaccaagaaagaactggaagccgcctggggcgtggaggtgtttgaccgcttcacggtcgtcctgcacatcttccgctgtaacgcccgcacgaaggaggcccggcttcaggtggccctggcggagatgccgctgcacaggtcgaacttgaaaagggacgtcgcccacctgtaccgaggagtcggctcgcgctacatcatggggtcaggagaatccttcatgcagctgcagcagcgtctcctgagagagaaggaggccaagatcaggaaggccttggacaggcttcgcaagaagaggcacctgctccgccggcagcggacgaggcgggagttccccgtgatctccgtggtggggtacaccaactgcggaaagaccacgctgatcaaggcactgacgggcgatgccgccatccagccacgggaccagctgtttgccacgctggacgtcacggcccacgcgggcacgctgccctcacgcatgaccgtcctgtacgtggacaccatcggcttcctctcccagctgccgcacggcctcatcgagtccttctccgccaccctggaagacgtggcccactcggatctcatcttgcacgtgagggacgtcagccaccccgaggcggagctccagaaatgcagcgttctgtccacgctgcgtggcctgcagctgcccgccccgctcctggactccatggtggaggttcacaacaaggtggacctcgtgcccgggtacagccccacggaaccgaacgtcgtgcccgtgtctgccctgcggggccacgggctccaggagctgaaagctgagctcgatgcggcggttttgaaggcgacggggagacagatcctcactctccgtgtgaggctcgcaggggcgcagctcagctggctgtataaggaggccacagttcaggaggtggacgtgatcgctgcctggggagctgaggcgttaccgctgtgttgggggcagcttggtgtcaggtgcagcagggtcctccttgtctggttctgcacccgtctcgctcccagccatttgctgggatgaccgtgcaggccggtgacacggccgcacctgccccaaagcgggccgcccgagcgtccactccaagcctgagcatccacacaattccagtgggccctcggtgcctgctgtgaactgctttccctcggaatgtttccgtaacaggacattaaacctttgattttactt

SEQ ID NO: 655839 - DNA, 2064 bp, Homo sapiens
  misc_feature (96)..(96): n is a, c, g, or t
ggggagaggcgctggtgagccagccccggccgcacgccaatcacgagcacgtgatgaggagcggcctgtgggcagcccccgccccaacgttcagcntcagacgcgccatgtgggccctgcgggccgccgtacgcccggggctgcggctctcccgcgtgggccgcggccgctcggctccgcgggcagccgcgccgtcctgccccgcgcgcgcgctagccgctgtcggccgcaggagccccgggaatctggaggggccgtggggcggagggcggggcctgcgggcggacggcggccgaagccgcacgggagacgacgaggaggagccggaagatgcggacgagaacgccgaggaggagctgctgcggggagagcctctgctgccggcggggacccagcgcgtgtgtctggttcaccctgacgtcaagtggggcccggggaagtcgcagatgactcgagccgagtggcaggtggcggaggccacagcgctggtgcacacgctggacggctggtccgtggtgcagacaatggtcgtgtccaccaaaacgccggacaggaagctcatctttggcaaagggaactttgagcacctgacagaaaagatccgagggtctccagacgtcacgtgcgtcttcctgaacgtggagaggatggctgccccgaccaagaaagaactggaagccgcctggggcgtggaggtgtttgaccgcttcacggtcgtcctgcacatcttccgctgtaacgcccgcacgaaggaggcccggcttcaggtggccctggcggagatgccgctgcacaggtcgaacttgaaaagggacgtcgcccacctgtaccgaggagtcggctcgcgctacatcatggggtcaggagaatccttcatgcagctgcagcagcgtctcctgagagagaaggaggccaagatcaggaaggccttggacaggcttcgcaagaagaggcacctgctccgccggcagcggacgaggcgggagttccccgtgatctccgtggtggggtacaccaactgcggaaagaccacgctgatcaaggcactgacgggcgatgccgccatccagccacgggaccagctgtttgccacgctggacgtcacggcccacgcgggcacgctgccctcacgcatgaccgtcctgtacgtggacaccatcggcttcctctcccagctgccgcacggcctcatcgagtccttctccgccaccctggaagacgtggcccactcggatctcatcttgcacgtgagggacgtcagccaccccgaggcggagctccagaaatgcagcgttctgtccacgctgcgtggcctgcagctgcccgccccgctcctggactccatggtggaggttcacaacaaggtggacctcgtgcccgggtacagccccacggaaccgaacgtcgtgcccgtgtctgccctgcggggccacgggctccaggagctgaaagctgagctcgatgcggcggttttgaaggcgacggggagacagatcctcactctccgtgtgaggctcgcaggggcgcagctcagctggctgtataaggaggccacagttcaggaggtggacgtgatcagggggggttttgggggaggaaaaaaaaccccggggtttgggtaatttaccccccccctggagaaaaggggggggaaaaaacccccggcctgaggacggggcggccgacgtgagggtcatcatcagcaactcagcctacggcaaattccggaagctctttccaggatgaacggacgcccacagaggcctgcggggtgggggcatcgctgcctggggagctgaggcgttaccgctgtgttgggggcagcttggtgtcaggtgcagcagggtcctccttgtctggttctgcacccgtctcgctcccagccatttgctgggatgaccgtgcaggccggtgacacggccgcacctgccccaaagcgggccgcccgagcgtccactccaagcctgagcatccacacaattccagtgggccctcggtgcctgctgtgaactgctttccctcggaatgtttccgtaacaggacattaaacctttgattttactt

SEQ ID NO: 655840 - DNA, 2658 bp, Homo sapiens
  misc_feature (96)..(96): n is a, c, g, or t
ggggagaggcgctggtgagccagccccggccgcacgccaatcacgagcacgtgatgaggagcggcctgtgggcagcccccgccccaacgttcagcntcagacgcgccatgtgggccctgcgggccgccgtacgcccggggctgcggctctcccgcgtgggccgcggccgctcggctccgcgggcagccgcgccgtcctgccccgcgcgcgcgctagccgctgtcggccgcaggagccccgggaatctggaggggccgtggggcggagggcggggcctgcgggcggacggcggccgaagccgcacgggagacgacgaggaggagccggaagatgcggacgagaacgccgaggaggagctgctgcggggagagcctctgctgccggcggggacccagcgcgtgtgtctggttcaccctgacgtcaagtggggcccggggaagtcgcagatgactcgagccgagtggcaggtggcggaggccacagcgctggtgcacacgctggacggctggtccgtggtgcagacaatggtcgtgtccaccaaaacgccggacaggaagctcatctttggcaaagggaactttgagcacctgacaggtgggtccgtccagacctgctccttccccaaacctccttttctgtccgccgctaccgaaaacatccaaccgagacatgctgaagtacgggggtcttgcggggccagaggggaagcggcctctcggattgcccagaaaagatccgagggtctccagacgtcacgtgcgtcttcctgaacgtggagaggatggctgccccgaccaagaaagaactggaagccgcctggggcgtggaggtgtttgaccgcttcacggtcgtcctgcacatcttccgctgtaacgcccgcacgaaggaggcccggcttcaggtggccctggcggagatgccgctgcacaggtcgaacttgaaaagggacgtcgcccacctgtaccgaggagtcggctcgcgctacatcatggggtcaggagaatccttcatgcagctgcagcagcgtctcctgagagagaaggaggccaagatcaggaaggccttggacaggcttcgcaagaagaggcacctgctccgccggcagcggacgaggcgggagttccccgtgatctccgtggtggggtacaccaactgcggaaagaccacgctgatcaaggcactgacgggcgatgccgccatccagccacgggaccagctgtttgccacgctggacgtcacggcccacgcgggcacgctgccctcacgcatgaccgtcctgtacgtggacaccatcggcttcctctcccagctgccgcacggcctcatcgagtccttctccgccaccctggaagacgtggcccactcggatctcatcttgcacgtgagggacgtcagccaccccgaggcggagctccagaaatgcagcgttctgtccacgctgcgtggcctgcagctgcccgccccgctcctggactccatggtggaggttcacaacaaggtggacctcgtgcccgggtacagccccacggaaccgaacgtcgtgcccgtgtctgccctgcggggccacgggctccaggagctgaaagctgagctcgatgcggcggttttgaaggcgacggggagacagatcctcactctccgtgtgaggctcgcaggggcgcagctcagctggctgtataaggaggccacagttcaggaggtggacgtgatccctgaggacggggcggccgacgtgagggtcatcatcagcaactcagcctacggcaaattccggaagctctttccaggatgaacggacgcccacagaggcctgcggggtgggggcatcgctgcctggggagctgaggcgttaccgctgtgttgggggcagcttggtgtcaggtgcagcagggtcctccttgtctggttctgcacccgtctcgctcccagccatttgctgggatgaccgtgcaggccggtgacacggccgcacctgccccaaagcgggccgcccgagcgtccactccaagcctgagcatccacacaattccagtgggccctcggtgcctgctgtgaactgctttccctcggaatgtttccgtaacaggacattaaacctttgattttacttccgtgagcagcatttccagttcctcctgcacctgccgtgagccgtggccctggtgggcaccgacggcccctccgcccggctgtctgtgttcacagatggtctcgtttcccatggtggtgtcggggaaatgacgaaaaatcaggtttcccggcagcacagagaacccttccacaaaagtagaagggaaagcaaatagttttactaaagaagcagcttcaaaccagaccgtgagccaccgcacccggcctcctgaattaacattttctaaagatgcttctggcgtgctatcctgaaagctgccagaggtgtcttggctgcattggtggtaataaaattcatactcatatttgactttaaaaaaaaaacaaaaaaccccgggcaccaaaatgaggggggggagaacaaagcgggtataaaatgagccgtgggacaaaaagtggtgcagggaccccctttttgaaaccagggcaacacgcggacccccaaaggggccgaaaaccgcacaccgggaccgtgaaagagagcaaaagaaaaagagaccgcaagac

SEQ ID NO: 655841 - DNA, 160 bp, Homo sapiens
  misc_feature (57)..(57): n is a, c, g, or t
  misc_feature (130)..(130): n is a, c, g, or t
gagaagatccgagccgccggagcacgccagtccagataaatgttgaggcctcaggcntgcgtgctccgccggctcgggatcttctgcacccgcaaggggaggcctaggagacagctcaaggcctgaggcntcaacatttatctggactggaaatgattcg

SEQ ID NO: 655842 - DNA, 837 bp, Homo sapiens
aaatcccgcggtggttgtccaacagggtaacaatgtcccgatattggcggcgcaacagcacacgaagtgtcccaacacggtgtactctcgcggcgggcaaattccctcccccgtgaaatggtacggctcccccttggtcgacaaaagcggttgtggtgccccaggtctgtttaccccggcgcgccgaggaactgtgtgtcttcctgcgaaataacaggggcgagacatattattttctgtatgacaaataatgggcggtggctatcacacgatcttttctctgggaccacgaccattttacaaagacaagatccttttcgaccaccgatcatttgataaaaggcactatatgttataggacccttccttcaggctggcaccacccccacccaatataatatcaagaagagggtgaccaccacttatatcgccgctttcacaagcctccaccattcgcttttcggggcaattctatcccctcctatccctcacccagttcgttgcagtaaataatatcacccttccaaatattctgtgtgccccaccaggagtataaagtttcgagagtctcccgcctcccagcaccttgttggatacaatttatacgtcctctgctactcatcgcctgggccgtttcttatgtcggggcgccacaattgtagatttctcataggcccgctattctttaggcacgcccagtaattactactggagactgttctacctacggtgatttatgaggtatctcaggtgaacagccggagaagtggttgcgccgccctgggagctaacttgtggcggttcaaaaaaaaaggtacatcttcccgcaacataaca

SEQ ID NO: 655843 - DNA, 914 bp, Homo sapiens
  misc_feature (128)..(128): n is a, c, g, or t
  misc_feature (198)..(198): n is a, c, g, or t
  misc_feature (260)..(260): n is a, c, g, or t
  misc_feature (295)..(295): n is a, c, g, or t
gtgcaggccacactcagagcagacccacctttgtatcagcgcactctgcgattcatctgtgaattcatctgtgacagccgcttccccaactgcacagggcaggtgttgtggggaaagggcaaccaggntgttactttgcagtccccgctggaagcatgtttcctccagggtgaaggcagatggctgcccaggggcacntcacccaggacatctgttctcacaatgcttctctctcaattactctcaagtctaacttgccnaaaacctctgcctgctgggtggaagcatgaggctngctgagggtctcgaggctgctctgaagacagcaggccctacaaactcatgggtgttcaccccacagttgtctctccactgccactcatgtcaacaaaaccaaactttggattccatttggagtatccttctgccttctcttgttcctgactttgctgtcttgtaaaaagttgttagaaacaaccaccttctaataggcctcactggttctaggtgttgacactgtggctattgttgcctgggatggttgaaatggagtcatttcccagagcagggcaaggccactgaagcactcagtaagcagttgcttccaccttgaagcagaggcgcttggtaaggcagagcacctgaatgctctgtattgcagggaggatttgcaagtggagtgtgcattttttgttctttcctgtagtggcagttaacttaatggtctctaaaacgttctgtgcaatcttaagatgttaatatttctgccaaaaaaagtattctttggtcaaatacatttgggaaagccagcacatcctaggcccctcctaaagatttgctgggcacaaagtattctgaaggctctacaaagtcctgtggaaaataaaccctttaagctttgtcaaaaaaaaaaa

SEQ ID NO: 655844 - DNA, 183 bp, Homo sapiens
ttttctccatgttggtcaggctggtctcgaactcctgatctcaggtaattcgcccgccttggccttcaagtgcttgggattacaggcgtgacacccacttccagccagcagtatttcttttaagtgagcatgaagtgcgccaatatatgggtctgtatatctatgtatataggtcatatgtgg

SEQ ID NO: 655845 - DNA, 185 bp, Homo sapiens
acaaaagaggagaaaaggggcaaacattgcaggaactagtttcaatcttgaaggggctcatggcaaaactctgaaagtgactggttcaccttgaactgtcaagattcaattttctcacatctgtgtcatggggaacgtgagagttggtaaagttcattatagagcataaaggaacagagttctga

SEQ ID NO: 655846 - DNA, 183 bp, Homo sapiens
  misc_feature (22)..(22): n is a, c, g, or t
  misc_feature (183)..(183): n is a, c, g, or t
caaaaatgtggcactcaagtcngtttatttaagcgcagactgccgcgaacagagtggtgatggcgcctaagcatagtgttagagttgggattagtgggctattttctgctagggggtggaagcagactgagtaagaagattccgtgcatacaactattagcgcttgacgtccactattttggn

SEQ ID NO: 655847 - DNA, 425 bp, Homo sapiens
agttagcaggtggtattcaaatgaatgaagtatgaaaaacacctcaggctgtgcgtggtggcttacacctgtaatccttgcactttgggaggccgaggtgggcggatcacgaggtcaggaattcgagatcagcctggcgaacattgtgaaaccccgtctctgctcaagataccaaaaaaaaattagctgggtgtggtggcatgcacctataatcccagtactttgggaggccgaggcgggtggatcacgaggtcaggagtttgagaccagcctggccaacacggtgaaaccccatctctattgaaaatgcaaaaattagctgggcatgatggcatgtgcatgtaatcctaggtactcaggaggctgaggcaggagaatcgcttggacccggtgggtggaggttacagtgagccgagatcgcgcca

SEQ ID NO: 655848 - DNA, 398 bp, Homo sapiens
ggcttgcctaccccgttttttgtgtcaaaacagtcccgcaaaaattaacagtggcagccctgtgatgagaaaaacgaaaaaaccacttatttccactttttgacttttgttgtggccccagcccttttgtttgtgcttaacctttaaaacagtgaggcagggtaaactgtgaaatgggatttttcctttgggaagggccaattttagttccttcatgaaacccatttttaagatctttaaaataaaatttagtcgcccctaaaaattgtttattgttttccactaaagacccaaaatcccaaaaaataaagcgttgcccccgtgggagggggttgtagttgcctaaattggaccctttacaaatgtttccttttttttaaactccctagtccctggga

SEQ ID NO: 655849 - DNA, 482 bp, Homo sapiens
ataacctacgaatccaatccaaggcttcccaaatcagcccgcacatcctgggggggggagttaggcttagtagcttgaatttacgttagtcttttttcccccttgggcgtggtatgctgtatgttggcgtctgggaagggcctactcgtctccctaggacgagctactagaaggttgcgtttactcggaggttttttccatcgggttataggcttttggttcttacgttatggttaactatatccgtggagggtcgtttgttcttcgaacttgagcgttcgtaagtgtacttttctttcgttgaaggcgttttactaatagtagaaggacgtttgactaggtggatttgggaccctttgtgcgagaggttctgcggatttacgggtgttttggcggtgttgggtatacggtgaggcttttgtggggtggttgaggcgagagttttgcgattggaatttcgggttataacgaataatgctatt

SEQ ID NO: 655850 - DNA, 847 bp, Homo sapiens
cctctccataaagcatgcaacatgctcctgagccagccagtgacatatcaggcatttcgggaatgtacacgtggagaccacagtatcatgccagcggcgtggaattaagattttggtgcctctgggtttcgctacgactaaagtgctcttgggaagttgacaagacggtggatcatggaaccgtgttgagcgcactgcttgcgaggtttggctgtgacattaccatggcaggactagttcggctagagttacagtccagcttcacgtcaacggtggactggagctatgaagcctgttagtactacttaacgaacatactttctcgttgcaacacagaacacacttatgcgttgtctgtctgtccctccttctctcaaggaatgcactgcgcgtttctctcgtctgtcgtttcaactccggcgtccggcaagatgcagggcagctcgatacagttcgcctcgtgacgaacgtcactcatactcgagacacacgtggcgtttccagtgctacattcacacgaactcctcgtcggcagcttctaaaggctagcgatcgcctggactcctccagggggctctccgttgggccacattaggagcttctaggagcgaaggagctaccctattgggggccgtcagagtagaaccctaaactaaacgcggattggccccttcataacccctaaggcaattggagtggacccttggtttggcctttgccggattaatctaccccggccgggactatccggttcattacacacccgggacgtgcagttcgactcatacaatacatgaaatctcctaactttgcacgttttggaattctcctcacccggctaatcggg

SEQ ID NO: 655851 - DNA, 444 bp, Homo sapiens
gactatgtctactctacaatctctctgtctctgttgcctccctgatcagataggagatgatcttccttgcctgaattctcaggctgtagcggtgtagccaccatgaatgaaaaaaggctttagaaagaaacgcagggttctgcggacatatcagacaggacatgactattgcagcacattatcaaacccaattcttcacccctccctgcacccacactgcatgatgtgtgataatgcagttcctcccactaaaggggcaagtactacctacatccctgctcctggctctgggctcggccaataggatgaggctgtgtgagggcgtcccatgttccagcctaagccttacgaggccttgctcacttctacttgctcttctgccttcatgagaacattccaggctagccaggcggatcgcaagcgccctggacagccacaggggcc

SEQ ID NO: 655852 - DNA, 428 bp, Homo sapiens
agcgggcggcggcatttctcctcgcagctcgctgcctcctactatccctgcctccctctaccccctctgttatctcccttccttccctctccgaccctcttcctactccctcccgaaacatatatcccatccatcctctcaatctagtcccctatgtcatctccggattccagcacaatcagccccattatcgaagatgacaataataaaacaaaagtatcatcgcgaacgagggagcacgcgcgacgtgagcacggttcgcagcgtggggcccaaggtccatgctgacgtaccgcgcgaccacagagaggcgtggagaccccatgcaggggaacggacggaagggaaagcgcagagctcgagtagaacgagcagccgaaagagaccaagcgcaactaacagaggcggcggtagaaggaaagacagca

SEQ ID NO: 655853 - DNA, 303 bp, Homo sapiens
  misc_feature (294)..(294): n is a, c, g, or t
gacagtcagacctggtctgactggaaatatctttctttgttatttttggcaggatgcttaaccactgcaaacatctatattcaattctgtttaacagagatatgaagtgatgacgcctacacatctcaaacttaacatgttcaaaacagaagtcctgctcttcctccacaaatctgttcttcctgtaggcttccccattttaatcggtggcaactccatcctttcacttgtccagtccataaaacgggagtcattgtgacccctttctgactcttgcaccccatagtcagccgngtaccgagc

SEQ ID NO: 655854 - DNA, 116 bp, Homo sapiens
gacaggctctacctggcccaggctaatctcaaactcctcacttcaaatggccttccacctcaccctcccaaagtgctgggattacaggtgtgagccaccatggcgctacgtaggag

SEQ ID NO: 655855 - DNA, 338 bp, Homo sapiens
tttatattaagggagacgcgcacaaaacctgatgccaaaccgttttgtcatcctcacagcaaggaccggacggatgggacccacccaggagcactgctctccttttagtaatgtattcatatattttaaattccccgcgacgacttttgcatatttatgaagaaaccttgagaccgaagctacagcattcatcttaaccgtgtgggtggttttggggtttcgattggtgttgggttcggtgacgtcgtttgcagctgtttcctggccctggcgagtgtctgttttggtgcccagtgcttctaacaaatttgtttttaataaaacctgtggaagtgtga

SEQ ID NO: 655856 - DNA, 759 bp, Homo sapiens
tccgtgaggagctcctttgggcagggtgtagtgtttggtgtccctgtcttgcgtgatattgacaaactgaagcttatcctgcaccactggacttaaggaagagtgtactcgttaggcggacagctttagatggacggaccgggcagtctcatcccccgataaggagcagagtcctttgtactgaccaagatgagcaaaatcatacatccaggagcctcccacgaatggagaaggtatttatagaaaactacaagctggagatattgacctagagttgtggtccaaagaagctccataaagacttgcagaaataaatccaacttagtatggaaagcttattatgacaataccattatttcatagagtagtgcctggtttcatagtccaaggcggagatactactggcacagtgagattggtggagaagtctatctatggagacgccatatcacaagatgcactaacataacaaagagatgcgattcaaaatccgagagcacggactggtttgcccattgggcaaaatgcatggatcctaccatgaataaatgggacaatcagataaatcttatcaacagcgtggggtacgagcaagaatgaaaattaaccacaaatcagcattaccaaacattaggaacagggttaaagggagaatacgaagatataatacacagtgtttgcgagcattgtacgacagtaaacaatattgaagatagaaggacaggaccaaataaacaacagaaaataacaaggtggaag

SEQ ID NO: 655857 - DNA, 205 bp, Homo sapiens
  misc_feature (19)..(19): n is a, c, g, or t
gggtccgctcggacgacanagaaaatctgccacacaccttctacaatgagctgcgtgtggctcccgaggagcacccgtggctgctgacgaggccccctgaaacccaagggccacgggagaagatgaccagattatgtttgagaacttcacaacccagacattgtacgttgctatccaggctgtgctaatccttgtacgccttggt

SEQ ID NO: 655858 - DNA, 943 bp, Homo sapiens
aatcccagcactttgggagaccaaggtgggcggatcacttgaggccaggggttccagaccagcctagccaatatggcaaaacccagtctccactaaaaatacaaaaattagttgggcgggttggtgcatgcctgtaatccaagctactcaggaggctgagacatgagaatcatttgcaccctgaaggcagaagttccagtgagccgagatcacaccactgcactccagcctcagcgacagagcgagactatgtctcaaaaaaaaaaaaaaaaaaagtttgggggacacaccggggattttccctcctttcaaggcccccctttgaaatttggtttttccaggggggaaacagtactcttcaacagggggggaacgtggggcacatttggcctaaactccaacgggcatcgacggtggaacatcccctcaatggaagagacccacattgcactttggtttcccatcccggactgaggctggaggtacccccctccggtgaagtaatcccggctcaagattttttactctcacatcggagcgactgagaaccaattcccaacttgggggggacttcctataaaaaaccgcctgctgggtaatttccacaaatccccctagtgaggtgggagggtccaacctggccaccttcaatctttcgaatggggaggcacctgacggctaacacgttctctggtaaccggcccaaattccctggccttatacgacattctgggaagaccaggcaacccggacagtaagggctgagctaaagcaattgctccaggtcaattcctactaaagagggttggtttacgacaggctatataatttggggtacacagcaccaggcccaaaatcgagctccgtggatgaataaatatgccaggcactgacgtctgacgtgttttccttcgttacaccccgtatgtcttcataatctgaa

SEQ ID NO: 655859 - DNA, 266 bp, Homo sapiens
tcagcaccatggaggatgacagtgctttgtactgttaggtgctattctccatatgtgcaatcaaaatccacccaattgggtggcgctcaggctcatgcctgtaatcccagcactttgtgagcccaaggtgggtggatcgcttgagcccaggagtttaagaccagcctgggcaacatggcaaaatcctgtttctacaaaaggtacaaaaattagctgggtgtggtggtgtgtgcctgttgtcccaggtacttgggaggctgaggtgg

SEQ ID NO: 655860 - DNA, 338 bp, Homo sapiens
tacattggggaaaggcttcagcttacatgtcacccaaatataggaaaatgcacactcatgttcactcctatgctacaatacatttatgcgtcttttttctgtatttctagaatggtatttgcattaactgctcatccacgctgttagccactatagtatttatattgaagcttgtactttttaactctcgctctgttctctctaaaagctatcaatctacctctttttggtagtggaaacaaaacaagacaggccgccccagtatatttttctaatttggcaggatcatatagtgcaaattatctgtatgcttccaaaacaacaaacaaagagagaaa

SEQ ID NO: 655861 - DNA, 242 bp, Homo sapiens
attttaaaaaaaatacttttttctatttttaatttgttgtagagatgtggtctggctttgatgaccaggttggtcttgaactcctggcctcaagtgaacctcctgccttggtctcccaaagcactagggctgctagtgtgagccaccacacccagctaacttttacattttaataattacagttgcaaatggaccaaaagaatctgtaaagacaacttatgagcaaatgtattcaagttttt

SEQ ID NO: 655862 - DNA, 716 bp, Homo sapiens
gaggaatggtcggtgtgcgccgtccagcaggtgttcggtggcgctccgggtgggatgtccgaggtcgtggctgcctcgccgtaggtatacccgatgacgtgcacacctcacgagagcgtgcgggaggcattggcagagcactccacatggtccgcctctagcgccccgaggcgtcttgttgggccggacatcttgtttcctgtcggggcgtgcgggcatgctcgagggactagatcagatgttgactggtgcaggggctgctctgcagcacttcgtggccggtgtggctagccagctttgggacagtgcgcaccgtgtacgtggctgcccctgcactctgtcgatggatgctagcttgctgacatgtgagtggacccctggcccgatgcgctgcagcttctcgccctggactggagcaccgccgcgtgctctgccagctgtggcttgctggactgctcatctgctggaatggctgaatgaatggcaaaaggctccagcagtctcctggccccgctcctcctccggcctcaagcggccgccctgctacgccggaaccctgaacaacgtagtctgcgaccttgtgcggcgtctgaggcgccagcggggacgtggcacggggccgccctgccctggttcgggacgtggcgggtggaatcttacaagttcggactggaaggcatcgccgcggttctgctcggctcgcgcttgggctgctg

SEQ ID NO: 655863 - DNA, 386 bp, Homo sapiens
ggtctgggaacgccaaccgctccgctgtgcgcagactgtgctgtagactctctggtgtagcgctgtgtggatctagagatccgcggtttcaacacgtgggagatctgggcctccctctggtggctggtggtgtgggccaaaggccggagcaaggcctcttttcataccgtgtcggatgagctggtcaactatgtgaaccgggataccacgtgggagggcgggcacacactttacaacgcggacatgagctacttgaagagggtatgtggtaccctcctgggtgggcccaaggcaccccagagagtgttgtttaccgaggacctgaagctgtctggaagcttcgatgcacgggaacacagggcacagagtgccaccatttgagatcg

SEQ ID NO: 655864 - DNA, 83 bp, Homo sapiens
ggagggaatgtcagtccacccttattgggcgaataccccgcagtgtaactgttttaaataactcgtgccctgccccacccagt

SEQ ID NO: 655865 - DNA, 800 bp, Homo sapiens
tggagacagagtctcattgttgcccaggttggagtgcaggggtgcaatctcggttcactgcaaggctcggtttcccaggttcacgccattctccgggttcagcctcccaagtagctggggactacaggcaccggccacagtgccgtggctaattattgggtatttacagtagagaaaggtttcaccatgtgagccaggatggtctcaatctctgtgacctgtgtgaaccaccggtcttcggcctcccaaaggtgctggggatacacaggtgtgagccacaagcgcctggccccatgaaaccaagggggtttttaagggaaacaaaactatttttttgaatcatcagatttatactagcctatatggatataagcatatctggtattattgaatctagaattttttacattatttttataatactgtaagctacagtatatggatgacgtgaaagatatcatgtgcttaataggggtcactttgtcaataaaatttaactttaactcttactttataaattggccatagccacactttacttataccattaataagggaagacaggctcattctcgggaaataggcttgcgtgtccttcaaagatattttttgatcatgatgtggtttcgtaacagcctcaatgtttggctggtaaggccttggcccttgtaaaaactggcgtgggtttggcaaactccgtattcggccccatgtaaagttttcaccgggaatagcgttctcccatatggcgcacttttgcacaactgttggtactctgtgttagcacagttcatagactt

SEQ ID NO: 655866 - DNA, 1136 bp, Homo sapiens
attcacgtgatatccgctatactcaggctacacccgtagagcagagcggacgccaaaatccatctcactatcatattcatcggcgtacaatctaactctatcttcccacagcagtttctcggccgatccggaagtgccccgaggttactcggactaccccgagtgcatacaccacactagaagagcatcctatcagtctgtaggctcattcatttgctctaacagcagtcagtattaataatgttcatgatttgcgaagccttcgctgtcgaagcgaacatagtcctaatagtaccgaagaaccctccgataaacgctggagtgactatatggatgccccccactcctatcacacattcgaagaacccagtatacgataagaatctagacagaagaagaggacgcgaagtcgaaccgcgcccaaaggctggtattcaagccaagccccatggacctccatgaacttttcaaacgaaaaaacaacacaacaaagacaagaacagatacaacgaagaaacagaccccaacacgcgggcagccgaccgcccaagcaacacaaccaccaccacgccacgtggcgactccaccaacacggcccacccccgcacgccgcagcgcacgacaccagcgtggagcacgccatgtggcggtgccaaccatgacatgggaccactatacacctcgctatcatcctacatccgtcacaataagggctccagcacacgtccgttccaagacgaccttcaccatacacatcacacccgcctacccactatagccttccgtgacgtcccaccgtctccctgctcgtgatctacacatacgaggtccggaacaacccacgcgtctagcgggtgtacaatcgcgcacacctggctctcctgatatatctctcttctcttagtctatcttctatacattggcatcttgtttcgatgcaataccccactaaacattccgctgctgccgcccacacacacatacatcaaccgactcacggactaactaccacataagaaccaaatcatatgcacaccgaaacgcccatcactccacacccagtcagcgtgactaacgactattatacaccgcggacaacccatactctacattcaccatgctcatagtgactactc

SEQ ID NO: 655867 - DNA, 568 bp, Homo sapiens
tactgaaaataacagaaaaagtaaagggtactacgtaaacatatcactattataaatccctgtccatgaatataagatgtctgttcaacggagctttatatatacttattcacatataccacagattactcagccttagaaaggaaattctgatacatgctacaatatggatatactttaaggacatcatgcttcagatgaaataaactagtcacaaaaagacaaatcctgtatgattccacttaacatgatgttcctaatcaaatttataaatacataaatggtggttgtgtaatgggtatagagcgtcagttctgcatggtaaagagttctggaggatggtagtacaacaatgtaaatgtactaaatgctactgaactgtacacttaaaatggttaaaggctgggcacagaagctcaagcctgacatcccagcactttgggaggccaaggtaggagaatcacttgaacccaggaggtggaggttgtagtaagctgagatcacgccaatgaagtccagactgggtgatagagtgggactccatctcaaaaaaaaaaacagttcatgg

SEQ ID NO: 655868 - DNA, 286 bp, Homo sapiens
gaggtatagaatagaagtgaagtctaaagatgaacttaatagactatacgtacttttatatccactgggaaaccaagaaattagtgtgacatgctttgtgaagacacttgctctacttgtgttgatttagaaccaagcctgcatatctccaagcatgcatacagctccctctccctgagtgtgggctggacttaatgacctgcttctgatgagcagaatagggcaagaactggagtgtggtcacttctgtaattcaattccccaggggaaccggataccgagcatc

SEQ ID NO: 655869 - DNA, 204 bp, Homo sapiens
  misc_feature (169)..(169): n is a, c, g, or t
gtgtaatgtactaatatgtggttttatacctgccccctcttacctccccactttgagtctctagtgtccattatgtcactctgtatacctttttgtacccataagttagctctcacttataagtgagaacacacagtatttggttttccattcctgcagttgcttcacnttagaataataatcctcgcagctccatccaacaat

SEQ ID NO: 655870 - DNA, 145 bp, Homo sapiens
agaggagtgatacaagaagctcatatagagcgcacccccagagtatgaggacatagtccactccaactacagccagtgccatatcctacgagtgcctgtggtcaccaccatcaaatgaagctgctaagcttcattttgactctaa

SEQ ID NO: 655871 - DNA, 277 bp, Homo sapiens
gatctagaccatccttatcacgtgcatgtgtcttcacgaagttctcaaacagtgagtacttcaagattacctctagggagaacaagagctgattcggaactaaaggagaattattcggttcttcaaatttctggggctcctgaaaaacaaattgtcttccctggtccaatcggacagtgtatcgacgggtgagtgcacagggtggcggcaggttgcggaacaagccgaaaaacattgagggagctgggagacccttcccaaaatgggacgtggatcg

SEQ ID NO: 655872 - DNA, 339 bp, Homo sapiens
ctcaacctgtgttcattggacctactgggcctaagggacttgctaaactctctctgcagcaggtagccatcgctcagactagtccctgtactgacactgttatggataccgtgaataccaccttgcagtaccttagccctgctacactgaagcatcacttcctgcctggactcgtgtcatcaggcagactctgactcacgagcgatcctatttcagccctgtaccctttacctcgacgagctactatagttcccacattatcgcctatcatacttcttccacttgtgtcctttgatctgatgactaccatcactgttatctagcacttgtgctcccgct

SEQ ID NO: 655873 - DNA, 522 bp, Homo sapiens
ctgtcggctgaccaccgcgttctgggtcgtagctgatgcggaggatcaagcggagcagagtttacaggcttggctgggagatactgtaactgcgagacttcatgagcacacgagtattcactgtaatctcgttaataaatgtttacatacaaggagggggctattaagcaccacagtacagacatatccacaaggtcgtcaatgcatgcaagaaaaatagggctggatcttatcacggccctgtctccccttgttactctgtgccagatcttcagtgcccctttccatagagggatttttttctcatagagtaattatatgaacagttataatgacctccttagggtctgaaatactttggaacagaatttctttattttaaaaaaaaacagagatggggtcttactatgttgcccaggctggtgtcgaactcctgggctcaagcgatccttctgccttggcatcccgaagtgctgggattgcaggcataagctaccatgctgggcctgaacatatttacaa

SEQ ID NO: 655874 - DNA, 278 bp, Homo sapiens
cccgcatcggcgtaagatggggctggacgccaccaacaaatggcccggcgagaccagccgtgaatggggccgcaccatcaccatgactgagcaggtcaacgcccgcgtggacgacatcgtgtcccggattcttcaaaagccgtgacaagcacccagctatccgacaaacgggcttgcgttgcctgaacgcttgatctaatctttaattgcctgctgcgagcaggcacttcaataagacgcagtcactgcgtcttgggatgcggttacgccgatgcggg

SEQ ID NO: 655875 - DNA, 289 bp, Homo sapiens
  misc_feature (2)..(2): n is a, c, g, or t
ancacgaccgatgtcgaatggtcgtgcagctgcgacatcgaacgcgccactgcggaaggcctggaagtattcgaaggctcgaccatgcagtttgtgcgcgacgacgaggatggcgccattgccgccgcctgcgaagaagccgtgcgccagatcgacaacatcatcgccaacccgctggtgcggctggcttagctcctgcatttccagcaaacctgcagccggcgcccgccggctgtttttttatgcgcgcgcccgccgtcccgcccggtggcagtctgctctgtttcat

SEQ ID NO: 655876 - DNA, 248 bp, Homo sapiens
tgaggtcatagtgcccgcaggttgtttgtgattagctgtttctaacaattggttcatacaactagattgttcattattggttctcaacttgcgtgagctctccccaacctggggaccctttccttattgtcgcttacttatcaggtctccacataaaggtgtggaaactacattcattcatatcttcaacacaaattgtaggtggcctgtttgctaaaacatttattcaacaaatatccagtccaagc

SEQ ID NO: 655877 - DNA, 449 bp, Homo sapiens
ttctagcagtatccccggatcggcgaccatttcaaccacttcagccccctattgagggcgacgtgaggcgagtaagtcagtcgctgctgcacgagacggggcttgtgccggtggtacccggaatttgctggacatggggacaagatgcatgaatgtgaatatccatttaactactggccgtagtctgaaaagtcccacggtgtctaccatgattcattatttgggcccagaggattccctgaggcctagtatttggctcggttggctcagtaacggacactatgatgctgtatttgatcactcctaacctaacccagagtacgacaactggtgcaaacaaactcaagtgcaaaggaaacgcgacgaagaacttgccaaatctatggccatatccttgtctaaaatgtatattgaacaaaatgcatgctcttgaaatggtcgccaatccg

SEQ ID NO: 655878 - DNA, 870 bp, Homo sapiens
gacagtggctcatgcctgtgatcccagaactttgggaggctgaggcaggtgttcaagagttcaagaccagagttcaaggcaggtgtcaggagttcaagaccagcctggccaacatggtgataccctgtctctactaaaaatacaaaaattagccaggcatggtggcaggtgccttaatcccagctactcaggagactgaaggaggagaaccgcttgaactgggaggcagaggttgcagtgagctgagaccacaccaagttgcactttcaagccctgtggttgaacaggaggcgaagactcaagtcatcaaaacaaaataaataaaaaaaaaacagggttgttaccggcccaatttcttaaagtgcccatcaaagacttctaaagcggcctacgttcaacacaaccacgtctctccgcggggcggcaccaaaaataggcccctcgggcacatttcggacacaccttctatctttcccacatcacaacatcccctaagggtccacaacacgcaacacccccgcgcactcagtccacggtcccatcccaccacttcgtgcacgcgccaacaacattcccgctcaatttggcgaacatcattgcactttgcgaaaccacttaaacgccttcggtccgcagaattgcgcttacagacgttaacccccaccgtactcgaccctctttattaagctgggcaacgggcgctccattaagccattgagccgaaacgtgctcatcacacggacattagccaaccgaactcaacacgcagattgcgtcaagagtataaacccggtgtcaactattcaacacgtccaacgcggactagcgcgcgaaaacccacacaaattagtgaagtccaacgtagaaaac

SEQ ID NO: 655879 - DNA, 86 bp, Homo sapiens
ggcacattgtgcggctgtgaagtggggggaggaacacatccctggcagcccttttcatgtcacagtgccttaaaacagttttctct

SEQ ID NO: 655880 - DNA, 243 bp, Homo sapiens
cagggctctgatgtaagacgagctcggactgcagtggaggctgttcctgaccactagggtcgtccagtcctttctccgctgatattggtagtaagagagtagagcttacctctctctgtggctgcataatataatagcagaatgaacccttatgaaggttcatcccttcatgcattcactcaacaaataccttgaggccaggcacctgggatataaagaacacacacaccaccaccacctcct

SEQ ID NO: 655881 - DNA, 497 bp, Homo sapiens
tgctgaagaatgtagggaagaaaaagcaatcagagcacaacattttattttattcattattatttagttagtttgttttaagacaggttcttgctttgttgcccaggctggagtgaagtggcatgagcatagcttactgcagcctgaactcctgggctcaagtaatccccctgcctcagcctcctgagttagctaggaccactggtgcaagccacaagacccagctaatttttgcttctcagcacagatgaggtcttactatgttgcccaggttggtctcgaagtcctggcctcatgaatgttttcaatgtcatctggaatggtgaatcctttccagaaggttttcagtttactttgcccatcacaggaatcaatggcagggatagccttacaaactgtatttcttaaataagagaacttgaaagtcaaactactacttgatccagtctgcagaacgatacgtgttagcgggcatgaaaacaacattcttcagcacg

SEQ ID NO: 655882 - DNA, 516 bp, Homo sapiens
  misc_feature (32)..(32): n is a, c, g, or t
  misc_feature (61)..(61): n is a, c, g, or t
  misc_feature (118)..(118): n is a, c, g, or t
  misc_feature (123)..(123): n is a, c, g, or t
  misc_feature (232)..(233): n is a, c, g, or t
  misc_feature (235)..(237): n is a, c, g, or t
  misc_feature (243)..(243): n is a, c, g, or t
  misc_feature (248)..(248): n is a, c, g, or t
  misc_feature (286)..(290): n is a, c, g, or t
  misc_feature (297)..(297): n is a, c, g, or t
  misc_feature (300)..(300): n is a, c, g, or t
  misc_feature (307)..(308): n is a, c, g, or t
  misc_feature (311)..(312): n is a, c, g, or t
  misc_feature (320)..(320): n is a, c, g, or t
  misc_feature (323)..(323): n is a, c, g, or t
  misc_feature (331)..(331): n is a, c, g, or t
  misc_feature (335)..(335): n is a, c, g, or t
  misc_feature (359)..(359): n is a, c, g, or t
  misc_feature (366)..(366): n is a, c, g, or t
  misc_feature (373)..(373): n is a, c, g, or t
  misc_feature (405)..(405): n is a, c, g, or t
  misc_feature (451)..(451): n is a, c, g, or t
  misc_feature (485)..(485): n is a, c, g, or t
ccccccatcgtcagccccgaatggggatggtngttttctctttctgagtgtgaacctggcncggcctgaagcctagagcgggcttgaagaacacacacagaccagaagacagcacggngagtnacaagtgccacggagaccagggtttctgacacaggatgtggaggatgcttctctgcaacctagtgcaaggtttcccctgccattccgagaattcacggatctcacaggnngnnntggggnggggngggggcgagggggggggggggggggggggggggggggnnnnncggcacnggnagggggnnggnncccccccncanggcctgangccncggcatcgggtctcagtcagtccntggcgangcccccncagacgcactcacagacttgcatacgtaattnagtaacatgcatcaactatcccagaacatctacagggcgcaaaggnaccaccactcagagaatcatggagccagtggagncagaagtggaagggacagaacaagacaatgc

SEQ ID NO: 655883 - DNA, 146 bp, Homo sapiens
gatatactcccgtcctgtgtcataccacccttcccccccatttcggtccacggctgaaacttttgcttggtagggtgtcaagctgccgatactgcgccctaacggctacttaaacgggggaaataatagcatcaaccaagaatcag

SEQ ID NO: 655884 - DNA, 123 bp, Homo sapiens
  misc_feature (102)..(102): n is a, c, g, or t
aactataggactcccagaggcacaaggaggcagagagttgggtaaggagcagagttgggccttctctgggcaggaggaagtcacccataccctgtcccatgncggtgggagaggggcagatga

SEQ ID NO: 655885 - DNA, 1020 bp, Homo sapiens
  misc_feature (445)..(445): n is a, c, g, or t
  misc_feature (1009)..(1009): n is a, c, g, or t
ggctggagtagactgcctgcagagtgaaagtagtcttcaccgcgagcgactgatgcaggagtgtctccacaagcattagtctctcctgtgggtccattggcgatagtccgagaggaaaaattcattgagaatgatggttgagtaagaacagagcagcacggcccgctagctacgtcatgattaccttgttacctggtgctgttctggcgacctccttgggacgtcgtcgcgctgggtgatcacccacatgtcgtgggaccaagtacgcgtggcatgagtgaaaggtgtgttgcgtcgttaggcgtgattcagtgcatccagtcagggtccacctaggggccaacattgatcttccatggggcactcctcgctacagtagatgagagacgccgtaggtctagctgtcctatgtcgccagctctatcataccttgtgtgctcggtgncgcagctcagcttcgcactccattgtgtcctagtcacgatcccgagagcgatcgctcgcggctaacgaggaacgcctgtctcagagtgtgtcgactacagtgaatgtccaggggcctagtcctacctggggccccaaactccaacgcaaaatgcgcaagcaccgaaataactctcagagaacttcggtcagatgacggcaggggttgcgtgactcatgttcagcaccagcagaacatagcgtagtcgtcgtatatcggggtgcatactagtcgaagcacgacttggcgcccatgagatagcctaggcactgggatctctgggagtcgcaatgcgtcgctctgccatcttgttggatcagacaacgacccggcagaatctgagctcccaaaccagctcgagttgaagccttgcatcaatcactcacctcaagatcatcgtgacaatcccccattcgatgaaagcggttcttacttggcaggagagccaccaagggacacttgagtgtcaattcgagagttacaagattggtagtcgcacatagggcgagatacaattccgaacancttcacgctgg

SEQ ID NO: 655886 - DNA, 565 bp, Homo sapiens
tgaatcgaactcgtggtgacctattggagtgctggttgatctatgaccttaccccaaccctgtgctctctgaaacatgtgctgtgtccactcagggttaaatggattaagggcagtgcaagatgtgctttgttaaacagatgcttgaaggcagcatgctccttaagagtcatcaccactccctaatctcaagtacccagggacacaaacactgcggaaggccgcagggtcctctgcctaggaaaaccagagacctttgttcacttgtttatctgctgaccttccctccactattgtcctgtgaccctgccaaatcaccctctgtgagaaacacccaagaatgatcaattaaaaaaaaaaatttaaaaataataataggccaggtgcagtggctcacacctgtaatcccagcactttgggaggttgaagtgagtggatcccctgagcccagagaggtcaaggttgtggtgagctgtgatcgcaccactgcacttcagcatgggagacagagtgagaccctgtttcagaaaaaataaataaataaaaccaacaagcactccaacagg

SEQ ID NO: 655887 - DNA, 128 bp, Homo sapiens
acaggatccttgaatcgtggtgctgcttcagcctctttccagtggacacaaactgtgccagccgctgcgtggatctcctctttcccgttggtgttgtcatcggacagcttcttgccagtgtccaggac

SEQ ID NO: 655888 - DNA, 867 bp, Homo sapiens
  misc_feature (2)..(2): n is a, c, g, or t
  misc_feature (69)..(69): n is a, c, g, or t
  misc_feature (82)..(82): n is a, c, g, or t
  misc_feature (85)..(85): n is a, c, g, or t
  misc_feature (89)..(89): n is a, c, g, or t
  misc_feature (93)..(93): n is a, c, g, or t
  misc_feature (95)..(95): n is a, c, g, or t
  misc_feature (129)..(129): n is a, c, g, or t
  misc_feature (152)..(152): n is a, c, g, or t
  misc_feature (170)..(170): n is a, c, g, or t
  misc_feature (174)..(174): n is a, c, g, or t
  misc_feature (220)..(220): n is a, c, g, or t
  misc_feature (229)..(229): n is a, c, g, or t
  misc_feature (232)..(232): n is a, c, g, or t
  misc_feature (236)..(236): n is a, c, g, or t
  misc_feature (248)..(248): n is a, c, g, or t
  misc_feature (250)..(250): n is a, c, g, or t
  misc_feature (264)..(266): n is a, c, g, or t
  misc_feature (271)..(271): n is a, c, g, or t
  misc_feature (279)..(279): n is a, c, g, or t
  misc_feature (281)..(281): n is a, c, g, or t
  misc_feature (291)..(292): n is a, c, g, or t
  misc_feature (294)..(295): n is a, c, g, or t
  misc_feature (326)..(326): n is a, c, g, or t
  misc_feature (346)..(346): n is a, c, g, or t
  misc_feature (362)..(362): n is a, c, g, or t
  misc_feature (386)..(394): n is a, c, g, or t
  misc_feature (406)..(406): n is a, c, g, or t
  misc_feature (408)..(408): n is a, c, g, or t
  misc_feature (411)..(411): n is a, c, g, or t
  misc_feature (420)..(420): n is a, c, g, or t
  misc_feature (441)..(441): n is a, c, g, or t
  misc_feature (448)..(449): n is a, c, g, or t
  misc_feature (452)..(452): n is a, c, g, or t
  misc_feature (459)..(459): n is a, c, g, or t
  misc_feature (467)..(467): n is a, c, g, or t
  misc_feature (491)..(491): n is a, c, g, or t
  misc_feature (599)..(599): n is a, c, g, or t
  misc_feature (653)..(653): n is a, c, g, or t
  misc_feature (827)..(827): n is a, c, g, or t
tntccaaacttaaagaactttgtatgaaatatagctacaaatatacataaagaattcagatcacaaaantctctaggaaatnggntggngggngngggccaagcttgtaatcccagcattttgggaggntgaggcaggcggatcacaaggtnaggagatcaagaccatcntggntaacagggtcaaaccccgtctctactaaaaatacaaaaaattagcnggatgtggnggngggngcctgtagtccntnttatttgggttttnnnttttngttttttntntttttttttnntnntagattttggagtgagccgagaccgcgccantgcactccagcctgggcaanagagcaagattctgtntcaaaaaaaaaaaaaacctctcannnnnnnnncgtagtcatcananaanaatggaacnaaagttaaaaaaaaaaaaaancaatctnnaanccccccnaactgtantttaaagtacagatcatttgtacnaactttctatagcaagttgtaataggcaactgtaagcaaacagtatcaatctgtataacttgtaaaaattcatctgaagttgtttggagctgtacgacaatggatgtnattcttccagttctcccagcagctctacaaaatcagtgatataccatttggcgntatccttgacttgttgcctgatcacatttcctccaaatccaatgaaagcatcagcaggaggacaggcttccatatctgtggcaccatctccaatcatgattattttcttaaaatgaaattcttcctttaaaagtttaatcacttttccttttccaccagattcagctgttggcngcgtctcatcaagacgtgcatattcacggttaaagtagaa

SEQ ID NO: 655889 - DNA, 354 bp, Homo sapiens
gtcataaaaacatgtccatatccattattagaacagaagtctgtgacaggatgagctgaggtgccaggtgagccagctgtcatcagggaaaaaagaacgcacatctaggaagcgctggtacagacagccgtagaacccgaagggcaagtaccatggacgtggagagggtcacagatagaagagcacaaacagtgagttcagttttaaacggcccactccctgtgatttttccaaagctgccccaccaaggaccagaatgcagctttcttagcttggggacgtttaccttcctgtgatggtgttaagatagatgggttggaggaaccaaagttttatggccttgaagtgaataga

SEQ ID NO: 655890 - DNA, 176 bp, Homo sapiens
ctgttcatcgttcaggttgtgcatctggacccggcgcacatcgacatgtctggctttgcagacggcgtgggtcagctgtgccggactgctaggtgtggttggttgatgccgattgtactatatgagtcctagttgacttgaagtggagaaggctacgcattttttatgcatgtcat

SEQ ID NO: 655891 - DNA, 209 bp, Homo sapiens
ttggtcgtctgctacaggatccccttcctgttgtcgctatcaggaactgtctataggacagaagtttgtcattgcaagaggagttctcgcgtgatgtgaaggctctggagaggttcctgcaggattactttgatggccatctgaagagatacctgaagtctgatcctatcccagagagcaatgatgggcctgtgaaggtcgtggtagca

SEQ ID NO: 655892 - DNA, 473 bp, Homo sapiens
tgcatctgatatgctatattcatgagtcaagttctcaaatattaatacttattagcttattaaatagttttcaccaagggggtgctctacttctcatcgtcccaagtgctaattaatgttatagccaaggatagaaattcgtattcccattgtctgacttcttcctgaaaagctgaattcttgtccaaagtccagagtctcaacctgagacaaggcaagtctctcccgggctgtgagcttacaaaataaaaaaacagttagttacttccaacatacagtgggggtacaggaatcgggtaaacactcccattccaaaagtgagaaattggccaaaagaaaggggctactggacccatgcaagtctgaaacccagcaggtagtcattaaatcttaaagctccaaaatactctcctttgactccatatctcacatccagggcacactggtgcaaggggtgggctcccaaggccttg

SEQ ID NO: 655893 - DNA, 320 bp, Homo sapiens
ttcctttctggaatgccttgaacttttattgtggcttccttaggcaaatagtctggcaatttaaaggaagaggctgtgttcacagttcatccaggcttggaaattgagctatttccatttttccgaggattattttgaggaggaagagtaccacattttgttttataaaaacagatgacaagtctctttaaaagaaacagaagtacagtacttttgaaatacaatgctgttagtttggatttctttttatatatatatataatattcatacaatgatctgatgtttgccttcattaataaagctgttagtttattcacca

SEQ ID NO: 655894 - DNA, 311 bp, Homo sapiens; identical to SEQ ID NO: 558540

SEQ ID NO: 655895 - DNA, 356 bp, Homo sapiens
ttataatatactaaaaaagtaatgcacttgattctgatgcacactcccccgtaggtaacaactttatctagtgtaaaaatgaaagaacattctgggccgggcacggtggctcatgcctgtaatcccagcactttgggaggcccaggcgggcggatcacaaggtcaggaaatcgagaccatcctggctaacatggtgaaaccccgtctctactaaaaatacaaaaaaaaaattagctgggcgtggtggccggcgcctgtagtcgcagctactcgggaggctgaggcaggagaatggcgtgaacccgggaggcggagctttcagtgagcggagatagcgccattgcactccagcctgg

SEQ ID NO: 655896 - DNA, 557 bp, Homo sapiens
  misc_feature (398)..(398): n is a, c, g, or t
  misc_feature (451)..(451): n is a, c, g, or t
  misc_feature (468)..(468): n is a, c, g, or t
  misc_feature (474)..(474): n is a, c, g, or t
  misc_feature (479)..(479): n is a, c, g, or t
  misc_feature (486)..(486): n is a, c, g, or t
  misc_feature (501)..(501): n is a, c, g, or t
  misc_feature (509)..(510): n is a, c, g, or t
cgactagtcccaaccatactaaccttctaagaaggttagtatggggagaggatggaaaatggaagagatagccggtaattggactgagcatggtggctcacgcctgtaatcccaacactttgggaggcggaggtaggaggatcacctggggtcgggagtttgagagcagcctgggcaacgaagtgagaccccatctctacaaaatatttgaaaaggctgggtgtgatggctcacacctgtaatcccagcactttgggaggctgagacgggtggatcacttgagtccaggagtttaagaccagcctgggcaacatggtgaaaccccgtctctaccagtaaaaaagaaaaaaaaaaattagccaggcatgggacatgtgtcttgtagtttcagctactcnggaggcttgaaatgggaggattttttgagcttgggaggcattgggtttgcagngagctaaaacattgccnttgcantcaancttgggngaaaaaaaggggaancctttttnnaaaaaaaactccaaaaatttttttgggctttgggggcccattgcccg

SEQ ID NO: 655897 - DNA, 264 bp, Homo sapiens
ggttaggctgcagtgcatagaactaagaattgacggtgcaaactactcctagatatcagaggatctatagaaatgcctggatgtccaggcaagagtttgctacaggggtggggctctcatggagaatctctgctaggcagtgtggagtggaaatgtgggatcagagccccccacacagagtccctactggggcactgtctagtggaactgtgagaagagggccaccgtcttccagactccagaatggtggatccaccaacagcg

SEQ ID NO: 655898 - DNA, 338 bp, Homo sapiens
  misc_feature (20)..(20): n is a, c, g, or t
  misc_feature (154)..(154): n is a, c, g, or t
  misc_feature (210)..(210): n is a, c, g, or t
  misc_feature (233)..(233): n is a, c, g, or t
  misc_feature (237)..(237): n is a, c, g, or t
  misc_feature (244)..(244): n is a, c, g, or t
  misc_feature (257)..(257): n is a, c, g, or t
  misc_feature (268)..(268): n is a, c, g, or t
  misc_feature (283)..(283): n is a, c, g, or t
gccatgatggaggcggccangtgtgcatggggcagatggagcctgatcaggtgtacgaggggatcaccttcgaggacttctgaagatctggcaggggatcgacattgagaccaagatgcacgtccgcttccttaacatggaaaccatggccctntgccactgacccaccgccacctccgcggagaaactgcactttgcaatgggtccgcntcccgcgtactggagcagccagnccgncggacanctcttctgcagcncggtacatagncaaggctcgtctgcncaccttgtgtcttgtagggtatggtatgtgggacttcgctgtttttatctccaat

SEQ ID NO: 655899 - DNA, 187 bp, Homo sapiens
  misc_feature (112)..(112): n is a, c, g, or t
ttgcattgtaccgggcaggggtatccaaggggttggctagggtatcattgtctgggtcgcctaggacggtctggtgacgaactacgtgttaactgtcacttaacggacgacncacggaacgagaacgtaacgccgacgggcgtacttcgacttgtagtagtacacgggtggaacggtgacttttact

SEQ ID NO: 655900 - DNA, 112 bp, Homo sapiens
  misc_feature (100)..(100): n is a, c, g, or t
gccacgtatcctgattttacagaaacgtgggcaggtcagcagtgccactggagagtccagagaagcccactcagaaggaagtgcctcagaccaccctgcngcaccgagagcc

SEQ ID NO: 655901 - DNA, 168 bp, Homo sapiens
cgtggagtgtttagttgtgttcaaatctagcatacgggttttcttctttaaacaggccatattttttgtcgtgatttcatcgatgtcttgtcttcatcatctgctctccgttcctcctcgccgtatcgcgcctctccgtcccgctcacgcagtggccttctccgtcac

SEQ ID NO: 655902 - DNA, 245 bp, Homo sapiens
cttcggggtacggtgtcagcttgtcctcgtcctccatctcttctgaagacatactggctgtgctgcagcggggatgacgtgcgtcagtaccttacgtcagtactttgatgggccctcggggtccgccaaggccacccaggagccagtggacattgggtccctccttgtcttatggacttatgccagacgctgaagtagtccgcattccttcagcttacattgtacgagttctggggatacagcat

SEQ ID NO: 655903 - DNA, 421 bp, Homo sapiens
cgcctgtgtgtgtgggtgcacatttgtgtgtgtgtgcggcctgtgtgtgtgggtgcctgtgtgtgtgtggggcacatttgtgtgtgtgtgtgtgcctgtgtgtgggtgcacattggtgtgtgtgcctgtgtgtgtgtgcctgtgtgtgggggtgcacattgtgtgtgtgtgtgtgcctgagtgtgggggtgactagtgtgtgtgtgtagcgtgagtgtgtgggagcaagtgtgagtgtgatgtgtagacgagaaagtatgggtagcaaataatgtgtgatgagagagagtgttggagagaagagatagttagtgtgatgtagagtgaatagagataatgagtgatagacagaagagatatatgcagcgtgagtaagatagatgtgaaatgagtgtatagagatgcagtagtgtgagtgatg

SEQ ID NO: 655904 - DNA, 247 bp, Homo sapiens
actctgaggatcctttatatgctgtctcaaaaaaacaaaacaagacaaaccaaaaacgtggtaagaggctaggcatagtgtctcacgtctataatccccagcactttggcgaggctaggagaccaggcagatcaccttgaactccagttccaggtcccagcctggggtgaccaggagcgcagaatccttgtctaacaaaaacaaaagaagaacagaagtagggggaaagaacaggggaagttggggc

SEQ ID NO: 655905 - DNA, 381 bp, Homo sapiens
ctcatgacttacctcaggtcttatctctagaactggctttgtactatatccagcaaaactgtaacagaacaggttaagaaagcacatagcaactgctttttcaacagtaaattttgactattcccctaaatatctaccttagtggcttaacactgttactattgtctttggctttataaagaaagtcttaaaattttgacttttaatgactgcactattctaccaaagcccgtgtttacctgggtattccttgtcacctgtattttacatttccctgctactgttctggtaaacagaattctacagtattccattctgtatattgtcttttacggtttttcaatcatactcactactactgcttgaagttatccgtgaggg

SEQ ID NO: 655906 - DNA, 221 bp, Homo sapiens
  misc_feature (3)..(3): n is a, c, g, or t
agnatagtaaagaactacaaactggtaataaaagtcagcccctttgcctgcaaaaaaaaaaaaaaaggggccaagggtttggaagagacatttctcagaagttaaaatccttaaggggccattcaatatttaaaaatgtgctcacctttatcagtcttcaaaaaattacaccttaaaacgtgtttatcagaaaattacccactaaaggggctaagggttaa

SEQ ID NO: 655907 - DNA, 173 bp, Homo sapiens
ccgggacccggacgtgacatgactgcggtcatttacctaccgatggagaagaccacgggaacgacgcccgtggtggggcggctgcgacgtgacggcatttgacgctggggccatgttactgttcacgacggttacttacactgggctgtgggtggccagacctcctgccctcc

SEQ ID NO: 655908 - DNA, 424 bp, Homo sapiens
  misc_feature (12)..(12): n is a, c, g, or t
  misc_feature (65)..(65): n is a, c, g, or t
  misc_feature (129)..(129): n is a, c, g, or t
  misc_feature (398)..(398): n is a, c, g, or t
aggctggggtanagtggcatgatcttgactcaactggaaccgcttcatcctccccaggttcaagnaattctcctgcctcagcctcccaagtagctggaattacaggtgaccttcaccacacctggctanttttttgtatttttagtagagacagggtttcgccattttggccaggctggtctcgaactcctgacctaaggtgatccacccaccttggcctctcaacgtgctgggattacaggcatgagccaccgcgcccggccagcactgtgttttatatttatttactcatacacttcacactacaatttttttttttgagacagaatctcattctgtcgtcccgttcggagtgcagtggcatgatcttggctccctgcaacctccgcctcctcccnccaagtgattctccctgcctcagcct

SEQ ID NO: 655909 - DNA, 497 bp, Homo sapiens
  misc_feature (164)..(164): n is a, c, g, or t
  misc_feature (214)..(214): n is a, c, g, or t
  misc_feature (459)..(459): n is a, c, g, or t
ggcgcctgcatggatcggaagccggttggggtgtgagaggttttctcgctctagggagattcttcaagcaatcactatgtcaacagacacaggtgtttcccttccttcactatgaggaacgatcacgggatcaaaagctcattcgaaaagctaaagaggcaccnattcgtaccccgtgtggaataagcgggttttggcagcaattggttgcatnatggcattactataaactggaagagcaggggcaaataccttaaaaatgggtccaatttcaatctgatccacattgcgttgtgggcaaagcccaaagggcctttggtgtggtcaggaaggcaaatggaactggtttgggctactggggctaatttcccattggttacttcgggggggacattttccgtgggggggccaaaaatatcccctttaaaaggggccctttataacgcaacacccgaaacngcaacggaatttggccttggggttccattgtaggggct

SEQ ID NO: 655910 - DNA, 106 bp, Homo sapiens
ctccctccgtaacacccaaacttattgcttacaaagagtctctacaacccagactctgcagtaccaaggctgcagttctttatgtgctggggggcgctgttacgga

SEQ ID NO: 655911 - DNA, 131 bp, Homo sapiens
ggtcggtaccggccgatggcgggtcgatctggtcaccaaaagagacgatgaggcagggtcgccctggggctggatgcgccaggcggtttcggccggagaagatatgtctgatatagcgttcaacggcacga

SEQ ID NO: 655912 - DNA, 344 bp, Homo sapiens
gtcgacgttgacatcggagcttgtcattcccagaggcccattaaaaagggaagtggagccaggcatggtggctcgtgcctgtaatcacagcactttgggaggctgacacgtgtggatcgcctgaggtcaggagtttgagaccagcttgtccaacatggtgaagccccgtctctgctaaaaatgcaaaagattagccagctgtggtggtgggtgcctgtggtcccagctgctcgggaggctgaggcaggagaatcgcttggacttgggaggtggaggttgcagtgagtcgggatcgcaccactgcactccagcctgggcaacaagagtgaaactccgtgtcgacg

SEQ ID NO: 655913 - DNA, 486 bp, Homo sapiens
  misc_feature (474)..(474): n is a, c, g, or t
taagggtcccattttataccagatcctggatcccaaaaagagggaatcagctcatccccatgggagtgttatctctcagtgggggatggggacatctccatacttcctaggtggctaagagcatgcttctctgatccaaacctgcagagcagagctgagtatttccccataactgccattagctgtcctcaaaagtatatttcctatatagttattacacaccaaagttctctcataatgcaaattaatttctgtcacccccccaaaagtaaaaaatatcagataatggaatgcaaaatggaacagagccttagattttgagaggaatcttatctactttttagtcctgaagtttcatgagtaaaacagaggtttattccaaaacgggatctgtggcacttcctcttttttcctaaggagtcccaggctgttagaactggaatatctgcttttaattaagctgacttttaaccncagtgctcttta

SEQ ID NO: 655914 - DNA, 817 bp, Homo sapiens
  misc_feature (205)..(205): n is a, c, g, or t
caccgggccggggtgccagcgcctgcttcccgtttcctcccgttccgcagcgcgcccacggcctgtgaccccgtgtgaccgctccccagtgacgagagagcggggccgggcgctgctccgtgcctgacctgcgaagggacctcgtgtccagtcccctgttgcgcctgctgcccccgtccgtcctgtgcgctgtggccagtcatgngtgccatgtgtctctgatgctggtcgatggtctgcatgacctagatgtgctgccccacatggcctgtgccctgtgtggctgcttgggagctgcctggcctgctgtgtgccggtgtggggatgcctctgcacgttgaagtggcctgtttcccctgctggtgcctgccgctcacctgtgaccctgtgccagcagcgtcgtcatgggcttggtgggcacctacagctgcttcttggaccaatgtacatgaaccacctgaccgtgcaacaacagggaggtgctgtacgagctcatcgagaagcgaggcccggcacgcccctcgatcaccgtgtccaatcaccagtcctgcactggacgaccctcatctcatgggggatcctgaaactccgccaaatctggaacctgaagttgatgcgttggtgaggaggaatgggcccctcgaagtgggccgggcggcccaactgcctctgcccagatttgccctcctactgctctgcccaggaggtgctgtcagcagtccaggaccctgagtgagacatctgttcacaaggagtacatccacttttcagttggcagttttctttccggaatggttacgaaggtggtctttggaac

SEQ ID NO: 655915 - DNA, 276 bp, Homo sapiens
cagaagagagagctagtctcctccttgtcccagatgatgtgtcacctgttactgacgaaactggtcatatcattcatcaggggtcccctcttgtgtgttctcattcttcccgatacctcaggagtatcctttctaccacccccagcacagggcccgcctcagcctaagcccaggggtaactgagcctcaccaccaagacgtgtctgaggctctgcaagtgggatgaagcactgagccaacaggcgagatggacacacacaagccacagtccttctg

SEQ ID NO: 655916 - DNA, 146 bp, Homo sapiens
ttgactgcctgggagagacacatccatagctgccggcgtttttactatactatggggaccaggcttcgaggacagagtgggagggtaagagtctttctggcaataaatcaaagttcaattttatcgtttatcatacgtaactacaa

SEQ ID NO: 655917 - DNA, 550 bp, Homo sapiens
gagaaatgaacgctgtcgagtgtgcggtatgcacaacctggactctatcatcacctttgctgaagcaagtaagaatgatgatcctgcttactgccgtcacgtgtggattatatgcatatagaagaataacagacaaacgccgggcagaaccttactactggccaagcgatcgctgatgattacgataaaacgaaactagggacggcgagcaaaaaaaaatacgccatgtgaggaactgagattgagcatgcggcatatggagaagtaaaccagctacctagagacccaagaacatatgtccagtacatgaatagattggactgcttaaagacgaacacttcagagttcatgccattcaagagaccacgtggtcattgagctctagtgacgatttccttgaacgagtcaaacttccattaagtgccttgtgacaggtgttacctgacaggtctcataatgtgaccactggtgagcctctattaactgggactagtgtactacgatctgccacatactgctaagtgcctaggaaggcgcatgcctgaacccc

SEQ ID NO: 655918 - DNA, 131 bp, Homo sapiens
ctctttagctgcatgtactttttgcatgcgctaccttcactgcatagcgcatgcactcattgctggacctgagacacagaaaggctttcttggtggcttcggatactatccctcgaggtccaatcttccgg

SEQ ID NO: 655919 - DNA, 399 bp, Homo sapiens
  misc_feature (88)..(88): n is a, c, g, or t
  misc_feature (91)..(91): n is a, c, g, or t
  misc_feature (95)..(95): n is a, c, g, or t
  misc_feature (156)..(156): n is a, c, g, or t
  misc_feature (389)..(389): n is a, c, g, or t
tcgtctcaggcggaggtccccatccccctgaggatgactttccccaaacaagagcggggtcgagagccgcccagtgccgccccccacnccncccnccggcgtagggtgtctgggacccaggaaccacccgcggctgggagacctggggcggcctgnccagagaccgcggggcctggggctgggggaggggagcggtaagtgggggcgggaggaggtccctttgcagagggaaaccaatgtcatccgtctccaacttctgaggagagacccggagcagccagcagattaaaaaccccatcccggccctcaccgaggtgttacaactctgtcccagttgcctggcaaccgcgcaggtgtgtgatagggcgagcggcgctcccgggagccanccagcggccg

SEQ ID NO: 655920 - DNA, 1045 bp, Homo sapiens
  misc_feature (365)..(365): n is a, c, g, or t
  misc_feature (434)..(434): n is a, c, g, or t
  misc_feature (622)..(622): n is a, c, g, or t
  misc_feature (686)..(686): n is a, c, g, or t
  misc_feature (753)..(753): n is a, c, g, or t
  misc_feature (1020)..(1020): n is a, c, g, or t
  misc_feature (1022)..(1022): n is a, c, g, or t
aggatcccggaaaatagccgacgaggtataattaggaatagtgtagtaggatagtatggtaatatatagtttttttcgggtgtggtttcttttgataggtgagatggctagctattagtataagggggaggagtcatgtggttagaactagtaggggtgctgatagtgagtcggagaagaatgttaaggaaaaattaaggctgttttcgcctagttggtttagtagggatagactgatcaggctaatgaggagactatgtactgttgcattgattcagattatgttgtgtttagatattcatgttatgggtagtagtattgttgttgggataataatttttagcattgtaagaggtttaagtttnggacgtaatcggtaccgtatgtgttggataccattactagtactgataggcccagtgcagcttcgcagnctgcaaacactagtaaaataatgggtattatgttagctagggtgaagtgtgtgtttaggacaattagagtcgatatgatgaatagtgataatatcattccttctaggcatagtagtgaagatattaagtgagatcgatatataagtaaccctgcaagggcaatcgtgaatgctataatgatgtttatntatactaatggcacttgataattatgaagtaaatcatagtctaatgagtcgaaatcatttgttntgttttaaactaattatcatattctgctcattctaggcctttttgggttcattcgtatgctaggctngctgctagtaggataagaaggaatagtgctattgtaagtattgtttttagattgtttgtttgggatgctcatggtaggggaaggagaagggcgatttctagatcaaaaaggagaaatgtaatggctactaggaaaaattttattgagaatgggaggcgtgctgatcctatggggtcaaatccacattcatatgggcttgttttttctgaatatgcgtttagttggggtagtcagaatgcgattagtacgagtagggagtctaggttncntttgtgagacggtaacaccacag

SEQ ID NO: 655921 - DNA, 372 bp, Homo sapiens
  misc_feature (29)..(29): n is a, c, g, or t
aaaaaagggggagccctttaccaactggnccccctaagtgtggggctgtcccccctgggggttccccaaatgcaaggggggggggcctcccagcccttttagatccgggtggtccgggaatcccttgcccgggttttccccgttttttccccgcctccgaaagaaaacccccgggaatttttccagggccagaaggcacagcccccgggccttcggccttaaaaaacccgtgccctgggcccccggctcccccagcccgggggggacctttaggcccaaaagcccccccgggagggggggctggtcccccttcgggaggtcccgggccaggccttgggggggccttgtccattaagccccccggggtgggga

SEQ ID NO: 655922 - DNA, 293 bp, Homo sapiens
  misc_feature (231)..(231): n is a, c, g, or t
tttgaagacagggtctggctctgttgcccaggcaggagtacagtggcattatctcagctcactgcaaccactgcctcccaggctcaagtgatctgccctcctcagcctcctaagtagctgagaccacagggacacaccattacacctgggctaattgttgtattttagtaggagatggggatctttctatgttgcctaggctggccttcaagtgatcctcctggccttggngcttcccaaagtgctgttgattacagggtgttgaacccaccatggccccaggccaggaggat

SEQ ID NO: 655923 - DNA, 587 bp, Homo sapiens
  misc_feature (12)..(12): n is a, c, g, or t
  misc_feature (44)..(44): n is a, c, g, or t
ttagaaatattntgtggcaatgaagaaaacactacggaaaatanaaaataagataaagccttatgagctcgtattgaaatttgttgaacttatattgaaatttgttgctctaattcacagtatactcacaaaaaaatttactcagcttaactatatttcacacattgtacataaacacaagatcattaagaagtccactgacagtatcagtactgttttgcacatactcagaataatttggcttcattttgaacaggactgtattgttttaactgctgctaaagaaactattacatagttaaattgtacagaaagtctctcttccttttgatattttaagatgagtagtattgcttggcttttataatgcatgcagctttattctcatatttttcctaaaatttatggccaagtgtttactgttttagagcttaagtcatttctcagtggaaattatggggaattagaaatacagcaactcttaccttcttcctactgtaaaattgaactattttgtaacatctttggtttcatgagccaattctatttcttctagatatttaaaaatatacatctagttgacttta

SEQ ID NO: 655924 - DNA, 533 bp, Homo sapiens
tgggagacgggggctcagtatctggctcttggggctgacaaggggagcaggttatggtgggtctgaaccccaggatttcctctgtcccaggttgtgactggcagctgccatctcttccttctcgctgacatctccatttcattcacagggtcccaccggcccggtgggtcctccgggcttcccgggtgcggtgggtgctaagggtgagaccccccactctcctctaagcatgaccctcagtgggccagggggttcatgtctcccgtgtaccccaaagcaaagggacccagagtggcaagagagcagcccgttcactaacaccttggtcggggggtctccgtctctgatcttagagtcctgatcatggctctccggtccttgtctccctttcctcgtgccatcccgagaggcagggtggggtacccaggggggcttctgatatgtcctttcttctgatgcagggtgaagcttggtccccaagggccccgaggctctgaaggtccccagtgtgtgcgtggtgagccttggccccc

SEQ ID NO: 655925 - DNA, 337 bp, Homo sapiens
  misc_feature (20)..(20): n is a, c, g, or t
  misc_feature (73)..(73): n is a, c, g, or t
  misc_feature (120)..(120): n is a, c, g, or t
gcgcagttaaggggcgagtntaagggggagatcgaggctcgctacagcactggattagctggaaacctcctgngagactacattacaccactgagggaatccctgtgctgatcgtggggncatcatattcctgttatggggacaatcattccacctgtgagaaacctttttgcagtcctttgtcaaacacactccttggggattcaggactgttgatgagctttggtcgccgagactgtgcacccgggtaccctgggtgaacaggcacttcaatacaaagaacaaggatccctctttccaaaaacccgcgccccaaggccccatttatcacccaggc

SEQ ID NO: 655926 - DNA, 927 bp, Homo sapiens
ggtccccttgccagccaggggatgtgcagcaaatgagaacagaaatcatccaagatgtgaccttatcatgacttgtatgtggctaatgcgcggctccaggggggacaggatatcctgtacatgatgggccaactaatgaaaggtcaaagaatacagacatcacagacatagacttgcgagggggagattacacaaaaggtggtgaagcgaagtacatcgagccaggccgatatgacttggagcattggatcccggtatgtggcatggtattgtgtgattgacggtccaccagtgactcgtgacctattggcagtgtcttacaatctaaccatagcgagcggcagccaccttggaaagtgtcttactaatgcaagcatacaccctatgcatgtgccggattccttttagcgatacgctatacgcgaatgggcgtaaacatagtttgtctatttcagatgaagtgcccaccttgaagtggacgatgccatggatcacgactttcaacggggtcatgtccccctgcttttggaccctttatctatgggggaacgcgcaagatggacttgaagtgaacattcccgcgggaacccccacttgcatggttagttaactattcccgaaacacaacgtggataaacgtggcaaaccaagccaggaacttcgaatcttaagagcagcaaggtccccaggtctggcccacaacagagcgcgggcaaacagtggaaaagttccgaaaacacatgtctaagggtgggatgtgggaccggtggcgcagctttgcaaagcacaaagcgccgttggagcgcggaggaaacggaaactagtggtggcacaggccccaaatggaaacgccaaacgaggcgtttgaaaggtgagttagcctccaaggggtgtccaagcgcagtatggccggttggaacgcgtcac

SEQ ID NO: 655927 - DNA, 1091 bp, Homo sapiens
  misc_feature (173)..(173): n is a, c, g, or t
  misc_feature (456)..(456): n is a, c, g, or t
tccctggtgtgattccggtcctgggcgggttggtctctggaagcaagcgtgtcttttatcttccggcccggcttctcttccttaacttaagttgcgcgttggccggcaaccgagtggaagatatccgagttggacattggacattgaagcccccttggaaggccccagaactnatcttttccggtgtggtgtgaactcaaagggcgagccaagattatctcacatttaaggtggcgttcatgggtgcaacatgtagcgacccaggttatctctttaagcaacgggccaggtttaagggcgtggtgcgcaacaggcatgtaggttgcgaccattggttgcaagccagagagcggcatggcattacggaaggcgcagtcccaattaaagtttaaccacattggcgcaacattttgcgcacacattgtgcattgtgtaccagcgccaacaggtgttccnctttgggggcgtttagggaattaaccacaccaccagtgggtgctttacaggtgtcgcacagtgtgtggttccaggggcccagttgcgcattattaggttggacacagcgaacatttagattatagctggtggaagggacgatgtgccgaggtgccgaacgactgaacgaccagagagcgagcgagctgtgtgaagcttctctaacggtacgtattctggggaaagggcgcgtctgggccctgtgatgggtgtgttttgccacagggtttccccagaacaacaaaggtataaaaactttggctcgggctgtgattgaaagactgtagttgacgaatgtatggatggcaacgcagggggttggattgactttggacgaatttagatgtaatggatgtatgcatttttggggatggagatgtagggggaaagggcgtgaaggtacacaaaggtggcccagattgtgaaagaaaaattgttattttgggggatatattccagggccaataatggtgcaccaataggtttgaagtggtccggaatggggaaaagggacttcagaaaacaattaattaagacgcaaggatttacaaggggaaaagaaattcctttcaagaaagagggaaacaaattcttta

SEQ ID NO: 655928 - DNA, 347 bp, Homo sapiens
aaaatttaactggggggttaaagactttgcccctttttttcaagaaatttgcctaaggtggttgccttttttacccccaaaaaaacttttagttttttaagctttttcctgaattttgggaagggaagggatttttatgtcaaaggcccaacctttatgatttcaaggaaaaattttaatccctggggaaaaagaaactgaacccttattaaaaacaaaaattccggatggaaaaccccaaaatgggatttattaatgtgggaaacccccaaaccgtttgttttccttttgggaaaaaaagtgtgttctataatgaattaatataggagtggtttttaaaaaaaaaa

SEQ ID NO: 655929 - DNA, 458 bp, Homo sapiens
  misc_feature (71)..(71): n is a, c, g, or t
  misc_feature (125)..(125): n is a, c, g, or t
  misc_feature (202)..(202): n is a, c, g, or t
cccccccccctccccaagaagggggtgtgtccccccaaaaaaaagatggggggggcggggggaggggcgcncggcgaccccccaaaaaaggcccctatccttcgcgcccggggggcgccccccgnctgtgtctgctgctggcccgcgtgctgtggctgtccagtgagtagtaagtcctgctgtcggccgccgggcacagtgncggcgagtccgagcgcagcgcgtcgtgcgccccacgcaggcccaggaaaggtgtgctctcggccgccagcgccccgtccgcgtcgtccgcgtcgtcgtccgacgccgaggctgagccgccgcccgagccgctgctcagcgacagcgagtccctcgccgcccgtgcgcgctgcgccgccagcccgttgaggcgcgagcggcgccagcgccggggccccgccgacgtcctgcgggacgcaccgcgcgcgcgcggccgc

SEQ ID NO: 655930 - DNA, 273 bp, Homo sapiens
cgtatcgcccaacacacacaatacacacacactatacacacacacaacacattctctacatacacactacacacactacacactacgaggcacaatacacacactacacacacactacacacacgccatacacacacaataggcttggctcacctcccatctgactcgctctgtgtattcattcattcactcgtgtattcagccattcaatcattcaacatattgggcgtccaatgtgaacaagcattgctctaagtgttggggataacatca

SEQ ID NO: 655931 - DNA, 678 bp, Homo sapiens
tgaaaccaaatacacagattttatttatgcacaaatacacttcccagccaaataacagaagtgatttaaaaccccacaactcccgggggcagctagtgcccgtgtacttcggacagtgaaggtggaaagtggtgtcaaggggctgggctcacaggattaaggcacaagaagctccccaacaaggatgctagtgtagcgaaggaaacgcgaggaagagatgggcttaaaagatggaagagaatgggtagagagcactttgagggaaaagcaggaggcagcctcagggaaaggggagcgtggccctcaaactcagtgtgtgcaggggtgaccatgccagagtgctccccaggccctccagtgtggttccagacgtgggccgtgcctccagaaggaagaagtttgcaccggaaggagggggtcatgtgggagtgcaccccggggcctggcacactttgtatgaagcggcggcccatgtttgggtcctggcttctccacagtacgcttcacacaatgggcccccgtgtgtgcccccacagatggggtgtgctgcataggtgccccgccagaacgagacttccagatgtgcggtccgaaactccttactcatcttgggcttctgaagtcttggcctgccccttaaccatctttgggcccatgcctcttcttcaggagtctccg

SEQ ID NO: 655932 - DNA, 294 bp, Homo sapiens
cgaaaaagaggatggttatgggctgagagtggtggctcttgcctgtaatagcaagtgcaggagggtgaggcaggtggatcccttgagcgcaggagttcaagggcagctaagccaacatggtgaaaccgcgtctctgctaaagatacaaaaattagcctagtgtggtggctcatgcctgtaatcgcagctgcttgggaggctgaggcaggagaatcatttgaacccgggaggcagaggttgcagggagctgaggttatgtcactgcgctgcagcctaggtgacagagcaagactc

SEQ ID NO: 655933 - DNA, 1256 bp, Homo sapiens
  misc_feature (465)..(465): n is a, c, g, or t
  misc_feature (468)..(468): n is a, c, g, or t
  misc_feature (485)..(486): n is a, c, g, or t
  misc_feature (492)..(492): n is a, c, g, or t
  misc_feature (501)..(502): n is a, c, g, or t
  misc_feature (513)..(513): n is a, c, g, or t
  misc_feature (522)..(523): n is a, c, g, or t
  misc_feature (558)..(559): n is a, c, g, or t
  misc_feature (561)..(561): n is a, c, g, or t
  misc_feature (563)..(563): n is a, c, g, or t
  misc_feature (565)..(565): n is a, c, g, or t
  misc_feature (577)..(577): n is a, c, g, or t
  misc_feature (584)..(584): n is a, c, g, or t
  misc_feature (593)..(594): n is a, c, g, or t
  misc_feature (603)..(603): n is a, c, g, or t
  misc_feature (613)..(613): n is a, c, g, or t
  misc_feature (623)..(623): n is a, c, g, or t
  misc_feature (629)..(629): n is a, c, g, or t
  misc_feature (632)..(632): n is a, c, g, or t
  misc_feature (638)..(638): n is a, c, g, or t
  misc_feature (652)..(652): n is a, c, g, or t
  misc_feature (750)..(750): n is a, c, g, or t
agtcgggccactcggcgtttgctcaagtagagtggttctctcttttgctaactccactgctgtcttttttgtatactatgtctctattctctgtggtgttttccctcgtgtgatgtgtggactccttgttgctttgcgactcttcacctattgtgaccagtagtcgcgcttgtccgttctttcagggttttccaaatggggtttggtcattctccctttgcgcagatgagatgccggggttcacaaaacgcccgaatggggtggcacaccttgggcgtcaccctgtcaacccgttcctacggagtaaatctgttgaaggcccctgagacttttggagtgaagctctttctctgggggcaaaaatgggcctccaactgtcaaggaaatgtgtctttccaagggatgtttctttcgtggcaacctttgtctgggtgacagcccacaaatgtgaccgcccccatgggnagncagctgggcttcactgnntcaggngattatccnnggaccatccanggcccaatnnagcccccggcttatgccccctgtattggattgccnncncngngtccacattgcnatgccangtttgctgnngctgaaggnaaagattgantcgcccgttnttggtnaanaagctnggaagatggccctnaaatttctctgaaagttctggtggatagctcgccacattgttgaatatatggttcctcggcaaagcccacatgtgtgttgaagagctttctccacganctatatccaccccttgggtcgcctttgctgttttgctgaatatatgagaccacgaccacgtttcgcgtgtgggtgttcacatcacaaagcacgctggaacacaagaaaggctgctggagagctggcaaaggtcacccacaagtctgcccacgaaaggctcacgaaaggctataatgagatattattccctaaatacctgccacccccaccttcttaaatcacgtgggtggagagaaccggttctcacgagaactcgtttggtttcacaattggccacatttaagtttagtagtaaaagagctgggttaatgagtaacacaatgcactcgtaaaaccttcacgaaggaaaaggagaaatgttttgtggagccacctttggttttcttttttgcgtgtggcacgttttaagttaattagtttttaaaatcagtactttttaatgggaaccacttgacccaaaatttgtcacagaattttgagacccccttaaaaaagttaaatgagga

SEQ ID NO: 655934 - DNA, 116 bp, Homo sapiens
  misc_feature (8)..(8): n is a, c, g, or t
  misc_feature (116)..(116): n is a, c, g, or t
cggctggnacacggctaccacaccctggaagaccaggccctttataacaggctgcggcaggaaaacatgcacttcgagatctgcccctggtccagctacctcactggtgcctggan

SEQ ID NO: 655935 - DNA, 194 bp, Homo sapiens
  misc_feature (54)..(54): n is a, c, g, or t
  misc_feature (65)..(65): n is a, c, g, or t
  misc_feature (79)..(79): n is a, c, g, or t
tgagtggtatcggtcgtgcggctgtggtttgttccgccgaggagagttgaattncagaatgcagntctggaatggtgtnggaaccatgggtgagatggggcctcggtgctgagccccctagctggctctggggggatgctggagctgcgcccggaaggcattttcctgccaagtccagcttctccacgaaggag

SEQ ID NO: 655936 - DNA, 552 bp, Homo sapiens
  misc_feature (496)..(496): n is a, c, g, or t
taaaaatacacccaccatattaataccaaatccctctaatcaccggcttactaggtgtttccaataacaatttttcccggtataaaattacggggaaaattggataattaccgggtaagagaaagatattcctaggcaataactaggatcattgggaaaaggtgagtacggtggatattaaaaatatcacagtaccaagatcaggctggtccctacagtatggcgggccagacacttaggtgaaagcagaagggtgggggtgacttccctacttaaaatttgggtcatatcatttcaaaacattggcttctgggtgggcggcatatgctttcctatggatcccaaaccaattcttagattcacttcatttaaattacggagcggtatggattacttcgaagcagaacaggcatggtgcagccctcatttatgagaaacccctcaggaaactcccagggggatggctgggagaagcggtgagtggagcggaggcggnagaacttcctccagagcaaggggcttaagaaagaaagaagactctaagcggggtcg

SEQ ID NO: 655937 - DNA, 1384 bp, Homo sapiens
ttcttgttttgtcaaataagaagtacattgcttccattgttcgttgtgtgcgtgtcgtgtgtgttgctgtgtctttctggttggggctgtagttgtttggttcagctagggtgcaggttgttttgtctagtggggttctctgtgacttgttcggtgttggtatgtggttatgcctgttagttcgcgttgtgtatgatttgatggtcctgtcttattttgtggctctcgcttggatggcgctgtttgcgagttgttccgggtgtagttttctctctctctctgcccttcttctcgtttcgttgtggcccgtttctggtcatggcgttgtggtatgtgtgttcacgcttcttctcgggtgttgtatgttgctggccgttgttttttactggttgtcggattggtggttcggtgtttgttgcactgtgtgccgcgtgtcgccggttcctttgtttgtttccacggttgtttctggccattgtgtttttgtgcgtgtgttctcgtcagttgtgctgttggattgttattgtcatgtgatttcttttagttattggtatctctgattcggctgttgtgagctattgacgtgtagaagtgaggtcaatgattccctgcacttatccttgaatattacttacatggaatgtatctcagtccactgctggcctgctaatatcagttggagtttatcgtcacgtgatctgcaagggtgcactcgttaagggttttccgctgccatgccttggtggggcttgctaccgtttaaggtctgcagtatactctagcttgtatcgatcctcgtcacctcgtcattcttctgtagggtctcacgtatctagggtccctgcggactggagccaatcctgggtattctactactaggcctgacttgatagctaagtgagttagtgtttccaagttgtcccactgctcattcaaagtcagtccctatgagtgtatttgttgctcagtcctaaccctggggccagagagttggtcgcgaggcttgagaattccttccgtgcctcatccttgtgtgttgctttctgccaaagtgagttgttttagacgtagccagaaaatgccgtggcaaagagctcagaaatccaatgttggagtaccagaaggtttctcatgttaatttctcagcccccagagaagcatcttactcctgaaccttagacaggaagtattgtttcagtcacagaaagcttttctgggtacctctggttagcactttctactgctctgatatttcctatgtacatagcttttattgttgtagaatcctttcgttaactggttcaaataggacttgttagcaactatgggtttgcagttttctgagtaggtgagtttttcgaatatcggctaaaggtcagaataa

SEQ ID NO: 655938 - DNA, 192 bp, Homo sapiens
catgtgccgagggagcggtctcaaagagcacctgccccaggtggagatgcccagtttgacgatcccaaagtggacctcaagggcccccaggtggacatcacgggccccaatgctggacctacaaagtctccaaggacggaagtcacagcccactgatgtggaaggtgtctggaggatcctctagtactcgac

SEQ ID NO: 655939 - DNA, 796 bp, Homo sapiens
ctcccatatagtagcttatctactccggaatagaaaagaaccatttggatacataggtatggtctgagctatgatatcaatgggatgcctagggttgatcgtgtgagcacaccatatatttagcagtaggaatagacgtacgacacacgagtcatatttcagcgctccggccaccataattcatcgccttatccgcacctaccggacgtcaaagtatttaggcatgagcatcgccatcactccattggtagagctaccatatgaaagtgatctgcatgcaagttgctcctgagccctaggagttcatctgttcttgttgctccgctatgctggtctgactggcattgtgttatcgaaattcatcgctagacgtcgttctacactgacactgtactaagttgtaacacatcattccacatatgtccgtatcaataggggctgttaattatgctcatcattaggaaggctacattcacgtgtatttcttcacctattctgcatggctagcgagcccatagtacaacagaaccgttacggccacatagatcgcatttcgcatagtcatattcatcggggtatagtcttagctttctaccccacagaataatttctcgggcctatccggtaatgtcgccgattgttcctcgggcacgatcccgatcgcgtagaccgacatgaaatatcctatcatctgtcaggctcattcaggtcctctacagtcgtaatattagtaatctgcaggattttgagaagcttggtactgaagcgagaagtctgatatgagaggaaccctcca

SEQ ID NO: 655940 - DNA, 330 bp, Homo sapiens
tgggcctggtctgggtctgggtctggggaggactggggaggtgcgggtgacggcaccgcaggtaaggctcctgcaaggtggcagccttggggcccgaccctgggtaggagggcaggccagtgatgacaagggaggccccagccagccgaagttgcaggcaggggcagtgcagggtcccagcaggtgaaggccccgggagtggagtctgcagggccctgggccaaaagtgttcagggcacaggtgactaagcccagccaggtcttcagctcaaggcctaggggaagttggggctgggccctggttgagcagatcctgggccttctgaggtt

SEQ ID NO: 655941 - DNA, 358 bp, Homo sapiens
agccgtgagtacattgtgggtatgtccgctggagtacagaacggacaaagctgcccaaagagactctagaacagcagaagcggcatctagtgagatggcagcctatttcacccactccaaacctgcagacctgtgcacattatcctggtgctgcgtacagccctcaatctgtacttcaacgctcaagaacttcaagacagatgccagctttgctacggggcctactataactcgggcccaagcctgaggttggcccacaagacccgaacactccttgtctgcctattagaagaatcccacagaatagctaaccagctcaattattgacatgcactacctctttgacatttgtgctgca

SEQ ID NO: 655942 - DNA, 823 bp, Homo sapiens
ttttctgagccttttaccactccagcctagacccctaccccccaattaggagggcactggccccccaacaggcatcaccccgactaaatcccctacaagtcccaatcctaaacccacatccggtattactcgcatcatggagtatcacatctaccgttgacggctcaaccagtacttctacatacgcaataatcaaccgagacaccaaatcaattcaagcactgcttattacaattttactggagtctctactttatacccatcctacaccagcctcatacagtacttacacagctctctccttcaccatttccgcacggtcatctacgagctcatcatttttagtagccacaggcttccacgggacttcacgtcattattggctcataactttcctacactatctgcttcatccgccaactaatatttcacgtttatcatccaaacatcactttgtccttcgacgtccgccgcactgatactggcatcttgtacatgtggctttgactactttctgctatgtctccactctattggccgacggctcttaacacaccgaaatctccaaatcaattatgatgaaacaccaacaacccaccccccgacccccatcctgtggaggagcagaaaccggctcctacccgccccccatcaccacagcaactcgtgcacacaccgactccttccccgctgggacgcacccgagcaacccctagcgaaccgaaatcaacgcaccccccgcataccccccgcccacccccccccccccccccagacgccccccccgcgccccccgcccccacaccccaccccacataccccc

SEQ ID NO: 655943 - DNA, 156 bp, Homo sapiens
ggatatggagccaagatccagagctggttagatcaggtagtagattccatggtatgcattagataaagttgtcctaggaaagagaatatgccctaaggcttcttcagactggttcaagtaaagagctagacctggctgcttggttgaacgagacat

SEQ ID NO: 655944 - DNA, 259 bp, Homo sapiens
agctcggacccctccgcgacccgtactgaggctgctcgatccggatatcttgtacaggaaatactgggcacagtcattcagctggtactcgttggagcgttcgtagcaggcacccgctccttcatcctcccacagagccttggcatgctcatagaattcgggagggaagtcaaagtcaggcacgtacatcacactcaaaatgccttccactctgaactgcatctcggagggggacaggtccccggggggcacttgtttg

SEQ ID NO: 655945 - DNA, 200 bp, Homo sapiens
  misc_feature (57)..(57): n is a, c, g, or t
  misc_feature (59)..(59): n is a, c, g, or t
  misc_feature (180)..(180): n is a, c, g, or t
ctttttaaagattttagaaatgcagcttctgctgtgggccactaggcggagtacttnanagcagggtttgtgggagtacaaagctaacttctgctgcttttgcttgatgcttctgaagcttccttgactactgtggatgataagtaactattttcttccacttctttcttttttcccctnactctttgaagtgaacttga

SEQ ID NO: 655946 - DNA, 339 bp, Homo sapiens
tcacctcgttcctcctcgttgtcgcctctgcggctgtgcttgcctgcgagccacaccaggctgcggataacaggacgacacaggtgagacgctgcgagttgctgctggactgggtgccccctccattccagcgtagttccctttctgtttgatgtccgtcgaacatcacccacattgccatccaggcctttagagtaggagtgtctctccaggtgaggtcccctaacaccagctggttagagtgacccagcaaagccttgttcgtccccactctggcttaattttccccagctctactccacctgctggctcctggagtagagctgaggaccatcgttg

SEQ ID NO: 655947 - DNA, 868 bp, Homo sapiens
  misc_feature (686)..(686): n is a, c, g, or t
  misc_feature (703)..(703): n is a, c, g, or t
  misc_feature (757)..(757): n is a, c, g, or t
  misc_feature (850)..(850): n is a, c, g, or t
  misc_feature (859)..(859): n is a, c, g, or t
  misc_feature (868)..(868): n is a, c, g, or t
ctaatcctgacatgttgttagcagtttttgaagatgcagtgaaagcttgcacagatgagagccttgctgttgaggaaagaatagaggcctgcctcatggcaagctgttcaagatgtaagaatccactttacacaaacatgattgctctgcaccaactcctggagaggtatgaggctgcaatggagctttgtaaatctttattggaatcatgtcctattaactgccagttgctggaagctcttgttgcattatatttgcaaacaaatcagcatgacaaagccagagcagtgtggcttactgcatttgaaaaaaatcctcagaatgcagaggtttttttatcatatgtgcaaattcttcatcttacagaatcgaggcgataatcttcttccatttttgcggaaatttattgcatccttctttaaaccggggtttgagaagtataataacttggatctgtttcggtatctcttaaatattccaggaccaattgacattccatctcgtttatgtaaagggaattttgatgatgatatgtttaaccaccaagttccttatttgtggctgatttactgcctttgtcatcctcttcaatcaagtattaaagaaacagtggaggcatatgaggcagcattaggggtggctatgagatgtgatatagtacagaagatgtggatggattatcttgnctttgcaaataataganctgctggatccagaaacaaagttcaaggaattcaaattttttactggatttaantggaatagaatggtttgggttaccggtcccctggcccgaatacccccaattccctttttaaccaatgcttgaattacctgggtcccaaccttntgaaatttncattaaatn

SEQ ID NO: 655948 - DNA, 219 bp, Homo sapiens
gcagccgcctactactactaaattccccgccggtcgaccccaggtcatactaatggaagaggtgcgtgtgagacatggggtcaaaggggatcatttcggaattttaaggttaatgactgccctattggattttggacttgaatggggccggtagccctgttgttttggccaatttctcccatttggaatggttccaatgtttgtatccccatgtcgacg

SEQ ID NO: 655949 - DNA, 174 bp, Homo sapiens
acggacgcgagtctggatgtcgactatgattcaaataagcaaagccaggcatgagctggggaagggcatggctgctgggaggaggatcgcttgaacccgggaggtggaggttgccgtgagccgaggtcgcaccaccgttctccagcctgggcaacagagctaactgccgtgcac

SEQ ID NO: 655950 - DNA, 474 bp, Homo sapiens
  misc_feature (92)..(92): n is a, c, g, or t
  misc_feature (138)..(138): n is a, c, g, or t
  misc_feature (149)..(150): n is a, c, g, or t
  misc_feature (155)..(155): n is a, c, g, or t
  misc_feature (181)..(181): n is a, c, g, or t
  misc_feature (233)..(233): n is a, c, g, or t
  misc_feature (246)..(246): n is a, c, g, or t
  misc_feature (264)..(264): n is a, c, g, or t
  misc_feature (269)..(269): n is a, c, g, or t
  misc_feature (318)..(318): n is a, c, g, or t
  misc_feature (420)..(420): n is a, c, g, or t
  misc_feature (441)..(441): n is a, c, g, or t
  misc_feature (452)..(452): n is a, c, g, or t
  misc_feature (468)..(468): n is a, c, g, or t
cagccaaattagcagtgtataaatggcacctaggtaagagcagactgcggctcggttgacttgatacttggggcagcccgatgctgtgtgtngggcaggggaggcatccttactggagaggcagggccagccattggnacctctggganngggangggaccatgaggcagccagcccctgnaggcgagcatgtgccaccgcagcagcgctccagtcgggaatggccaggatgngccctcttgttgnagtttttggttagctttnacgtnttcttctccacccacggcacaggtgataaaataggatccttggtgcggnttaaaaattatgccagaaagccaacagctcccctcgtgggccttgccttaaacttgcctggtttgtacattttttgccggacgcatcaagaagcaatctgtnacaaagtctgagggtcttccnttatgcttgcnctccacactaaagagnagttgg

SEQ ID NO: 655951 - DNA, 145 bp, Homo sapiens
agagtaatccaaggatcggcatcgcaccctagcgagggtgacagaggaagactctatctcaaaaagaaaaactagaactcatcatgcgattttgtattgtggcaaaagaaattttcctttagtgatatccatattcaaccgtaag

SEQ ID NO: 655952 - DNA, 437 bp, Homo sapiens
gctgcgggtcgccatggagcccgacggggcttacgagccgggctttgtgggtattcgcttttgccaggaatgtaacaacatgctgttccccaaggaaggcaaggaggaccgcattttgctttacgcgtgccggaactgtgatttccagcaggaggccggccacagctgcatttatgtcaacaagatcacgcccgaagtgggcgaactgacccagattatcgcccacgtgtcccaggaccccacgttgccgcgggccgagggccacccgtgccaaaagtgcggccccaaggaggctgtgtttttccagtcacccagtgcgcgggccgaggaccccctgggccttttcttcgtgggcacagcccccccctgcggcccccgctggaccgagtgacctcctctctcccccgagtgtaataaacaccagattccatgggtga

SEQ ID NO: 655953 - DNA, 190 bp, Homo sapiens
tgtcacccgagcttcgtgtcctctcttctccggtctagggctgtcacctttctcgtctcgtgtagcaagtcttgcaacgaccagacatctcgacacgagttgagcccgtctgcgcttttcttgctgctgctggtgcttatctccatgtactcccggttagcccagtcctggtgcatctcccgctgctgga

SEQ ID NO: 655954 - DNA, 550 bp, Homo sapiens
  misc_feature (51)..(51): n is a, c, g, or t
tgatctatgaccccaggggtcgttttgctggacttggtattacacctgagnaggccaagtacaagttgtgcaaagtgaaaaagatttttgggggcacaaaaggaatccctcatttggtgactcatgatgcccgcaccatccggtaccccgatcccctcatcaaggtgaatgataccattcagattgatttggagaccggcaaaattcctgatttcatcaagtttgaccctggtaacctgtgtatggtgactggaggggctaacctaggaaaaattggtgtgatcccccccaaaaaaaggccccctggtttttttgacgtggttcccgtgaaaaatgccaatggcaacagttttccccctggactttccaacatttttgttattggcaagggccccaaaccatggattttttttccccgaggaaaggggatccccctcccccttgttgaaaaaaaaaacaaaagactggcggcccaacaaaccagtgggtgaaatgggtccctgggtgacatgtcagatttttggacgtaatttaaaatattggggcagga

SEQ ID NO: 655955 - DNA, 869 bp, Homo sapiens
  misc_feature (850)..(850): n is a, c, g, or t
gcacaggggatcctctgtccaccctccctcgagctcagaggcgccctgcagaaggtggtgccagcactgccaccgaactgagaaaggcacagagtacaagcgcctgcagccacagctcaccgccacagactccagggcggggcctctcctatccaccaccgccctctccagacaccaagggcagacaaagggcaagtcaaaccataaagctgggggcacgccctgcaagccatgcacaatggtggcagcatgtgctaggcatggtgctcttgggtgcaaagcagggtgcaaagtgttgtgtactgggatgttggggcactcggctctagggtctgggataacaggtgacttcagtgggtttctttatgcatctcaacatgttctaatcctcctgtaatgagcagatatttcctgtaaacattttttgtaagttttaaatgctgttcctctgcaacctcatccacctgtccagtcatccattcagcaagcatttattgagcagttgaggtgcccaggcactacattctgcaatggggacccagcccatgaagaggtcataacccctacccttaaaaaactttgcctgtggccgggcacgtctgtcacgcctgtcatcccagcactttgggaggctgaggcaggcggatcacctgaggtcaggagttcgagaccagcctggtcaacatggaggaaccccgtctctactaaaaatggaaaaattagccgggtgtgatggcgcatgcttgtgattccagctacttgggaggctgaggcaggagaatcgcttgaatccgggaggttgaggttgcggtgagccaagattgcaccattgcactccagcctgggcaanaaaaacaaaactccgtctt

SEQ ID NO: 655956 - DNA, 402 bp, Homo sapiens
cagcctcctgggagagcaggacacacactgagggtacctctgaggacccagctggggtacaaatgtctttgactgctctcctgtcgcagtcagaagatgagtcagcacagccactgcagaagccggcaccatctctgcctgatcccgaccactgaaaagccacctggtgctgcaggtcaatgctcagcagaaggtccttctgccacggcctgagggaaacttaaaatgtacattgatcagcttttctagttaccttcagcaaaaggaccattccagctccttagcacatcattactagaagcaggagtccctccatgctgtatccttacccactcctttattttcaaattcccatctccttctgtgcacaaaatacatgtgtttctcttttgatccagcaaa

SEQ ID NO: 655957 - DNA, 198 bp, Homo sapiens
ttggctgctttgtttctccaaagagatgcaatattcagagtgactgagccccggcgcttatgtcgccaaagtacacgatgcatagtcatccccggtctggggtctccaatggccgtgatacactagtgatcatgttcagccctgcttccacctgcatagaatcttttcttctcagacagggacagtgcggcctcaaca

SEQ ID NO: 655958 - DNA, 843 bp, Homo sapiens
gcacaggggatcctctgtccaccctccctcgagctcagaggcgccctgcagaaggtggtgccagcactgccaccgaactgagaaaggcacagagtacaagcgcctgcagccacagctcaccgccacagactccagggcggggcctctcctatccaccaccgccctctccagacaccaagggcagacaaagggcaagtcaaaccataaagctgggggcacgccctgcaagccatgcacaatggtggcagcatgtgctaggcatggtgctcttgggtgcaaagcagggtgcaaagtgttgtgtactgggatgttggggcactcggctctagggtctgggataacaggtgacttcagtgggtttctttatgcatctcaacatgttctaatcctcctgtaatgagcagatatttcctgtaaacattttttgtaagttttaaatgctgttcctctgcaacctcatccacctgtccagtcatccattcagcaagcatttattgagcagttgaggtgcccaggcactacattctgcaatggggacccagcccatgaagaggtcataacccctacccttaaaaaactttgcctgtggccgggcacgtctgtcacgcctgtcatcccagcactttgggaggctgaggcaggcggatcacctgaggtcaggagttcgagtgatctacccgccttggcctcccaaaatgctggaattacaggtttgagccactgcacccagccaagctgcatttactgaacacctgctatgtgcctgaaactgcacccaaggctcaccattcatgacccactcagtcctctgagggcccatcaggggaggggcaggagggatgc

SEQ ID NO: 655959 - DNA, 246 bp, Homo sapiens
ggtactccctcccccatttggttaattttttaaattttttgtaggggcaaggtctccctatgttgctcaagctgggaaacccagtgagcccttgtcccaaaaaaaaaaaaaaaaatagcccggtgttgtggcccatgctcaggagggttaggcaggaaaaccgcctgactcccggagtttgaggctgcagtgagctatgactgcccccctgccctccagcctggatgtcagagtgagcccttgtca

SEQ ID NO: 655960 - DNA, 176 bp, Homo sapiens
ctatattgtcatcatatacatgatatgcattctgcactggtcctcttcaaagaattatttacaattctctcaactctgaatatgtgtggagtaaatgaatataccaatcctttgttgcattgggaggcagagacttgaggatggttatgtgtttgtgtgtgtgtgatagcttggag

SEQ ID NO: 655961 - DNA, 441 bp, Homo sapiens
  misc_feature (163)..(163): n is a, c, g, or t
  misc_feature (217)..(217): n is a, c, g, or t
  misc_feature (365)..(365): n is a, c, g, or t
gccagttggtaccgtcctgccacagtaacttgccactttaaaatgtccaatggaactgtgtagtatttcaaaagcacacacatgccacaattttcctttcccaatggaggagacagatgaatactggttttttcaaaagtgtgatatcgatggatacctggtntcacgcctgcaatctcagtattttgggaggccaaggcgggagaattgcttgagncccaggagttcgaggcctgcctgggcaacatagaaagactgccccccgctacaaaaaaattaaaaaattggccggacgtgatagcaggcacctgtggtcccagctgctgtggaggccaaggtgggaggatcgctggagtgcaggagtncaaggctgcagtgagctatgactgtgccactgcagccttgggtgacagagtgagacccaatctcttaaaaaaaaaa

SEQ ID NO: 655962 - DNA, 203 bp, Homo sapiens
gcttacgctagtatgttgcaatgcctacactatgaaatcaccaggaaattggagcctgaatgtggccacattatgtgcagtgctccaatgtgaggcagggactaataccactgatgcaaatcttgccaaagataattaatggccaatgttcacccttgacagggagccaagccagatctcatccatctagggcactccatggg

SEQ ID NO: 655963 - DNA, 127 bp, Homo sapiens
gcatcacagtcttctggttgcagtgatggcatggactgtggtcatgagtccttcacgataccaaagttgtatagataccttggccaggtgtgctaagcagttggtggtgcaggaggcattgctgatg

SEQ ID NO: 655964 - DNA, 338 bp, Homo sapiens
cggctttggttgagtcccttccccctccgaccctcaggataggaacggccccggcggagcctggcttggttgaggcagcggctgcgccttcttcatggcatacagtgggcccctgaggttccaggtcctttgcggcggcgatctggagggcgtgggtacaggacccgggatgccattcagttactgatcttaaatggtttcgtcctgacccgtctcaactacccttgctcctgcggccgccatgggggttttgcttttacatatgcgggccatgtagcagttaagaaaaatggtgtttcagacaaaatatgaaataaaatgttataaaatgtaaaaaa

SEQ ID NO: 655965 - DNA, 676 bp, Homo sapiens
gctcagcttctcaccacgtgcctgggaatatcctggtgcccatggcagctctcaccagggctgggggagcctccgcccccacaggaggccaactccgtgtatacatgtgttggggacgggtggaccatgtcgagcagctgtgaccgtcacatgggctgacgaggcctagctgagccacgtgctctgaaggtgagactacatgtgctgctgctcctcgaggtcggaaattattgagcctgacagcactaggcggcagggggtggaggtggtgaggatgccccccagaggcaccgggcggaggggacccgcacgagctgacgctgccaaaacgagtgtggcccacaggctgaacggctacgcccgagcttccatgtcgctgtggaccactcgggggaccgtaggtggcatggggcctgcgcgtatggatctcgtccatgaatccctaatggaatagagcgttcgcaaccagccagcgggcggagtacccagcgaaccgccaaggtgcccgagccaggggtagcgacaacaggcaccaatgccgtcgacaccgagcaccggctctaacgcacgacgatgggactccctggatgcggaagaacaccaaggatatgcagacgcggaacttcgagaacgtgatgcacacccggaaacggccatgcaaaactctaacagaact

SEQ ID NO: 655966 - DNA, 283 bp, Homo sapiens
taaatagcagaaaggagcctgacggacaggagcctaaacagccaggaggaagaagaagtcattgtcacggaggtaagccgcccctccaggaactggagggcacacagcacttgcaacaaacttgggacttagcagaaaatactctgtcatactgcctggtgatgaataggtgttaaccagcaaaaacaatcaattggttaacaaaaggaagtatatatctgaccatttggataccccctatacttagaccttgaagtaatgttcccttttactaatctggcac

SEQ ID NO: 655967 - DNA, 378 bp, Homo sapiens
gtggctgcaaagtgttgttctaagtgatttgcatgtataaagtcatttaatcctgacaactccattagatttttattgtaaattaggacttatcattaatttgtaaccataataatcctggtttggaaagtgggggaacctccaccagaatatatataattattggtctagaggactctagatagagagcacagggctctggggtattgatgtgaaagatagcccggcccccagagtctacattctcattcctctgctctcatacactgctatatccctagtgctcagcccagagcccaagagttgggctacactaagtgtgcatagaagtgcatacctaatagccattattatgagatggagtgccaaaatcagtca

SEQ ID NO: 655968 - DNA, 430 bp, Homo sapiens
  misc_feature (100)..(100): n is a, c, g, or t
cgctgtacgaattttcacgaggagagagagagagagagagagagagagagagagagacttttggtgccacacagagactctagtgtgcgcctctccacanatatgtggaaagagactttccagcgtgggcacgtagctcgcctgtgcccgagatttcccaaagctgtgtttgcacaagtttccacagtttatgacagatctttcccacaggcacaccgaatgcttcccttgagaaccgcttgaatgttctgatgaccgggcggaccttgtccaatatatctcgggaaataaagattccatctcccttttaccgtgagaatgctgagaaaaacctctgtgtggaatcccactcgattgcccaatcggtgatgagatgccctccgcctttccctcattaactgctgattttgttgttaagttgtgttttccc

SEQ ID NO: 655969 - DNA, 105 bp, Homo sapiens
  misc_feature (10)..(10): n is a, c, g, or t
ccacctgatngtccaccgctccaatcctggcgacagagcagactctgtctcacaaaaaaaaaaaaggatttttttagatgtccccacttaataccaaattctagg

SEQ ID NO: 655970 - DNA, 1222 bp, Homo sapiens
  misc_feature (317)..(317): n is a, c, g, or t
tcctgggtccacacaaaaatgtttatttggatgataacaaaacaatacagttagtgttagactccacccacaaagagcaaagggaatgtgaaaaatttgtgttacaatgtgctacattagaaaaaacaagactattttacgtggtgacacacttattattattctccataaaatataagtgctctactaaaatttacctcaattatattgtgaacatctcataccatgtagaacaaacaaggatgtgttctaatatagcgcgacacaagagtgtgcccttacacatattacaacaccattgtggtacttttgtgcangcacccacatgtataccacctatagcatgaggacacacattgtgtgcctacaaaaatgtggcatgtgacattttgtctctctgtttctaatctgtgtggttttctcacgacgtctcgtgtggcacttcgagagaaaacaatttctctttactatcttcccccacagccgggggagcataggggcgaagagaaacacatctctcagcgagtttatacaaaaatcatttcaaggttttcaaccaacaaaatatatctataagccactttacacccctttctcccaacaagatttatagccactgcgggggcatagtgagcgtctctcgcactatgtgtgagcctgtgggccaaaaacgggtgaactacattttacggaacagcacgatcatcaacaaacgctacaacttatcccaccaggtgacaatgtgtgaacagcacagttattaaacatcccacacatagttcatatgtggccaccaataatataccctatatccaacgacaactcatatcatctcgacaatataaaattattctcccataaaatactcaacactggcataccaaattgacccattaatacaccccccaatttttaaaacacatattaaacctacaacgcccacatcttcaacagacattttattaaaaaaaaatatccaagtcgaagtacacatagcatgcactccacaccgcacatcagtacacagttgttgaccaacgaggtattacaccacaattttacagtagaagggccccaaaaacaaaacacacaactgcccccttccactctgagaaacaacactatatgttaggtcataactaaacccgccgccacaaacaatatgttcacgccgagatgactatacacacatgtcatgggcatgaatctataatcacaggac

SEQ ID NO: 655971 - DNA, 745 bp, Homo sapiens
ggctgtactggtctggagtttaggatggcgacacggagagaaagctgggacttgaggtgggaaccccggtctggctgtcggtaggggtgaggttccctggggaaacccgcggaaggcgaggtgcctggcctgccatgtaggggctctgttccaagcctgcagagcccaccgacctccctctccccggggcccatggcggtggctgtgcccccgggtcgggccgcaggctcaggctgggcctggaggccatgtggcgcgggacgcgcttttgtgctagagctttccattcatgcaccgaactgcgggtgacgtgttctatctcgtagagtggtctcctagcaggaggagcgagagagcccagcagcgatacggtggttttcgacccagctaggggccatggccgtacgattgggacgccctggggcaggccccccgacgcagtcaccactgacgcggcaccctgtgtgatctggtgctgtttggctctgcgtggtgggctggctggtgactgggtctcgccgcttgtgccacatgtgaccgcactggacacagagcgcggtagtgtgggaggcgtggacagggacccctggtgacttgcccccccgacggtctcagtagtcacacctgcacccgaatctctgaccgatagctgcaggttggcttggcctgggagggcggtatccacactcagcgacagctatggaagcatctacacattaaggctggaccccagtgacccgcacta

SEQ ID NO: 655972 - DNA, 1247 bp, Homo sapiens
  misc_feature (1247)..(1247): n is a, c, g, or t
gcaccgacctcgtaggccaagattgcatcaggctggaggagcagctggacaatcgagaccaaggagcgccaggcagtcctgcgaacaggtgcgtctggaccgagaagaaggctgaaggagtgtgctgtctgcatggtggactgtacgtagcggtaggaatcggcctgtatgcgagtacaacggtaccaaggaccgtacaagggcactctacccgacctgtaagacagctcgatgcggtcagcttggtaggagtgccgatagtaggaggcccaggcgggcgcaacgcgctcccgacgggagaactgtctagtcgctgagctggaggtacgcctactgcagacggccgatgctcgatgtaaccgtgaagtctagcttccctaagagaacaagctcaggcagctggggtacctgccgtctcgtcggtgccccggacgaatggcgccaggaaaggcggccgggcgatggctccgacgtaagagagtagatggcaaaagcgtgatgggggctgaggccgaagctgccgtgataagccttctgctcctgcagacttgagatggatggacagacagataccaacagggctccactttcccaagaagcccgaagtaaggccttctctgcaccgtacttggagggcacatgcctgtagaaccaatgccatcctattctgaggaatacaggacactgttacccaacaaggcccgatgaaacacatactagagctgtcgttagaaaagcgagtcagtgggacccatcatggggacatgacccggtgacgattgcctgggcgagggtcaaaaagaacgagttaccccgcggcgccacaagggggcaaggggcccaaggagacgcggggcacgaggtaagacccgagacaagacacttgtgaggcaacacgcggaggactgtcaagggtccccaatgacacgcccggaggaatgaggcacctgaagaagcagggagaacaagacaccctgaagcatgcgcaccctggaaagggggggcaacagaaaatatagacgccccaacaatggcgccagggccacaacagaacacgggcggtacatagtcgagcaaaaggagacgaacaatcaagcatagtaagcgccaccaaacggtcagaagaccacacatcaccatactacactatagcaaaagggcggtactaaaaacgaacgtaagatcaggaagaagaacagaagaacaacgaagaagaagtacgacagagattgtaacgcggcagaagn

SEQ ID NO: 655973 - DNA, 463 bp, Homo sapiens
agcggggttgctgggtcgaccacggagagaaagccgggacttgaggtggtctcctagcaggaggagcgagagagcccagcagcgatacggtggttttcgacccagctaggggccatggccgtacgattgggacgccctggggcaggccccccgacgcagtcaccactgacgcggcaccctgtgtgatctggtgctgtttggctctgcgtggtgggctggctggtgactgggtctcgccgcttgtgccacatgtgaccgcactggacacagagcgcggtagtgtgggaggcgtggacagggacccctggtgacttgcccccccgacggtctcagtagtcacacctgcacccgaatctctgaccgatagctgcaggttggcttggcctgggagggcggtatccacactcagcgacagctatggaagcatctacacattaaggctggaccccagtgacccgcacta

SEQ ID NO: 655974 - DNA, 154 bp, Homo sapiens
acgcctcgttaacactgcgctctcacacccagatccgccacccctgcgattcgtctaccttatcaaccacgaccccattgacctcatcagggcctgaggcttgcctaagatcacaccactagtgaggagtggtggcaggactcgtgggccctct

SEQ ID NO: 655975 - DNA, 285 bp, Homo sapiens
actgtaccttggtttctacctttattcctagaacctgaacaacaaaaagtgaaatgagttaagacgtgactccccggcagccccagctcccctgcgtggcaaggcccaccgcagtgcccaccttggtgctgaagtgctggcagatgttccggaggatgtctgactctaccttggccagcaccagctcccgggggcccgggccgccagttgccatagcaaggacagagcatcttacttctcaatcgtctcattcacctaaaatttgagatgcatgattttgaaact

SEQ ID NO: 655976 - DNA, 763 bp, Homo sapiens
cccctaggatacctctctctctttcagcgcgtgggcccccccggcctggtttagaccagactgcccccccttggtcctctcgattccgccgccacgggtggtccctgttgcgcccgcgtcgcgcccatgtctccattccacagggccgtctacttgccccccactaatgaggcctcttaatccccaccgagcttctcccaatttttttccgcgtacaccccttttggcctcaactccttacgccccccaagacaccgactgtccacacaatcattaattatctcctcggcgggcaataattgcaaactattgtcttctccaccacaccaacactgttgtcggccgctcacattccgcggataatccccccagcctctatattcctggtgtatcccccgacatgcacaaacacccaccaccagcagaacacaccctcatcatccatctgtagggatcacaatcaatttgtcgtaaacacaccgctgtaaagtttataaaaccttacgctagtattgaaggacagcacttcccttgtcagaagcccaaagtatccttcatatctacaggatgaaaccctccccacgaatctctggtggaactataattggataagcccccccccctcccaccaccctatcgctgatgaaaccccatgaacattcacatatcagcaacccaacaatggaagaaggatcctcaacccccccccaacggggtttcaacccacccccgcggccccccagcaattttttccaaaaaaaaa

SEQ ID NO: 655977 - DNA, 881 bp, Homo sapiens
  misc_feature (537)..(537): n is a, c, g, or t
  misc_feature (816)..(816): n is a, c, g, or t
attcatcctatacccagttggtattccttgtcgaaatagcttctcggaagtcctcgattacaaaccctatccgatcagtttagttatttgaatgcatacatttagagcttagcatgtaatgagggttagagaatggcttgtgagacttgaagtgagcagtgtagattactctattggaatattagctagcttggaaaaaaaaaagaaaacacattatgcttatcattagttctcgcttcggggcaacagcgaaatgctaaatgaatgcttgtcatatatatgcatggaaaaagatgaaacagtatatatatattggcgatgaatggtgtctgtgatggagaacgcaaaataggtgaagtaatggcaagatgagtgccatatgaatagagataagggtacttggaagatgaatagaccatgctttgcaggctaggtgacgcataggcaatgttcgtatcatggtttcgtagtcgcaacgttgactctcctgtacattacatagaggaagatagatacggacaaacattgctattactncatataccctaccatacagacggggaacaagatgaacaacatggacatgaaaaaagactcctactaaggttccgtcgatcctccagaccagtcacctcccctatcaacccggtcgtttccccattccccgtcccgatacgttgaagttttccacggacacggtcaactggaatttccgccaaagccatcgttgtccgagcggctcacagcaaaaggttagggcaaacccatggcaaactatagaccataagcgacagcgcgtcttgacgagaccttganacgccaactcaaaagagagacaacaacacaaagaccaagaggggggcaggcgcccggggttccat

SEQ ID NO: 655978 - DNA, 900 bp, Homo sapiens
cctggccgcatcggcttttatttttttatggaagataattttctctcattataaatttgcttaatgggggaatagtatataatatgtatgtcacctatccttgcatacattgaaaatattttagcttagaagtttgtagcatagaattcaatacttctttataccataccaattatttcttctttgagaccttgacacagtaaggtttatattctaagtgtatttttagcaattaaatatcaaagccaacccaattagtctaatacaggagactcgttcaatcacatgtttatgtttttctctctatgaaaaagaatctaaattggccttttttcactatgcagcagaactgtgtttctggacctctaccagtttgtcagctgagcagttctggctgcagcttgtctgttgatggatagcacagcccctctatctgagtgctcagcagagtgcttgtgaaggcagcaccacagcaacagttgctcagagcgaacggattcaggagcctcaatttagcaatagagtccagggttttcagctcagtgtctttagcctgtctctgctggtcatgtcagttatgttctattcaatccaggaggtgctgtttacgttgtagtacatatatagtcattgcctggttttgggaagctgaggcaagaggatcgcttgagccccagagtttgaaaccagccagagcaatatggtgagacccggtcttgtaattcccaaccacttgggaagctgaaacagggtgaatcaattgaattcaaggagggaaaaggtgcacccagccgaaatccttccttgcacttgggctgtaccgggggtaataaaaaaagtactggaccttagttccaaactgttggtagaaagcttgctgcttaccaattaactggaaag

SEQ ID NO: 655979 - DNA, 242 bp, Homo sapiens
ttcgacggtgacctccagagattatctccagatgaagaagctagccttctgaacctcgcctgacagcagcctctcggccaagtcactcaggtcatgggcatagttcaagcctgagttggcagtcgctcttgcacacctttagaggacgggctgactccaagtgcacggtgtgcggcatctttaactggcctccattcaacaggaaactgactcgcctgcgaacctatgagggtaccgagctc

SEQ ID NO: 655980 - DNA, 1057 bp, Homo sapiens
  misc_feature (30)..(30): n is a, c, g, or t
tcctggtgatattgttgacccactgctgtnctgcccactgctgttctgaaaaatgaaaaaaaaaaaaaataaaatagtggaggtgaaaaataaataaagaaaaatgaaagaagagagataaaagaggatgatgaattagaaataaatataggtgtgaaaataaatgtggtgtacagtatattaggatgtgagcatcgatatatttataagtaggcagaaatggcaaacagtgaaacaggtgttattattagacaaatgcagtggtttatttgttttatcacacggtgctatagatatgtgcggaatttttgtgtgggcaggtgtaacgctgtgggctctctgtgcgtgcgagcgctgtgccccccttccaggtgtgcgcgccctctctctctctctctctcgcggcccgccgcttctccgccccccctctctctttcggcggcctctcgcccttctcccacccgccgcgccccccccccgctgtgtctctctacagcgcgcgcgggtaccaccccccctgcgcccctcggctcatcatgtgcccctctcttgccttgctgccgcgtgcgccgcggcgcgctgtctctcgtgtcgctctttctgccgtgtcgccgcatcctgtgcagcctgctctctcctgcgcgcaccacgcgttctctcttctgctcctcccttgggcgcgcgtcctttctgcgcgcgtcgtcccactcccccgcgcccgtctcccacgcctcgcgcctccccgcgcgcgtctgcgttctacgccctatccgatcctacctattacacgcagcatggctgtcgactcatcctgacggactgcggccagctcggagcagcctacccactcctccagtgggagccgtgcagcgtcccacaccgccgcgggcgccgtcatcactcccgctgtcgtgcctcctctccgccgatccgccctcacccccacctcgcatcagcagccacttcgtaaccggtcagcatacacaaaagaacagacccgagtgcagctaagcagctagtaaacatggcgtgccgatcactgacctccacgctacac

SEQ ID NO: 655981 - DNA, 1000 bp, Homo sapiens
ggcagcggtccggcgcgaccccgaggcggcgccggctccgccgctcggcccgggccccggcccccggtctcgagctccccgccgctgttggcccttcaaagcaaccctgacggctgaagaaccagggcccagccccgcgggagacaggctggggggcgagacctgggtgggttggcacgcaagatttgcttggggggcacagtgaacccctttgggagaaccagctgacagcctgaggagaagccaatagtttggaacacgagagttggagacgcaagactcacgggttgtccagaggaggtgggcagcaggtaccgacccccccgcgtgagggggggctccacaattctatccaaacggcgggggtacaacggtaacttggccgagaagccgcgttcacaaagtggcaaactgggctataaagcccccggtgtgttgtttcccagccacgtccctgtttggggcaggcaccttttttgtacatgaccgagctgcgactagattttcaccacgcctcataatgaattcccagagaaattgtcacgtgtgacccgtgtcttaaccttacccttgaacacgcggtgtgcacgtggatttggggaggggccttctagaggaccccagagagtatattatatgctgcaggcacctcatctctcactttatgggcttgctcaagataaaaattatcacttctcttgccgtacttttttggcccatattgagcttgccccactgaagcggcagctggtcaacataattgcactgggcgcaacgtcgtcctctcgagcagtgactcccggaggagtgcaagtgatccgatagggcagccgagaatgtttacccttctaacaccatggggaagatgtgttgtaccgcgagtgccatacaggggatgtgttggcacactccatcgtgtacagcaagcgcgtcacattacttttcctgtggagatccacaccaacacttaagtgttgtctctttttgggcccacatatgc

SEQ ID NO: 655982 - DNA, 988 bp, Homo sapiens
gacttcctctcaagcttggggttcgtatggtggggttacacgcgggttcaatatgcgtatcgaaaagtgtcatctctgttcgaggcccatctatcctgtacactggctatgatgtttcgtccgctataggattgcctaacggtgctttttccagagtattttcgcaacaatctaatagatgttcaattatataacacttatcaagatataaggtaacgtcgaccatactctctcggcttaaagtgtatgggtgggaccatggcagttccgtgaaagcagctaggatacacgaggctaatagcagtgcgactacattcagtttgagatgttgataacataccgtagtaaatgagccttatgagataagcagggagagctatggaataaaactatatagtagtggccgatagtagtgagatgttgaaaggagaattaaatagaagtaagacagcctacagctcatagatttataattggaaagagatagaaggataaaatattggagacttacgggtagataggtttacaagggatactcaaaaagatacgtctaagctaaaagatcgctatcttatccgagctcgtcttgctggcaatgggggaaaacagttggatggagaaaatgggtacagacagtatacgatgaggtagtgtgggaccaatgggtaaaggatggctcctttaaatagaaatctctgttaaccagtttcgtttttatgttaacattttgaaagatgggcccttgtgagaataactttgggaaacttggcttaaaactttatttaaattctttttaacatttagtgtccacttaatgttgaaaaaggggaattaaagggagacattctttgccctgaaatttgtcatcgaaacataatatcggactattacgggattggttgattggcattcatcagggggtaagatctttttactgagtagaatgttttgtagtagaactccatgcaaaagtttaacttgtaactaa

SEQ ID NO: 655983 - DNA, 516 bp, Homo sapiens
  misc_feature (12)..(12): n is a, c, g, or t
gtacttatctanaatgcctattctttgaagataggagggaggagagtgatttaggcatgccatgttgaactataaaggaataatacaggccgggcgaggtgggtcacgcctgtaatcccagcgggaggctgaggcaggtggatcatttgaggtcaggagttcaagaccagcctggccaacatggtgaaactccgtctctactaaaaatacaaaaaaaattagctgggtgtggtggcacatgcctgtaatcctagctactagggaggctgaggcaggaggatcatttgaccctgggagacaaaggttgcagtgagctgagatagatcacgccacttcactccagcctgggtgacagagtgagactctgtctttaaataaaaaaaaaaaaaaaaaaaaagaggactagtatggtcctggctggagccgtggccctgtttggcaattttgaggtaaatgcagctggaatagttttcagttcaacccttggcaaaccttcagtgtttccaaaaaaaaaaa

SEQ ID NO: 655984 - DNA, 165 bp, Homo sapiens
ccaggttagacaacccaggtagccaggtagccggtaacctaacccaggtagaggcttactagaagctgtgaaaacgctacagcttggattaaggcgacagcgatttctaggatagtcggtagaattagaattgtgaagacgataagtgtagagggaaggttaatg

SEQ ID NO: 655985 - DNA, 153 bp, Homo sapiens
gtgtggctccatcgcggggtggcctggggagcagctgcatgggtggcactgtgtggagggtctcccagctccctcactggtgttcgggctggtgcggcagctggtggacttgtgcattcagccgtcttccctgtcccaatcgaccagtgtatc

SEQ ID NO: 655986 - DNA, 308 bp, Homo sapiens
taaaagccccccccttttttttttaggggaaggggccggtttttttcccagtccccccagggggggggaaagcattggttttggggaaatttaggaaagccaaattttttttatttttgccccaaaaccttttttttttggtttttttttgaaggagggggcttgggggcccccctttcccctttttttttcccccactttggagggttgaggggttttggttttcctgggggggggggggggggggcgggggtttcctggtccttggttttgggcccgttggataaaagggggcccctttaaaatta

SEQ ID NO: 655987 - DNA, 128 bp, Homo sapiens
cgatggatcccgtcctgcttggactatgtgagatacattcttcgtagtttttttgagatggagtctcactctgttgcccaggttggagtacagtggcacaattagctcactgcagcctcgaactcctg

SEQ ID NO: 655988 - DNA, 215 bp, Homo sapiens
  misc_feature (151)..(151): n is a, c, g, or t
gggggggcggggggactcctcccaagatcacattttagcatttttttttcctaccccctttagaaaaaaaagtaacaggtgaaatggggtttcagggttaacgggaaaattttggccccggctcccccccgatgattttgaaaaacacaantgaacgggcttgggggggtcctttttatccgggagggggtttttttggggagcaattccttgat

SEQ ID NO: 655989 - DNA, 1403 bp, Homo sapiens
acccgtggtgctggcgtcgcgacgcgctttactagtaggtttgcgctccggtatgagtgtagtcgcctcctgcgtgcctcgatagccggctgtggtcctccgatcgacccgccttctgctcgtatcaagatcgggtagtcctgttgtggatttgcacctgcgcggctctgtccgcggtctctcgcttcctctcggcgtggctccaaatggttgtgcgctgctgcaaaacgccatgcgttcgtggatgggctctacctcgctttgtgtcaactggctaaaccacataatcggcttctttccttctttccgtaaatagcctagtctgtggttcgccgttcgtgtcgtgggactgggggtcggtcgtctggccgaccccgtacgccccggtttctctgtaactcgtccgtttcctgacgtcttccttcttgagtctcctgttcatgcgtagcgcggtggtaccctcgtttgatgccaatatgtgtggtatggccgttgtcctgctggtgcactattccctgggttctccgggtccgccgttctttctgcctggggttcatgtcgctgcgcgttgttctgagggacgtggcccccttcttcgcgtgataccttgggtgccatagttgcctctttgcctgctatgttattgttcggcgtctcgtcccccttttccttgtactcttaggtcggtgggaatcgctttgcgacccatggttagtcgcttgctacggaattgtcgcttgcgtaagcctcttcaatcgtcctcctttttcttgggtcctcattgctttgtgtatatggtcccactttggtcaggctccctttccttcgggaattcccatggactcctgggactctttctccccactcggtcgttggaggtgactctcatcgaggcgtaggatactttgcgcttgcaatataatgtgtcacgtagcttatacgccttgacggggtctgtccttgtagtggctcagcctctgtagagtccatgtccgctagtaagtctccatcatgtgtctggggtgagtgtttcgtccactagaccagttcacaccggagaggcgacagactatggacctccgcctcaataggcgttcatgcctggcgctcgtgtcactgggactggtcttgggtgtaccgtccgtctggacccggataggactcctacggatgctggatgctgcctcctgcccaccggtgaccgtcggaggacggactgcgtcggccctctacactgtgcttgaggcctggaaccgttcgcacaccggcatgccccagtcaggccgttttagcagagcttttacttgggcgcccgccgtgctctggcgcagaacatctggaatgcatatactacattatgtgctgtgtttttgattcttggatataacccggggtcacgtaag

SEQ ID NO: 655990 - DNA, 123 bp, Homo sapiens
  misc_feature (32)..(32): n is a, c, g, or t
tatttgggggcttcccttatctttaaaatcancacaggaaacaaaaaggacccactctgagagttcatgatgaaggtgtttaagaatcacattaatccccagtaaaggccagtcgatgcacat

SEQ ID NO: 655991 - DNA, 1287 bp, Homo sapiens
  misc_feature (972)..(972): n is a, c, g, or t
ccattggctgtgttccccgtgccaccgggggggcctcggggggccccttggtggccccctcggagttggggggacccccggggtgggtttccccccgggaggtttctccgcccatgggtatcatccccgaggctccccggggtttcgctcgtgcctgttgacacggggcccagggcggcacagaagccgccggggagcttctctgtgaggctcaagcccctcgaggtaataaaggagtgtgggatgcccccgtcgccacccaaaggttgggccccgcttgggttcaaaagggacaaattgaaagagatcctcaaactccccctgggaggggggaattctaagttctcgtgttctcgcgcctgcccccaacttataggggattccagaggaatcccattgagtgtctttcccttggggggcccctcttctcaaagggaatgagatttttgaagaaatttaagcccacgtcgccagaaagccagacgcccgttgccggggcctagcgtgcaacacaaggggttctaaaggccattttgttgtctaatcgggggagacaaacaaatgggcgcaacgtccggtcttggggtgttataagtgcgtccccaaaaggagaggtgggcccccccgcacacataccgctggggggcccacatacacatacacctgggcacacacagactctgttccacatctggtccccactggtggcgacacagaaggcgtatcctggggggggaacacacagagatctgggcacaagcccccaccacgcggggccccctgtggcacacagggtgaacacagagccccctgtccggcgtctctggtgcctggtgaaccgcgcgtcaaatccccggtgcacaccaccacagggggcacacactggcgacatctgtgttccgccacacactggtggccctataagagaagctgtctctacatgagatgggctgtgtatatcgagatgagacntggtaacacacctctaagacccgggggcgtgcacactggccacacccgtgggcacaacttctgcccaaaggccaccctcttgagagccacttttctaaaggcctacacgctaacctgagacccccgagaccttctggaaaggagactgtattcaccacagttctccctattcacggaggttcacctgagccacaccttcgtcaaaggagacccacacacacacacagaggtttccgtgcagcggactcaggcgtccagctgtggcgtacaaaatagggtttttataccaagaaaaataaagtgaattaagcgtga

SEQ ID NO: 655992 - DNA, 256 bp, Homo sapiens
gccacactcgtctcaagtcatgctcagtgtatatgattcccagtctctttttaccagaaaagaccctagaaaaatctattgaagacaaaaaaaaaaaaaaaaaaaaaaaaaaaaaaaggtggaaaagaaaccctaagggttagggcttaaaaaaggtgtgaggcctaataaagaattatacaggggcatccaagcagaggggattagtcctgaatttatcatgtggtatgcaggcacaccatttcaagggtgtccg

SEQ ID NO: 655993 - DNA, 165 bp, Homo sapiens
gatctagaggatcctccgtcgaggtaccaacagggaagtatattttgctgattcttttgaagaggaatctgtcaggtggattttatcaaagcaagaaagagatacggttgattaatattgcaaatatgatggaaagtgggaggtagaggaaatgaaggagtcaaa

SEQ ID NO: 655994 - DNA, 224 bp, Homo sapiens
gccagcatgcacacgatggctcgggtcgtcctctcatagtgtgcacatgtgccaacgcagagacggctgcaggtgagggcacaaagagacactgagctatggtgccgtcaataacacaacctacagctcccttccgggagctctgaagctacgatagactatgcccttagagatacctcgactagggcgtatgagggttgtgcctttctatcctggagccatcg

SEQ ID NO: 655995 - DNA, 357 bp, Homo sapiens
aaaggaacgcagctcctaaccagcaacagaacaaagctggatggagaatgactttgactaaatgggagaggaaggcttcagaagatcaaaccactccgagctaaaggaggaagtttgaacccatggcaaagaagttaagaactttgaaaaaaaattagatgaatggataactggaataatcaatgcagagaagtccttaaaggacctgatgaagctgaaaaccatagcatgagaactacgtgacgaaggcacaagcctcattaaccaatgcaatcaactggaagaaagggttttcaagggtggaaggttgaatgaatggaatggaacattgaggggaagttaggaaaaaaacacgac

SEQ ID NO: 655996 - DNA, 1257 bp, Homo sapiens
agcgggctggtaggacctcgaggctgaggctgccggggggctgtgggctaccgggccgccggcgcctcaggcgcatgcttattactcatgggctccgtcactgatcggcggccgcacaggatgtaccggacctattgtccggaggcggtcgttcactgctgatgagcgagctgccgtgatgatagtcacgcgcggtgtcccgttcattccagctcacggtaacctccgtccgaccgtgctgcaccctggacgggccatcaagaagcttggcgctcgctcgcaaggactactgctaagcctcgagtaaataattctgtcgtgacgagcgaccgtctatgggcaaacccatagcctgtcctaagactgcctgtataggcggtcccccggtggtccctttggcgtcgcctcttagaaggatcggacagcaaagcctccaatccaggtgctagaagtcctcgaagggggcttagacaagcaaagttctggaaagcgccaggaatcgaccattgtagtatctacgggtgtctcctctcggccaggtggctcgcatggtggacaccatgtgcatcgttcgcataataggccctttgtggttatgaaccatccatgggccgggcccttatttatccaaattcttcgaatcctcctttttggcgacccctgatggttggcggaccagcattctgtggggaagctcattaggcagccattgttccacaagtccctagcatatgcattgcaccagggagaggagaagccgttagcatctaaccccccgtggcaatcttccaaaaaggtaagctggggcccaaggaatttgaaggcaccgtagtttgaatcagcctcgtgtgggccttcccctcccggcctggcatcgtgccccagcaaggacctggtcggggttccgcactagcaccagagttggaaggaaaataaccttggttgcccctgtgcgttcgtaaccaatgaaccttccttccccgaatcctgcttggaaaagatgtcagtccattgaaaacctgtggggcttacggccccccgggcctgcatccatggggggacgcagacactcgccccgcggggactcgacactcccccttttggctgggagggccaggtcttctttttggcctgcccggaccccccacctttcccgaggctctgtatactaacgggccctgccgcgcttgtgtcttggcaccgttgtggtcctatgtcgtgtcaccacccggggtctgtgcaggccttgggggcgcc

SEQ ID NO: 655997 - DNA, 314 bp, Homo sapiens
agcagtcagtcgctcatccacttgatagaagcctatccgtgctggagtgcagtctgcgtcgtgactatggttagtggtgcccacctgcgtacaggctaagacagatgtggcacgtcagatcatatcctagcatctaccactatttcccagaacaggtgactctgattgttactcattccaatcaggccctacagcagttgtatgagactctcgtggcctttgacattcgttgagcgccatctactgcgtcttggtcatggagtagaaagagctggaaacagagaaagatttacgcaaggtatggaaaagtttat

SEQ ID NO: 655998 - DNA, 808 bp, Homo sapiens
gtagttccctgaaaatgtgtccttcgtacccataaagcagatcccaaatgcatttgtaacatttttgcattgcaatataaaacctttacagaaataattatctcatggacaaggtcaaagctcattgtttaaacaattcagtggcaaatcattttttccaattcatatttcaacatgcctcatcaacaattgtccttgccaggcaacattcatttcgcatcaagcagcaacaactcatttttcatttcatcaaactcattttggcaggcctcttgatccttttcaaaccaaaccaaaatcactcattagcatatgtatacatacacatttgttggatcattaatccatttggcctccatttgttcgacacatattcatttgcaacagaatcttcaaacttcttgtagttgccagcaatgattctccatctgtgccatatttttgcaattaacaatgtaacacaccccttcagaagactcaaataagcagccatctactatcccatgtgatggatgcacccaatgttgctcacacgtggactcttttccttctaaacatgatctttatgttctacaaaagttgaaatcccctttatctgtgttatatcttctacagcccataaaactgcatgtgatttgttatgttatacctcattcagaataatacttttcttcacattaaattcttccattggttggttctgacatctttcattaacaacaaatttattttctttaacaaaaagggaactttaccccaggtttcccagtggtctgttttgcgcttaacactctcttacattggggcc

SEQ ID NO: 655999 - DNA, 755 bp, Homo sapiens
atgacccacattgggcgtaataaaaattgttccctggggcaaaacgggccacccgtctgcggagccgtatgattaccccgttaaattgtgactcaaatccaactcagtatatagaatctacagttagaaatcaccaagagatgaggaaacagtcaagcccatggacccaccggaaactgatttgacagaacattctaccttaaaacagcagaaggcacaagtgcccatagttcattcataaccaaaatatattctgggtcataaaacaaactccaaagtttaaatcatttggaattattcagagtatcatctcagatcataatgcaattaaactagaaatcaatatcagaaacacaacagaaaaatatcgaaacccatggaaattaaacaacatacctttaaatatcccgtggaccaaagaggaagtctcaagggaaattagaaaatagaaatgagtaaaaataacaaatatggcataatgaagattgtagaactcagctaaaagactgcttagagagaaatttatagtattaagtgcttatattagaaaagaagaaagacctcagatcactaacctaagcttccacctttagaactggaaagcaaagagtaaaacagactcaaatcaagccaaattaaggaaataataaagtaaaaatcaatgaaattgaaaacctagaacagtagatgaaattagtgaaatcaaatctaattctgtgaaaatatttgtaaatgcattcaagactgacaaagtt

SEQ ID NO: 656000 - DNA, 348 bp, Homo sapiens
  misc_feature (249)..(249): n is a, c, g, or t
  misc_feature (254)..(254): n is a, c, g, or t
  misc_feature (305)..(305): n is a, c, g, or t
  misc_feature (315)..(315): n is a, c, g, or t
taaaaatttttattttttcattttatttcacacattgacattaaatttttatggacacataataacctgtacatatatatggggtagaatgtgatgttttaatacatgtactcaatgtgtaatgatcaaatcagggtaatttgcataatgatttttctgtagggagaaaattcaaaatctactcttctggctattttcaaatatataatatgttattgttaactatactcatcctactatgcaataggncaccngaacttattcctggggttctacatccgttaaggccaaccaagggattgggnaatattgggnaaaaaaaattgcgtctgtactggaacatgttca

SEQ ID NO: 656001 - DNA, 149 bp, Homo sapiens
  misc_feature (12)..(12): n is a, c, g, or t
gaattgggacgngcttacccctgaaggacatccttctgtaagcagcactaaaagcactctgagtcaagatgagtgggaaaccatctcaataaacacattttggataaaaaaaaaaaaaaaaaaaaaaaaaaaaaaaaaaaaaaaaaaaa

SEQ ID NO: 656002 - DNA, 551 bp, Homo sapiens
ggaccccggccccatgcacagtttatcgtgcgcagggtcactggtggatatgcggggtggctgtggtcgtcctagctcctcacagtatgcctacgcgatgcacagacacgatgcagtgtgcctttgcagaaacgaagtcaggcttcttcaagtcacaaagggaagggctggaacaactcgttgctctcagtcccatacaaggcatctgtctcacactttacaagctgtgagagacacatcagagcccgtgggcactgtcactgcttgcagcctgagtgtagtccctccttttctatctgtgagaagagcatgtcttgtgagatagcagaaaggagccagggccttaaggtcctagaggaacctcctagtcttggaccccagagaagtttccagaaatgtgtgactgcagacccagggcgcgatcaggaaacatgaagaaagcaggtgtgggtcctggaccaatagccctcctgaggtctgtcctcagggaccttcccctgtgacttgtgactgctgggatcaggtcccatcaccgccgtgatcaacgtgat

SEQ ID NO: 656003 - DNA, 573 bp, Homo sapiens
  misc_feature (447)..(447): n is a, c, g, or t
  misc_feature (480)..(480): n is a, c, g, or t
  misc_feature (522)..(522): n is a, c, g, or t
  misc_feature (545)..(545): n is a, c, g, or t
  misc_feature (553)..(553): n is a, c, g, or t
gactacttcaggtacctcatataagtacctacaataggtacttacaggaagcatgcaacattccatacaacattccaagtacctcatataagtacctactctaggtacttataggaaacatattttacctttgtgagtggcttctttagcagcataatctgttcaaggttcatccatggtgcagcatgtggtagaattgcctttcttttttaaggctgagtaatattccactgtgcgtacattccacagtttgtttatgcatgcaggcgtcagtgatcacttaggttgcttccatattttgactattgtgaataatgctgccatgaaccgtggatattcaagtacctgttccgagtccctgctttcccttcagggaaattcttatcacagattcacttccccagttcgctctcactctcttctctctccccttggagtgagaggtgnctgaaattgggtctggatacttggaatatttcncctgcatctcaagcctcagttggaacaagcactcagtatccnggtatacaacggaaaccatgaanggtgctangtgatcgcctgcaagtctga

SEQ ID NO: 656004 - DNA, 207 bp, Homo sapiens
agggtgagactcttttagtagaacatatgaaggggcatcgggagcccactgagatctatggaaaaaaaaacgaatatccccacataaacactataaagaatatgtctgtgaaactgcttggagatgagtgcattagtctcatagaattaaaactgtctttggattcaacaggtaagaaacactctatctctagaatctgtgaagggg

SEQ ID NO: 656005 - DNA, 392 bp, Homo sapiens
aacccggtcagccttcctgtgctggttaaagggtttttttccccccccctcccccttgggtgggaaaacaatggggacccggggaaaaaattcaaaaccccccccccccgggtggggtcccgggggtccttttttttttttaaaaagccccccctgggcaaaaacagggggggcccggggggggttttttttttttcccttttggattggggttttcccccccccccccccccaaaaagccttttccttttccccgggtaattagttggaggggcgggaaagcccccctccccggggtttttcggttgcccgggggtgtttggggggggccccctttttattttttcccgggcccccccctgggaattaagccccccccccccccctgggga

SEQ ID NO: 656006 - DNA, 305 bp, Homo sapiens
  misc_feature (119)..(119): n is a, c, g, or t
  misc_feature (147)..(147): n is a, c, g, or t
  misc_feature (161)..(161): n is a, c, g, or t
gtttgggaggctgaggtgggaagatcacttgaggccaggagttcaaggtttacagtgagcttgattgtgcctctgcactccagcttggatgacagagcaacaccctgtctctaaaaaanttttttttcttctaatcaaatgtatganctactgtatttganttttttattgtaaaaatagtctcacctggctgcggtgactcagcctgtaatcccagcactttgggaggtcaaggtgggtggttcacctaaggtcagtagttcaaaaccagcctggccaacatagtgaaaccccgtctctcctaa

SEQ ID NO: 656007 - DNA, 392 bp, Homo sapiens
  misc_feature (19)..(19): n is a, c, g, or t
  misc_feature (51)..(51): n is a, c, g, or t
  misc_feature (66)..(66): n is a, c, g, or t
  misc_feature (111)..(111): n is a, c, g, or t
  misc_feature (165)..(165): n is a, c, g, or t
  misc_feature (350)..(350): n is a, c, g, or t
cggccttgaatgtattcgngctttatcgagcatgaacccggacattgaggntgcggcagaaacacnggcggcgtacccggcgttgaccagcaccgaatggacatcgactcnaacgaccggatcgagatgcttgacggcgagcagcgccacgatttcagccctccncgctcagcgcccgccacgcaacgccgcgacctttctgctgagcgcgttacgccgccggtcctgcatgcccaactgcgacaccatccactcgaccaccatcggcagattgctgttcgcacgcatcggctcgtcgaccatcaaccccgcgtcgagcgcattgaacccggcctccaacgccatgcttncgctcccctgcgcgttcccagcacacggcactcatccgccag

SEQ ID NO: 656008 - DNA, 166 bp, Homo sapiens
gttattagcatgagaacatagctctttcatggttcccatagaccttctgaactacacagtgttgtgcgacctgcatggaaggcgtggggctgagtttaagctatagtatcagcagcagcactgagagagcttaattcttctattgaacagtttattaataggcgag

SEQ ID NO: 656009 - DNA, 150 bp, Homo sapiens
gaagtataattcaaaacacgtataatatgaacaactctaaaatcccatttctaattataaaagaaatctacattttctattcactcatacacagaaactgtgcctggctgttctcccttgttataaactgctttgcttgccctccctgtc

SEQ ID NO: 656010 - DNA, 342 bp, Homo sapiens
atgttctcttcaactgatcctcagggatagctgccatacaggttcatgcgattcatgcgacaacgtctcatgttcggggccaccaaatctgggtctgagcggaggcctttgaggtcatggagtgtgtagagcgtgatcgtatcgtttgctcatgatcagctttagcagatctatttgttctggctacagttcattcagtatagtgtggggtggagcagaagagttgatgatgatagatatccttcggtactcccgatccaaaatcttatagtagacaggcttcaaagcagaggcagtactggcgtcttcaacgacgaactgggcccgtgtattctcatagtg

SEQ ID NO: 656011 - DNA, 427 bp, Homo sapiens
gtatggtaggcacggtgaataacatgttccagggtgggctctgctcgttgtctgctctgtaacatacccctgcttccttgtcctgacctctcatttgctaaagtctgatttccagctttgaagtctctgctcaatctctccagccttctgctcatgtcttcacctcctaccttgcagcctgtcttttgacttgatgttgcttgactgcaattcctgtgacttggccttggggtccactcccatgaaatgcttctctggcagccttggcaggtgtgtcccagtgttcctgagttccagtgttcctggctgtgtccttgcaccagagcaggctgcttgagattagacacgctcctccctcctatcagtccaccttggctctgacactttcctcagcctccttttctttgtctgctggagcacagaaagt

SEQ ID NO: 656012 - DNA, 145 bp, Homo sapiens
tatgtcagaggcgtgaaatattccatgtctcccaggactcccattatagtgctgacgtaggctttgatgctcatgcggcgttctggagacttgtgtccacggtgaggtgaatggggttgggggcctctcggctgtagtactcgtg

SEQ ID NO: 656013 - DNA, 331 bp, Homo sapiens
actacatacttccgtctatatgagggggtgcaatcacagtttaaaacaaagattagaaaaggagtatctgccgcattctattggcaatagaaatcaaagggcattgtattagtccattctcatgctgctaataaagacatacttgagactgggtgatttataaaaaaaaagaggtttaatggactcacagttccacatggctggggaggcctcacaatcatgggggaaggcaaaggaggagcaaaggcatatcttacatgggggcaggcaagagagcacgtgcagaggaactgccctttataaaaccatcaggtctcggaagtatgtagtc

SEQ ID NO: 656014 - DNA, 1092 bp, Homo sapiens
  misc_feature (458)..(458): n is a, c, g, or t
  misc_feature (466)..(466): n is a, c, g, or t
  misc_feature (480)..(480): n is a, c, g, or t
  misc_feature (841)..(841): n is a, c, g, or t
  misc_feature (851)..(851): n is a, c, g, or t
  misc_feature (855)..(855): n is a, c, g, or t
  misc_feature (880)..(880): n is a, c, g, or t
  misc_feature (886)..(886): n is a, c, g, or t
  misc_feature (891)..(891): n is a, c, g, or t
  misc_feature (893)..(893): n is a, c, g, or t
  misc_feature (933)..(933): n is a, c, g, or t
  misc_feature (991)..(991): n is a, c, g, or t
  misc_feature (1023)..(1023): n is a, c, g, or t
atgacctcacagaagtgcattggggcctcgccaaaagcgcaagctttcaagcccccgagcgacactcgtctttccagggagatccgaaattccacttgacttccaggccctgcgaatcctctttggccccctgcttccgtcagcctcggcctcgacggctctgctcttggagcctgcctttcctttcactccaggcctggcagcacttctgcgggtgtaaacttctcacaccttgttggctttatgcagctcaccagtgccgaagccttcagacaggcgggtccgcagccctttcccggaggccccacctgtccctgtctgctgctgagatggttagttggatacacaggtcacacctcatgtctagcaaaccctggtccagccacacccttggccacgtctcagagctgcctggatagagcatttttcagatccccaagggctggtgcctttttgcntaatggtncctgcctcactgantgtttccctcttgcattctgctataagtagcaaggagaagccaggtggcaccttccacactgcttggaaatctcagcttgatgtccaggctcatcagctgcaggtcccacttcgcacccaacagcagagcagcagccagccaagctctctgctgcctcctccggttcccagtagcacggtcatttccatctgagacctcactggaagcacctgttgggtcggcattgctgccgacatccagtctgtgatgctgtgtgcattctccaagacggcggcagctctcctcttccagccatttccaggcttgtcttcatgcctttctaccagcagtcgtgcaggcctcaccagttcttccagcctntccccatcanccanttccaaagctgctgccacagttctnggtgtnaggtntnggcagcacccctcctggcccttcctggtaccaaaatctgntcgtttactgtggctgctgtaacaaagtgtcacaaactgggtggcttaaaaaacaganatagattgtcttagttttggaggctggaagtncaagatgaaagtactggcagccccgtttcctcttgacccctctaagagaactccgttgccccccaactt

SEQ ID NO: 656015 - DNA, 1589 bp, Homo sapiens
aaggtggatgatgagagtctgaaagagctattcagtcagttcggtacgaccctaagtgtcacggtgatgagagatcccaatgggaaatccaaaggctttggcttcgcgagctcacgaacaacacgaggcatgccacactaaggcatgtggcaagagactgcaactggacaacagaacactaacgcctggctaaccatcatactcacgctagcgcccgtgcaccacaaagcaaacgctagacacggccagagcacgagcttaacacactggcacacacttctgcacaccagctctgcacacactaggcacgcagcacacttcagctcggcactaactcccagggcgcgctgcacatcgctcgataccactctcaacgcacacctctgcgccactgcaccacgtcactctgcaactgctactgccagcacatacctctcacacgcgcaccaccagcacacctctcatctgcattccactatactacaggaaactccacacttctcaccgccacgactgcccttcaaacgcggctacacctggcatcgtgacacgggccaactcgcgcaaacggacacacgcccacacaacacaggggcctacacacgagccactaatccggactacactggccagtatacatatcaaacgtacatacccacatgacaaaaaaaaacacaggcccaaaccccgaacaaacggccaaccctccgacccctggacgaactagcacaaactggggcacccgacaaacttgtggcatgaaggcgcccatcaccgaaagcccagccaacacatgaacttaactggccttaacggagcccccccatgggggaccccccaacaggaaacgcaggcaaccaggcaggaaacacaggacacgccaccgcaaccaacacacggggggaccatacccaaccaccgagtgggcaacccccaccaaaccccacacacgcgcaacaacctaaagttggacacgcaaaacccacgcaaaaggagcatgggagcgacaatagggccggaaacaacttaggcaaaacacaaaagagccagcaccacacttacgaccacccagctgggaccacacacagcacactcgggaccgcccaacgtgcccgtcacgctaacgcgcaccacatcacaaacgagcacacacacgcacccaacaggagcgcacgcattgaggccatgacgaccgcacaggaaggacgcgcttcggcagggccactataagccacgattcacaataggggactagcgccacacccaagagacgccacacggcttcgccccccgatacgaaacggcgaggccccctaccacaagacgaggcgcgaacaaacgaggggccacccgtccaccacacgagctgaacacttctacacctatccacccaaccccaccgcttcagaacaccgccacagaggctcctccacacagcacacaaccacacacgccaccacttgaccaaccacggcaccaccctctacacacagcgactcacacaccacagcaaccaccgcgcagccacgcccaacaccccacaacacacgcctcacgtgcacgctacaacagaacaacaacgaccagat

SEQ ID NO: 656016 - DNA, 1013 bp, Homo sapiens
tcctgctcacatggctgagaaccctctgcatggtcctggtgaactgccatcatcaacagtgtgtaccccgtggaggactccacactgcatttgggctgctgccgggactgtgatgacgacaggctgtggatgtgtcccccctgctgcctgtgtgaaccatggccatctggctatgctgtgcacagtgcgctctgtgaggctgcctatcctggaacattaagaccattgctgagtgcctggcagatgagctcatcacatgctgcccaagggctcctacgaactccatatgccatcaaagaagaaggcacgagctggagcgtagtggcccagctccaaccgctgatattcccagcctgctgcatcaatcaaaccatgtctagccctattgggggcagtacccagcccacaacaaacaacaaaaaagaacaacaccaaaacacacccttctgcaccccggcaggcacagaacaactaacataatcataacacatcaacaccacaatcaccatcacatacccaacaaatataaaatcttatccccaaaagtcacaaaatacgtaaccccaaatacaaactcacttactccacactcaaactcatcaatcaaataacacctacacgaaaacaacagcacaccccaccgcgcggcagccacaccgcacctgcaagccatgtgaccacacacaaacacaacgaaatacgcaacgcgctaagcggagacccaccagaagaggagaatcaaccaacgcagagaatgcacaaaggacatacaacccaaaaccacaacactagaccccccacgacgcagagggcagccaaccacgaggacgaacgcggagcgggaaacggagcacgaaaggacgcgagcgacggcaaagcaacgaaaaagacacaaacagcagaggacgcgaacgagcacgccggaaaggagacacgaagccccgacaacaaggcgcaaaccacaagcaccaacgaaagcccgagccgcacacgcacaagacgaagagaaggaa

SEQ ID NO: 656017 - DNA, 1486 bp, Homo sapiens
  misc_feature (517)..(517): n is a, c, g, or t
  misc_feature (1236)..(1236): n is a, c, g, or t
cacacctgtcccacttctgggagcaagtggcatgagctgagttctgggtgaaaatagcagatcaccattcagaaagttcggagatgaaagtggtatcctcgcggaagagatccgggtctgagtaaaacaggaaggtgaagggaacaattcaataggaagtaagggagggagggggagttcagcgtccgtatcaggaaggaggttccagaggccacagtgggaaatgtttcatgaaagctggaaaggatgatgggagatgggatagaaaaggagtattatggtacatgaagcgtacggtgaatcagccatgtgggactggcctagagtgcgtggtacttgatgcagtgcaactgataggactattacacgtatgagtgtgctgatgtaggaattacgagctagactgcgcatggtcaacggtgcctgaggtgcggttaaggaaagggtaaatggatggggtagattgttggcgtggcaaaaagatcggtagggacacaatcttgggctattgagcgangtgtgctcccgcgtcacacctatctaagaagtagcgcgcacgagtaggtatctaatcgttcgctagcacctacggttcacactaatcgttattcgtccttctatctaggcaactaatacattgaacatctttctatgacaacatttgatcttgggttagaaaacgcggttatcgataacaagtgggatttctaaagtgtcccctgaggcaaaccatgtgtgtgcatttgaaacggtatgtcaggaggtaaatatcattgattcccataagaggtagagaaaaacaaaattttaaagatattgtggcccagaggttaaatattttctcttcaacagaattcagaaagagaggaaatttaaatcttcagtcgggaggtaccaaacaaatcaatggggatggggttgtgggggggaatgggcacacggttttgtactttatcgcgaatatatccaaggggttttcctggggtggctagagtggtgatatgaggtcttataacggtattaacctacattagttaacctttaccaacaatttatggcccgtgaggttttgaataggcgaaagggtaataattaaccatgttgggtatacgtgtattaaacaaggaacgagaatatgttatggtaaagacagaggtacccaaggatacagttagaagatagacaaaaaagggtgtaggaaagaggtatggtcatggaggagcaagaagtgcacgncactagctatggaaagtcgcaaagaaaattactagggggggttttacgatattccccatatgttttagtacacaagatttatcggtggcggatacattcttgtcacatacagggcgcatatagataacaagaaaattctttcgtagggataatccacttatagtcaacaagtggtgagcatattaatattttgaagattacgcaacaaaggaagggtagaagatagggagggtgtagactagggagtaaa

SEQ ID NO: 656018 - DNA, 162 bp, Homo sapiens
acctagaggattccgtggagtatgtcaatgagttagaacagttggatacaggagaagaaacagctggctccactactgacccaggcccagtgttcaatgtcctccgaagaatgaatgtctttccctggtgatggtcccctgtgcctgtctttcccagcatcc

SEQ ID NO: 656019 - DNA, 293 bp, Homo sapiens
ctctatcaactgtcatcataccctggcttctgattgtcatccacacaacaccaggacttaagaacaaatgggactgatgtcctcttgagctcttcatttattttgactgtgatttatttggagtgccaggcattgtttttaagcaaaaacatgtcatgtcaggttgtctaaaaataaaatgcatttaaactcatttgagagactgcctttaagtttaatgcatatttaaactacattgatcctgtagtgttcctggagaagctagagcctgattgtcggctactactcatcaa

SEQ ID NO: 656020 - DNA, 209 bp, Homo sapiens
acgtgggtggcgcaggcttagtaaccccgtggactgcaacgacaatcagtggatggtgctgtttatgcccaggtgtgagtcctctgtttgccctggacaaattccccccctgttttttttcatagggacatgaagtattgggtataaaaaaaaagataagattttacccccctccccaaaataaaaaccccaaatagtgctgtgttgga

SEQ ID NO: 656021 - DNA, 424 bp, Homo sapiens
agttaagcgtcaggagaaaaatgtatcgacagccaagtttttcttcaaaatattatgtgacagaatacgactcaattcacggtaaacaattcatagaatttttcaatgtgttcttgagatgccaaagttacggtgcgtgttcaatgacatcagtactattctggtaaaaggcactggtagagtcatctgagtgtagagaatgtcccttcactgctggaaaaatccactggctcccaagaaaagaaaatggtctgaagcctctgttgtggctctcacaactcatctttccctaagtcatcaagctccacatcactgaggtcgatgtcatcctccacgggaagctcgccatccctggcgtcccaaggctctctctcaacgatggtagggaaaagcccgcctcctacaggtgccgtggagccacgcc

SEQ ID NO: 656022 - DNA, 848 bp, Homo sapiens
gaacaagaagaacaagaagaagaagaagaagaagatggcagtggcacagtggctcatgtgtgtaatcccagcactttgggaggctgaggcaagagtattgcttgaagctaggatttccagactagcctgggcaacatggggagaccccatttctcccaattttattgtagtgttagagcagccattaacagtaggtaaaggggctgggtgtggtgcctcatgcctgtagtcccagcactttcagaggctgaggcaggcagattgcttgagctcagaaaattgagaccagcctgggcaacatggcaaaaccctgtctctacaaaaaatacaaagaaactagccgtgcatggtggtgcacacctgtagtcccaaatacttgggaggctgaggtgggaggatcgcttgaacccgggaggagaggttgcagtgagctgtgattgcaccatgcactgccatcctaagcaccaaattatttaaacacataaaaaccatcattagctcactggttgtacaaaaacaggccgtgggccagatttggctcacaggccatagtttgcccgcccctgctcaagcctaacaaaatggctgacacacctttagtagattttgcttcagaggaaaatccagttaggtggggtctgtaataccctaactcactgtctggacattaagaccttagacgcatgaatcaccctgtgttattgtagcgtgggaggcaagctgctcctgacctggtgcaaagaactgactgtgtgtgtactttgcttctcagatgctgtgcacagaacccgtgcagcaagaaacatctcagaaggttcaaagccccctagattttaccacagaagatg

SEQ ID NO: 656023 - DNA, 134 bp, Homo sapiens
gatgcgtatgcggtgcctttcctggaacgcctaccatatatctctcccaggcaaattcttccttctcattcaagattctctttatcttcttatactcaacctaaaataccaggtggaggtcagattccagattc

SEQ ID NO: 656024 - DNA, 437 bp, Homo sapiens
tttttaaggattgcagtttaaaactttaaaaactaaaatcattgccaaaattaatatgattattaatcacaggggtgcagaatttgattcactattaaaactatcacaaattatgataatctatgaggaggcctcgctataccaaaaatagttaaaatgctgacataacaccaaaccttattttttaaaaaatctgttgttccaaatgcgtataattttaaagcaattcctaaaccactttattataatggtttgcctgcttaaaaggtataaataaacttcttttctcttctacattgacacacaaaaatgtgtcaatgtaaacccaaaaccatcttttgcgtttatggccaatctattctcaaagttgtacagtaacggcgtttacctttatactatattcgggctatttaaatcctttctattctcactttttc

SEQ ID NO: 656025 - DNA, 910 bp, Homo sapiens
gaggcttgaggcagccagcgcaggcgcttctgctgagggggcaggcggagttgaggaacccgcagataagtttctcttggaaagatagagattatacactcttaaaaattatagtcaataggttcactaagatatggctatagcgtaaagtttaacacgtagtttcaatagctaaaagatttacagagaaccaattatgacgcttagaagagtccgcagtgaggcaagcacccgaatacacaggtttctacaaactatgcggaggtggagatgaaagcttcttcatggacgtaccacactgtctccccacagacaactggcgagaaaaggactacagagccccccgatataattaccaatagaaggggcactgcttttagattacatctgacgggtgacttaaaacagcttaaagttagttaaaaagtgtcaggtgactcaaaatacatgtgaaggcggatctttaaaaagagtattaacgcgaaggtgataaaaagaccttgaaatccatgacgcagggagaatggcgtcattaaaagctaataacgcatttattaaggcagacgacaattggcaccgattaattggcaggtggtaggaatggacccacttggccgaacgccttcgacgttggacgaggccacacgtgcaagcacgacagttcgcgaaggcgacgcaaagcattcgagcacgctgcgcaccaacacacaaacacaccaacaaaataaatttgcggggggccggcagaaaattataccaattgtgggggcgcagagataataaaagttgtaccgggtcacaagacaacgtgcgagtggggtctccaaaaaccggggccgggcgtgcaccaggttggctctgctctcgccaccccccgtcccgcggatcagaagagcaagagaaagaaaag

SEQ ID NO: 656026 - DNA, 197 bp, Homo sapiens
catcaggtgattggagttatcgattacagaacaggctcctctagagaggatatgcagcaccgcctgcatcttggattctgaggcagtggctcgcagatgatctgccaagcagtgattgcttgattgacctagttgacggtatagctgctaagcactagtgggggtatctaactcccagtcatgagtcattagctgat

SEQ ID NO: 656027 - DNA, 353 bp, Homo sapiens
  misc_feature (109)..(109): n is a, c, g, or t
tcgatacgacgttcagttcttatatttctttttttttttataatcaaacaacctgtttatttgggcttatgatttactaactgcaggtctatgtgcaggaaggccagcntccccccctgccgttgttaaccacaaccaaaaagaagccctagttgcaggtggagccaatgccacccacggcacacgggaaaaagacccattctgcagggctgctctcctgcccagggagatgccacgtgtgtctgtccggcagcttcatgaaaaagttaccaagcagctagggagggcttagatttgttggtgtccccaggcctctccctcggggggttgggggcatccccacagcccccaag

SEQ ID NO: 656028 - DNA, 87 bp, Homo sapiens
agtccaacctgagcgtccgagcgagactctatctcagaaaataagacagaatgaaaagagcccggcgagctggcgtagctgtaatcc

SEQ ID NO: 656029 - DNA, 210 bp, Homo sapiens
  misc_feature (30)..(31): n is a, c, g, or t
ataatatgtgcaggaataaagaaggggagnncagcatctcttctcttcacgcagtgcagggaaacccaactatgcacacatgctcaagcccagaaggcagaatcaagctttgctttccatagggcgctgggaggatatggaaacaaaagttgcagaggtgccatgttcagaatacaataataaagtggagtgaaagatatacttcaggca

SEQ ID NO: 656030 - DNA, 419 bp, Homo sapiens
agggtctttgtattcagggtagagaagagctcagtcagttatggtgaaggccattcataactcttccagatatcaccttctgttctgacaaaaggtgctatgtgaaatataataaatgttcaatttaagaaaatgttgagtagccttatttgcgtttctacaaaatagtacaacagcaatatattccacagggtaaaggaaataagtaaaattatcccagtagactgaataagaaggcttttcatgaacttgactatgttggaaccaagtgttaggggatcactagctgattccaatacatgaccagaattagaatactgatctagatgtttacattacctatttccctcttttcttttgagcagcagccagagatcactggttgatttacaggaataagtagagtcagtctaaatttc

SEQ ID NO: 656031 - DNA, 806 bp, Homo sapiens
  misc_feature (137)..(137): n is a, c, g, or t
  misc_feature (206)..(206): n is a, c, g, or t
  misc_feature (218)..(218): n is a, c, g, or t
  misc_feature (243)..(243): n is a, c, g, or t
  misc_feature (260)..(260): n is a, c, g, or t
  misc_feature (275)..(275): n is a, c, g, or t
  misc_feature (388)..(388): n is a, c, g, or t
  misc_feature (416)..(416): n is a, c, g, or t
  misc_feature (418)..(418): n is a, c, g, or t
  misc_feature (467)..(467): n is a, c, g, or t
  misc_feature (490)..(490): n is a, c, g, or t
  misc_feature (517)..(517): n is a, c, g, or t
  misc_feature (544)..(544): n is a, c, g, or t
  misc_feature (561)..(562): n is a, c, g, or t
  misc_feature (616)..(616): n is a, c, g, or t
  misc_feature (625)..(625): n is a, c, g, or t
  misc_feature (634)..(634): n is a, c, g, or t
  misc_feature (657)..(657): n is a, c, g, or t
  misc_feature (664)..(664): n is a, c, g, or t
  misc_feature (706)..(706): n is a, c, g, or t
  misc_feature (773)..(773): n is a, c, g, or t
ttagatggcagcttgtactgtcagaatcccgtgtatccatttgttcttctgttggagagatgagacatttgacccttagctccagttttcttctgatgtttccatcttccagaatccctcaaaaaacattgtttgcnaaatcctggtggcgaaatacttgcgagcccgaggtaattcgacgacatgcgtgccaacgctattcggangttccttgcacntttgtgaatttaaagtccacgtctnaaccgttcgcgcgtcgnaagtgaagagggaancccgtacgtggagtttcctagtgggcttctgcgaacttttgatcctcagctctgtggttttaaagaccacagtgtgacagttccctgccacacaccgcgcgcgtcgcgcgcgnccgaaccgcaccctttgaagaattcaananaagccgttaacgaccaatgcaacgtttggagcatttgcgtagagggggnggggggtggggggaaaagaaacnaattaatctgacacacatggtgctatntaattatttcaaattttatatttttgntgtgaaatgtttttgtnntttttatttatcaatgatttatagaaataagggaaatttattgtaaaatatacnttatgtccntactttctnagaaatgacacgtcgtgttcacntttgctnaaatttttcctcgttcacatggcacaaatgtatactgaatancctcctttccctcccttgctagagttctttgtgattgtactccaaagaattgtgccttgtgtttgcngcatctccattctctaaaataatataattgctt

SEQ ID NO: 656032 - DNA, 198 bp, Homo sapiens
cccctttttcccccccttttttttttccccccccccgggggggaaaagggggaaaatttttttcccccccggggggttttttttccccctttttttttggcggaaaccccggggggggaaccccccttttttttttttccccgggggggtttttttttaaggcccccccctttttttaaaaaggggggggggccttta

SEQ ID NO: 656033 - DNA, 414 bp, Homo sapiens
gaacattgttcatcatttcttaagcttaccacaacttaatttctttctcacattacgttgtgagctacccagggacatcatccttttaaagacttttcggttctgattcttcatctgagaaaactcatttaaagctccgagaatttaaagtctccccaaatggataacaaactggatgtcttcaggagggagttagtggatgttgaaggtatccctctcttttggagcattgctgagcattggtcccaagtagagtcatttgaagcccggcctgatgacattttgatctccacatatcccaaatctgggaacaacttgggtcagtgaaatactgggatttgatctacaacaatggggatgcagagaaattgtaaaagggatgcaatctacaaacgagtaccattcatggagctt

SEQ ID NO: 656034 - DNA, 229 bp, Homo sapiens
gctggtcgttcattgcattccataccattcagtctattctgttctattccattcgagtccacttcattccatgctaatccatttgagttcattccattccattccattctattctattctactctattcttctatgccctatgtagtctattctatctttctatgccctatgtagtcatgccattttattctttcttcttttaagtttggtctcgactcaggtggtgtg

SEQ ID NO: 656035 - DNA, 527 bp, Homo sapiens
ccccccccttaacttttgaaagccccccccccttaaacccaaggttttttttttaaaacaggggaatgttttttccccaaagggggggtttttgggaaaaaaattttttaaagggttccccatttaaaaacctttccaccctagggaagaaaaagaagggggtttttttttttgggctggtttttttttaaaatttgggcccccccccttttaagggggggtttcaaaggttttagggaaaaacccaaaagtttggccctttttgcccttgaaaagaaaaaatttccgcccttggtttttttaagaaacaaaaagggggcgccctttttaaaaaaaaaaaagaccccggggccccaaagggtttgtttgtttggagccccaaagggcccccagttttttggaggctttggttcccaaaaaaactttcaattaatttttttttgaaacaaaggaaaaaccgggttccgggggttttttttccccggcccaaaatttcaaacccttaaaaaaaaggttgtttttcccca

SEQ ID NO: 656036 - DNA, 1129 bp, Homo sapiens
  misc_feature (782)..(782): n is a, c, g, or t
cggtccgctgcagagattgtaccagggtgagggagtgtgcaggctgctcacatctagccatcgtgactcacctgaactcgtcgaaggacgtgaacagactggcagaacgtccgaagacctaggttatgagctgccagtatcggagtcaccaatagtgaccagtgtgttaggcaccacagggccaatacttacaacctaagccgaaagccgaggactgagaacaagtggtcggagtcgctggaatatcctttgatgttagtgtccccataattccatagtacatccaggaggagtcctcttgcgacagcctccgcattggtattgcgagttcctggggaattattccgaatcctcgagtccggttcgttccgcctgaagtacacaagggcgccccgggttgggcgatccacatagcgattctagacgcctctgtaatcgcttgtagtcctcggagctttcccaaggagcaggagagttagatcaccacgttgcttcccgttgatctatgctttacttccctccgaccttatgggaaggattttcggcctcccaccgtgcattgctgagagcggcggagccactgggttatggccaaagttcaaaagttggtcattaacaataatgctatagaccatggaaggcgcatctacacgcgccggtacagattggcaattgattccaaattccctactacaggtttctgggtcaattgcgtcaattcctatcaagcacgaacgccagcgatagacacgggagtgtcgtctacgggtagagcaacccanaagtttacttcctgtctttgttgacttcgtgttgtggaggccgccctggcccgactgcacgctctgaccttgtgtgtcttggccctgaggtttcccaggggacgcctgttctcggtagggcccttgtgtgaattggcgaccgcttgagtgcgtggtatgcccccagtgggccattggcccaagcatgggtcgtgttgtctgcttgtccttgtcaatcacattcctgcattgcgcccttggcatgggctgtattctcaacatccctcggttgggcgcctcacgccgcaggttccgtgcacgcatcttgtcgtgtcgtagcgttcccggtgggagtactcataattctc

SEQ ID NO: 656037 - DNA, 131 bp, Homo sapiens
ggcactctgaggatccacgtagtatgtacatatgtacaacctgcgcgttgtgcaggtacctagaacttgaagtattaaaaaaaaaacaacaagggttggtgttcggattaagtgggcccagagaatgtctt

SEQ ID NO: 656038 - DNA, 145 bp, Homo sapiens
atcagcaggtcaaaaaaaacctttaatactttttaagaatgccacttaagctttcttgccaaaagcctttggaacaggtgctttttgggctggaactttttgacccttttgttgtttttttgcaaccggataagtagtagtaggc

SEQ ID NO: 656039 - DNA, 613 bp, Homo sapiens
  misc_feature (84)..(84): n is a, c, g, or t
ctttcgattgggggcacttatgattccatctgaaagaaatggtacgcaatttcttcctgaccttttgaaaaatttttaggtatngctggatgctgtgccaaaacaacagttgctccatggatcgagtaaaggttttattacaagctcacaatcaccattacaagcatgtaggtgagttaatagatgctaaagataaaaatgaatgaaaatattgtggaaagtgggcaaaaaaagggaatttaagtttgggggtgtaaaaagtaaagtagaggttcctctttaaaaacttttttccccatttaattaggaataaatagtaacttctctcagaagcaaaatttattcaaagacctgtgctaacattcttaaatatttgctagccatgattaaaaaatcaatgtgctttatgttcttagctcccacaatttagcctaaatatttgccctggcatgcttattctgctccaagcaagcattaggtcatagctggttcctcttccttatttaaaggtgtctgttttataccttccccagcattccacaggttactttctccttcccttgtgctcctctgccttggcctcttttaaaaagttctaagtcgcccgccaatc

SEQ ID NO: 656040 - DNA, 81 bp, Homo sapiens
agttcaacaccaaccacatttcccttcctccctctaattctacccacatgatatttattccttcctttcgccaattaaaaa

SEQ ID NO: 656041 - DNA, 785 bp, Homo sapiens
  misc_feature (256)..(256): n is a, c, g, or t
attcggcacagaaatggatgactaattttatgggtaaaagttggttgtttcaatgaaaaatgatccagaagaagaggagtttacttcaaacagaacctggcaatcggataaataccttcaagtgtctgtctccgtaaaaatgttccagaagaagaggaggttacttcaaacagaacctgggcagttggattaataccttgaagtgtctgtctccataaccacattttagcaagattcccagccttcctcaggtatngctggatgctgtgccaaaacaacagttgctccatggatcgagtaaaggttttattacaagctcacaatcaccattacaagcatgtaggtgagttaatagatgctaaagataaaaatgaatgaaaatattgtggaaagtgggcaaaaaaagggaatttaagtttgggggtgtaaaaagtaaagtagaggttcctctttaaaaacttttttccccatttaattaggaataaatagtaacttctctcagaagcaaaatttattcaaagacctgtgctaacattcttaaatatttgctagccatgattaaaaaatcaatgtgctttatgttcttagctcccacaatttagcctaaatatttgccctggcatgcttattctgctccaagcaagcattaggtcatagctggttcctcttccttatttaaaggtgtctgttttataccttccccagcattccacaggttactttctccttcccttgtgctcctctgccttggcctcttttaaaaagttctaagtcgcccgccaatc

SEQ ID NO: 656042 - DNA, 180 bp, Homo sapiens
gaaacctaattaggaaggaacagttcatctcctttctccctgtggattgctatcagattccacttcttctgaagatctggagaactaggtgctgagccagcatccctgccaggaggctgcattttctttacagctcattgtaaaacagtaactagcatggttacccatcgcatcgctttg

SEQ ID NO: 656043 - DNA, 254 bp, Homo sapiens
tacgctttatcttctgatatggtttgaatctgtgtccccacccaatctcatgtcaaattgtatccccaatgttggaggtggggcctggttggaggtgactagatcatgggggtggatctttcatgaatggtttagcaccatcctcttgatgctgtccttttgatgaatgagttctcaaaagatctgattgtttacaagtgtgtagcacctccccctacccctttctcctgccatgtaagacgcacctgctcctg

SEQ ID NO: 656044 - DNA, 103 bp, Homo sapiens
ttgagaactcgaacaagggatctcgaacccgtctagaaggaatgtatttgttgctaaatttcgtagcactgtttacagttttcctccattctccacatctcct

SEQ ID NO: 656045 - DNA, 276 bp, Homo sapiens
agccggcacccaatatttgcaggagtagtggcatatacaacggatctagtacaagttaaacaaagacgggaaaacaggtgttacaggttagaaccatttgatgtagctacgtatcaaagggaaagctggtgatctatccacccatttagtgatctttatcagtgtctctcaacttttggtatataggaatgcacataagattatggggattatgtgaaaatgtagaatcttattcagtagattcggagtgggacctgagattctgcatttctaaca

SEQ ID NO: 656046 - DNA, 223 bp, Homo sapiens
cccctgagttgacacttaacccattacgctggcaaactgatacaactcagaaactgctcactgtcatggaaaacctggaacttgttgatgaacttgttttcaaaatatcatctcatcaactgaggcctggacaaacaatgccctgagtgagggatctgcaacaacccttgaagacaacaatggaaagaaaccatgcaaagaaacttggctctagcgcggtggg

SEQ ID NO: 656047 - DNA, 102 bp, Homo sapiens
cacattcttcacattagtagggttactctccagtatgaattctcttatgtgtagtaaggtgtgaggaccagttgaaggacatacggaaaaaccaagctcacc

SEQ ID NO: 656048 - DNA, 626 bp, Homo sapiens
  misc_feature (137)..(137): n is a, c, g, or t
  misc_feature (159)..(159): n is a, c, g, or t
  misc_feature (254)..(254): n is a, c, g, or t
  misc_feature (258)..(258): n is a, c, g, or t
  misc_feature (260)..(260): n is a, c, g, or t
  misc_feature (264)..(264): n is a, c, g, or t
  misc_feature (266)..(268): n is a, c, g, or t
  misc_feature (491)..(491): n is a, c, g, or t
  misc_feature (563)..(563): n is a, c, g, or t
  misc_feature (574)..(574): n is a, c, g, or t
  misc_feature (612)..(612): n is a, c, g, or t
ggaagcaggtctggaagccctgggtctgcccagtggagtcctgcagacaccagcttctgacatggctcctgggttacggaacatgcgttcagcaaagattgcctagtcagcaagagcctcctcgatcctcatgagtnggttgtatttggccagacgctncgagcggcagggggcgccagtcttgatctgtcctgtgcagagccccaccacaaggtcagcaatgaatgtgtcctcagtctccccagagcggtggntcancntcancnnncagccattagactgagccagtttgcacgcctggatcgattcggtcaccgagccgatctggttgaccttcagcagcagacagttgcaggcttcttctcaacggcctgggcaatccatcttgggagttggtgacatgtcaaggtcatacccccgacaatctggtatgttcacgccccgtagaaggaagcgaggtccaatgtggccacagtcatccaggcatagtntcttgatagagagctcttattacagctctcgcgcgcttctcccacagtgatgtgccgtcgcgggatcatcanggcgacttganagtcacagatcgtacttcccatatgcgatagaactcanggatgcttcattga

SEQ ID NO: 656049 - DNA, 334 bp, Homo sapiens
gagatggtttgaatatttgtccccgtcaaacatcatgttgtagattaattcccctaatggcagtattgagaggtggggcctgtaagaagtgattgggtaataagggatctgcttgtcatgaatggattagcaaggcggtcgtactgtaattgaataaatggcttatgctgggcttgagactgttggcttcataagaagagggagagagacctgagctagtatttaaaggtgaacccgtcatatgcactggcggacacaccctcatgttcatacacctatcccccattttcctcctatccctcaaccccgacatcattaccgggttttcctttta

SEQ ID NO: 656050 - DNA, 267 bp, Homo sapiens
actacacggttcctttcagaagggactgcgggatctatctgcagccatatcagtccacaggtctctttcactaataagcagtgttctgtgcgagatctatgtagttaaaaaagtagtgagagcgtcacctagtcccacatctgacttactgtaggagtccgtccgccagcataccctggcaagtgctggaaatcaactcagaaaagggaactcagcacctagacaatactttggctcttctcccttttcactggggcaatcaagctt

SEQ ID NO: 656051 - DNA, 390 bp, Homo sapiens
ttgaaaagcacccgctcaagaggaacagcattcctgagtaacaagttccatgtaccaagctaaagaattacctcttgcaggcagcataagaatatgagtcaattgaactacatcccaagtaaaaactttgggctgggcgtggtggctcatgcctatcatagatcccagcactttgggagaagaggagcaaggtaggctggtcgggtagatacgggatagaggctggcattcagaagtgcagagctggcctaacttcagaatgaaaactgtctgatgaacaataaatactgtgtacagtcgaatttagttactactgcattagagaatgaatattttcctaaaggatgcgaaccttatatttctcttatcctgtgcctgctacattgcggg

SEQ ID NO: 656052 - DNA, 213 bp, Homo sapiens
agtgcccctgtcccccccggctccccctgctggggtttagggtttttttccctcccccggccctggggtggaggccgtcaacttaggggggccagcccccttcccccttttctcttggcagccgggttgggttttgtgttttggggttttttttttttttttccttttgttttgaaatttaagggtgccaaataaaggaaaagccgtttttta

SEQ ID NO: 656053 - DNA, 439 bp, Homo sapiens
  misc_feature (33)..(33): n is a, c, g, or t
  misc_feature (270)..(270): n is a, c, g, or t
  misc_feature (291)..(291): n is a, c, g, or t
cctggcccggggcaggcgggggccgggacacanaggccctttcagccccgggaggctgcgggcccgggcggggcggggcggggcggcaccctccaggaggacgcccggcctttctccccacttttgcctgggaggcccctggcccgccgggctttgtcctatttataaacgtgctcctgagtaaactccctgaagaaaggggcctctgtgtgcggcagcccggcccacagcgccgccctcagcacacagtaggcgctcagcatggccttntcatgggactgaggacaagcnccgatccttgggagctgccaggcgcctccagcacccagaacccctgacatcgagcgcctggacacctgttcccgaagccctgtgagctgatgggctacgtaacctttgggccgcaatgctagaataaaatgcatggacacttgttcca

SEQ ID NO: 656054 - DNA, 167 bp, Homo sapiens
ctaagcagacatcagcaggtatcaggactacatatggctctaaaaggtccactggattaattaagaaagacgcaccttgtattagccactgtgaactgtatacactgtggtcaaagctctgacaaggtcctttccttattcttctgattattcctattgggattatg

SEQ ID NO: 656055 - DNA, 88 bp, Homo sapiens
ggggtatggggcatagtctcttaccctctttctttggagctaaaggaggttcttcgaatgaagtctgtagaggttctaaaaaaaaaaa

SEQ ID NO: 656056 - DNA, 806 bp, Homo sapiens
agcgggcttctcgcgagcggccgtccgagcaccggcctcgccgccgcagagacgctcgccacgccgctgccagagccggagcggggagccaggctgcgtgcgaccagccgcagagcagaaaagcggcccggggccgggggccggcaaacggcacgaggggtctctggcgcgggcggggagtatgcccgcgcgtgactactgctgtaatggcgcctcctctgtggaaccccctcgccccgggttgcgaaccgcccgggggattgcttggtcccgggcgctcccttgtgtccctgggtggctgcgtcacgttccttttgcgcaggagtgtgggtgttttaagcagaaacttgtgctttttgtgaaaaagaacccaccagggatgtttactggtcacacagaaaaggagccccagtccgttttaggatttgggcacgggctcacggcagaaagttcctatttaaggcgcacacttggttgaaaaaatgtgaggccaaaaatgtcttgaaaaattaacggggtctgagggttcctttctaacggggtcttttattaccattccaagtgagggttgtgaaagggcacaggggcgaaaggaagaagccaggtcccggattgaaacgaatttttatcaaggtgcgttggggccaatgaaacaaattattgggaggccattctttagtcaaaaaagctcatctttgccttatcaagtaagtgtttaaagttttttagtttgttggacaattttttttcaattgggtacaatttttgatggaatttcctttggcgtttaattaatatttattaat

SEQ ID NO: 656057 - DNA, 1212 bp, Homo sapiens
  misc_feature (162)..(162): n is a, c, g, or t
  misc_feature (291)..(291): n is a, c, g, or t
ccgatccgactgcactccagccgggcgacagagcgagactccttctcaaaacaaacaaacaaaaaaaaataggaggaggctgtgtatgttctatatacatctcagagatacacacttcaattaaaaaaacaagatgttcagtgtgcacagcatcttacgttngcttttctgaggtgataagaatgtatctttttatgtgcattaaagcagaataggcagccaagtgcagtggctcacacctgtaatcccagcactttgggaggccgaggtgggcggatcacctgaggtccnaagttcgacaccagcctggccaaaatggcaaaaccccgtctctactaaaaatacaaaaattagccaggcgcagtggtgggtgcctgtaagcccagctactcaggaggccgaggcaggagaatggcttgaacccaggaggcagaggttgcagtgagccgagatcgcgccattgcactccagcagcctgggcaacagagcaagactcggtctcaaaaaaaaaaaaaaacagactaggcaggagccatcagcttagggctttttctgtacccagaacccatccatacacaaacgggaacttaacctagaggcattctttgtaactaacttcaaattaagcttctaccaatcataaacagccaaccagccaactgtggcagaacttgggaccatgcattggaccacacaaataaggcaaatgcccagcagtagccaatcaagcagtcatgcaccgctaagagcagtcatgcactgctaacaacgtttcagtcaatgatgggccacatgtagatggtggtcccgtaagattataataccttattttaactgtaccttttctatgtttagatgtgtttagataccattgtgttacaatggcctgaagcattcagtacagtcacatgcgagcaggtatgcagcctaggagcaataggccacaccacacagcctaggtgtgcggcaggtgtagcgcactctgatgcctgcacgacgacaaaatcaactaacagcaaactcctcagaccgtatccccatcattaagcaacacatgactgcagtttctttctttgcttctaggctcagcctacaaaagcttgctgctcatgctgccggagcagagctctgaacttctaattctgagggctgcccgattcccaaactgttctttgctcaaataaacttatctgttaaatttaaaaaaaaaaa

SEQ ID NO: 656058 - DNA, 103 bp, Homo sapiens
ctagttcggacaggagcgcagtgtctgctcctacatcttctcggacctccttcgctctcgggctcggaaggaatgcgcttctgcatgactgccgcaggtactc

SEQ ID NO: 656059 - DNA, 173 bp, Homo sapiens
ggatccccactactccacggttcgctactagtccacggttcgctactagtccacggttcgctactagtccacggttggctactagtcgcgagggttgttttgagacccccacttctcccctgaagaaggaaccacctggctatgaggaagccatgagccaaccgtggactagt

SEQ ID NO: 656060 - DNA, 548 bp, Homo sapiens
atatttatcggatgtcaccacctatgattggaatgtctcaggtggtggctggatgagatggtgaatcgctgtaccagttacccgacctaggaccaggtgctatacgtagcagggaaagagtatttgtgattcagaagagatgtgtaggacaattgaagtacagtcaatttaaggttgttttgacctcagggcaggatttacagtaaacagtagataaactggaagtcttagaagccttcccaggactagggttaatcataagtcaacatgacagatgagcatccaagatggagttgcttgggcctcgacaagcatgttgtttccctaaactcggaaccttcttcagaacttgaagtgacagttttcctgaggtcattaacagtagtgccatggcctccaccacaggctcggtctattccagcactccctgaaatgtacagctgatgtgtgggttaggaaaaatagtgtattccttgtgttctgctttttctgccctaggaaatttcaggtctacaggaatctgagagttacgcagtggcatcgataca

SEQ ID NO: 656061 - DNA, 372 bp, Homo sapiens
  misc_feature (309)..(309): n is a, c, g, or t
tactccacaggtaggcagaggttgcgctgagccaagatggcgccactgcactccagtctgggcgacagagtgaaactctgtctcaaaaaaaaaaaaaaaaaattgggttgattttggcaaattttgacaatgcttttaaaaaccctatttttggtaaattgttttgtttaaagttagggaataagtttgatggctgcttgcaaaaggtctcattaacacacttgtttctaccttctagaatttcccaggccttcactaacaattgaacagaagaggaaaggggggagttttataaacattcatccttgntagtccaaccgcttttccattgggtttccttgacaacccattctctgcttattagaattagct

SEQ ID NO: 656062 - DNA, 306 bp, Homo sapiens
aagagaaaagaggcaccactaaaagatcgcagtttggctggtttattggctcacacctgtaatcccaacattttgggaacccaaggtgggtagatcacgagatcaagagatcaagaccatagtgaccaacatagtgaaaccccatctctactgaaatttcaaaaattagctgggtgtgttgacacatccctgtagtcccagctacttgagaggcttaggcaacagaattgtttgaacccgggaggcagaggttgcaatgtggtgagatcatgccactacactccagcctggcgacagaacaccgtc

SEQ ID NO: 656063 - DNA, 665 bp, Homo sapiens
cgaggactcattatcgtgtgcactaactagtctagtgatagtgagtctctatttattaaaaaaatagatgaagtaagggtgaggtcttttttgtctatttagacagtttttacttattgggccaaagtccattgataaaaaacccaccatgccaacagcaaataattcttttctaaaactggccccatttcttgaattaacaaggcttcatatcctactttacacccaacagatacttgccattttctccaagactgtacagattccactaggccaccagctagaagggctgcagcgaaatattttatagtactgctaaattttactactttcagcaaagagtatgcgacagcattcacccctactatcacggagaacaggcttcttgcaaaaataatctagtccagacatccacatacttcagtctacaaatgtgtacatgtgcacccatgtaactagtgactcccggtttccatgggcttgactcataggagcattttgaaccccttacaaagaagaggagcaaggatagggtggatatatgagcatttttccattccacttttggacaaaggggtcagaaagaattctcatgaatcctgcaggacagactatgtctatggagaactcttcaaggactaggtcaattgcgctgtcacattcta

SEQ ID NO: 656064 - DNA, 220 bp, Homo sapiens
gcccccccccaattttaagggccttttggagaggggttccccaggaaccccttttttcccccgcctggggtcggcctttccaaacttccttttttttggccatttttttcccttttggggaaatttttccccccccccccccccattcccttttttttcctttttttttaaaaattaaaattaattattaccattattccgggggaagggaccaaaggga

SEQ ID NO: 656065 - DNA, 482 bp, Homo sapiens
tagtacgtctatttgattctactctcaagaggattatctttaagtacagagacgttttcttctgcttgatctattctgtgaagttctcaactgtattttattttttatttcatacatggaattcttcagctccaagatttctgttgggttctttttaaattatatctatcttttggttgaacttgtcagtcagatcatgagtggttctcctgatttcatggaattttctttctgtattctatggtatctcactgagtttccttaagatcatggtttggattacttttggggaaatttgtgaagtttaatttcttaagggtcagttaatggagaatttggtccctttgatcatgtcatatgttctaacttttccatgcttctggtgtccctgtgtggatgtctgtgcctctgatgaaatagtcatctccaatatcagagtagctttcatagggaaagattatacgggcatatgagtcctaggt

SEQ ID NO: 656066 - DNA, 118 bp, Homo sapiens
cttatgaatcctcctcctccttccacgatgggtatcaggtgctacggggagggctcagggtgagcacagacacagcttcggcagggtgctgcgaaaacaggagacaccagcaggtgtc

SEQ ID NO: 656067 - DNA, 192 bp, Homo sapiens
acccccgcgtccgggaagggggcccagggatgggcttcttccctcctttgggcctcggtccccccccttgtgggtgggggggggtggggtttcagtgcccaggccggtgccgctcccccggggggggagggggcccaggggtgggcctcttgtccttttttttctttgaattaatgtccctttttgaggcca

SEQ ID NO: 656068 - DNA, 269 bp, Homo sapiens
agttgttaccagcgacccactgcttaacatggacatttaaaacatagctagactttctgtattacaccaatttgatatcgctataatgaaattggaactaagggcgcaaacgagagtgcaaagcatagtttctgaggtcttactaatcggtgcctgatagaatgccgattcagccttacaatgtagactttgcaacagtggcctttaaagtacgctagatcaagtgtaccctagaggtaaccctatgtcaaaacaattatttgtcttaa

SEQ ID NO: 656069 - DNA, 519 bp, Homo sapiens
  misc_feature (118)..(118): n is a, c, g, or t
  misc_feature (188)..(188): n is a, c, g, or t
  misc_feature (200)..(200): n is a, c, g, or t
  misc_feature (202)..(202): n is a, c, g, or t
  misc_feature (301)..(301): n is a, c, g, or t
  misc_feature (314)..(314): n is a, c, g, or t
  misc_feature (324)..(324): n is a, c, g, or t
  misc_feature (327)..(327): n is a, c, g, or t
  misc_feature (330)..(330): n is a, c, g, or t
  misc_feature (333)..(333): n is a, c, g, or t
  misc_feature (346)..(346): n is a, c, g, or t
  misc_feature (363)..(363): n is a, c, g, or t
  misc_feature (368)..(368): n is a, c, g, or t
  misc_feature (374)..(374): n is a, c, g, or t
  misc_feature (397)..(397): n is a, c, g, or t
  misc_feature (414)..(414): n is a, c, g, or t
  misc_feature (417)..(417): n is a, c, g, or t
  misc_feature (422)..(422): n is a, c, g, or t
  misc_feature (429)..(429): n is a, c, g, or t
  misc_feature (431)..(431): n is a, c, g, or t
  misc_feature (474)..(474): n is a, c, g, or t
cgggcggtggcggctacttagctgccgccggccttggccgcggcctgttcggtttgatatgtggcttaaattgcgcatgcgtcggtggcctagaggctgtaagggctggtcgtcctanaaactcgtggacgtctcgcacggttacccggacgcaggcccgcccctctggtgaaccgctagctcctctnatctgggttggnancttcctcgcagttgcggcctccactccttccttctcgcttagccaaggcttcttgaatgctcgcaaattttcttttttttttaataaaccgggcccttnactggcgcgacgnattctcccanccnctnaanaaaacgtctttanttctgaaataggggttntattnaaatanacttttttctaattattttaaanaaaaaacaaattttgancanttttnttattcnanttcaaaaattttcaaaaaacaacaaagacaactcaaaacatcngtaacacatttggcccagtaactgttaacaaacatacagtgcatt

SEQ ID NO: 656070 - DNA, 219 bp, Homo sapiens
ggttaaggccagtaggttgggcttcagtttttcccaggccatgaacatttatttaatttcagagaacttctattgtattttcaactgcatatctctatttttattggtatttaggaatgtgaggagaattcccagcccattattggctaccatggttccttcatcctcgtctaggctaccactctaaattgttggatgcactaggtaatattgtacaat

SEQ ID NO: 656071 - DNA, 997 bp, Homo sapiens
  misc_feature (221)..(221): n is a, c, g, or t
  misc_feature (479)..(479): n is a, c, g, or t
  misc_feature (519)..(519): n is a, c, g, or t
  misc_feature (997)..(997): n is a, c, g, or t
ccaggactttccctgcggatgggggccttcgacagtgagggcacccgctcatgctcgaccgcggcgggcagttccaaaggggaccccaaaggtgcctcacgcggggctggtgcctcctgggcgtccgttgggagcggccactaccgtgcccgggtccagaagctagtacagcactctccaaagccatgctgcgaagagtgagccgagtgacatctgcctangcgctgtgggctccacgtccatgctgagtccggctgtccaggctgtctctactgttcttggctctcggtatctcttggcttccatcattctctccaggtctcctgcatgactagaagcccatcggagatattgcgaggctatgccgattgtccttgtgctactagctgcatgtagcccccatgggagctccccgttcctgcacactcactgtcctcttgatccttttgcttgctcgtgcgtggatccagggctccccnatgtgctacctttgcctaccgtgggtgcgctgcgctaganttgagtgtggaggccccgagagaacctgaagctgctcgatggaatccgccttgggaaggctctcgactatagaggcctaagcgtactgtctacagaggcccttgctaacgcttgagcacctatcaactcgcagctcacggaagacccttagtttggtcgagggcacgcgcattgcctgattcccaaagtactaggtcgcttgctcccgttcgagaccccttggcaagacactcgtcccggtccccagattgtcgtccatcgcccgcaggcccttgctccgcagggctcgctttagcccgttgggcccctccgtgtcccgggaaccggggtccgcccaatgcttcggtgaacccttgggacctggtccccttctatggccaagcaccgtcaaatcggaaactatgttgttgaaccatgcccccgccgatggatcctcacgtagcgcgtatgggtcccaagtccctggtaagtttcccgn

SEQ ID NO: 656072 - DNA, 886 bp, Homo sapiens
  misc_feature (403)..(403): n is a, c, g, or t
  misc_feature (417)..(417): n is a, c, g, or t
  misc_feature (469)..(469): n is a, c, g, or t
  misc_feature (476)..(476): n is a, c, g, or t
  misc_feature (488)..(488): n is a, c, g, or t
  misc_feature (501)..(501): n is a, c, g, or t
  misc_feature (510)..(510): n is a, c, g, or t
  misc_feature (531)..(531): n is a, c, g, or t
  misc_feature (538)..(538): n is a, c, g, or t
ctgaccacatgcctgtggctgtggaagggatgacagaggctgtgcggcggctcagtgtgaaacgaggctgcagtgttgtggtagtatgtgaagactgtctgtggcttgatgtgactgagcaacatggagcaaactatctgctgagtgacctggtctgtgaccaatgtatacagatgtggtgtggcgacatctgccaacagggtacttctggtccttgggtggaagcatctagctcaggtagtgtacggtacttgagcctgtagtgacgaaaagtgtgattgccattgattatggaaagaaacagggaaaatcttcaatgaaagaaacaggaaatgacagaaatggtattgcttattacccaccagcatttcggtaaataactgtgtatgtacacttctccccnttgaagagcgaccnggattatattctcaaggaaggtgacttggtaaaaattgaccttggggtccangtggatngcttcatcgctnatgtagctcaccnctttgtggntgatgtagctcaggggacccnagtaacngggaggaaagcagatgttattaaggccgctcacccttgtgctgaagctgccctacgcctggtccaacctggaaatcaggacacaccagtgaccgaagcctggaaccaagttgcccactcatttaactgcacgcccatagaaggtatgctgtcacaccccttgaagcagcatgtcatcgatggagaaaaaacccttatcccggatcccacagacccgcagaagaaggaccctgaaaaagctgaatttgaggtaccatgaagtatatgctgtggatgttctcgtccagctccagagagggcaaggccaaggatgccggaccgagaccactatttacatgagacccgtctc

SEQ ID NO: 656073 - DNA, 220 bp, Homo sapiens
ggtttctgcctacccaggatagtcttgtctctagacaatgtattgatgatgcaaatgttctggaactaaatagtggtgatggtggcccaaccctgtgaatgtactaaatgtcactgatttgtacgtatttaatatgaattaaatgttaaaatggtgaattatatttatgtatattttaccataataaaaatatgcattggaagatgcattttttgtgaca

SEQ ID NO: 656074 - DNA, 328 bp, Homo sapiens
  misc_feature (28)..(28): n is a, c, g, or t
  misc_feature (41)..(42): n is a, c, g, or t
  misc_feature (52)..(52): n is a, c, g, or t
  misc_feature (60)..(61): n is a, c, g, or t
  misc_feature (75)..(75): n is a, c, g, or t
  misc_feature (77)..(77): n is a, c, g, or t
  misc_feature (84)..(84): n is a, c, g, or t
  misc_feature (86)..(86): n is a, c, g, or t
  misc_feature (134)..(134): n is a, c, g, or t
  misc_feature (139)..(139): n is a, c, g, or t
  misc_feature (152)..(152): n is a, c, g, or t
  misc_feature (194)..(194): n is a, c, g, or t
  misc_feature (213)..(213): n is a, c, g, or t
  misc_feature (221)..(221): n is a, c, g, or t
  misc_feature (266)..(266): n is a, c, g, or t
  misc_feature (271)..(271): n is a, c, g, or t
  misc_feature (283)..(283): n is a, c, g, or t
  misc_feature (291)..(294): n is a, c, g, or t
  misc_feature (313)..(313): n is a, c, g, or t
  misc_feature (318)..(319): n is a, c, g, or t
gagcagcgctttgtcagctctttctctntgtcaccttctannatacataagnctggatannggagcgtgtatgtncngcgcttnancatcagctgcctctcaatgtagagcagtgtaatggataacatcctatntgtgnactacagtgacangcgcatatatagtgtatgccattaggtcagtccttgagatangagggtgtctctgttgtgnctattgtngtgcactcgttatggatactaggttctcaatgtcagttctttccncgaanacaatctagttnttttaaannnnggtatatagcaattgttangttannaatgtatat

SEQ ID NO: 656075 - DNA, 140 bp, Homo sapiens
gggaattcttataactcgcaaactgtgtcataactcacgggagggaaataccgtccgccagccccgctctttcctggctacacataaaagctccaggttcctggggttccggttggtgaattctggggcgacagcttcat

SEQ ID NO: 656076 - DNA, 416 bp, Homo sapiens
gtggctcatatatatcaatggtggtctaagagcatctggcggatagcaccgggcatatttggaatgtatgaggtctggtatcctttagcagtccagacgaggacttggtctcagttgagcaatttggctatgaaggattgtatgcagcacggttctgagtctgtgggatacctgccatgaagtaacctgaaggacgtgctggctggtagggtgtgattacagggttgggaacagctcgtacacttgccattctctgcatatactggttagtgaggtgagcctggcgctcttctttgcgctgatctaaagctacctacaatgtcttggtggccataattctaccgttcatgtctgtaactgactaagtcggcttctgtctggggcggagagacatacaaaatcaaatcctttgttgc

SEQ ID NO: 656077 - DNA, 370 bp, Homo sapiens
  misc_feature (227)..(229): n is a, c, g, or t
  misc_feature (231)..(232): n is a, c, g, or t
  misc_feature (234)..(234): n is a, c, g, or t
  misc_feature (236)..(236): n is a, c, g, or t
  misc_feature (239)..(239): n is a, c, g, or t
  misc_feature (241)..(242): n is a, c, g, or t
gttttttcatttcatttaactgtgctttctccacttttcatcattttgtgtttgatgatttaaaagaagcttgactattcctcagctcttgtgccaaggagggtttttttttttaagactcttaaactcaaaactctgcacaaagatttcagtttcaaatgtgtattatacatgggtagaaaagtgtttgcacaggcaacttttggaagtgtttaagaatcagggtnnngnngncnggngnnaccgggtgggggcaatgctaaattgtatttggaaactaggaaaaattatgaaaccaaataaattggttttgcttccttgccatggattctggaaggacatagttcttctaaaatttcctgttaattgg

SEQ ID NO: 656078 - DNA, 237 bp, Homo sapiens
tgtgtataataatttatagccaataatataacatgttttgatacaggcatataataatgtattagtcacatcaggataagtatctattaccttcagcatttatcctttgtattacacagacccattttacacttcattattttaatgtaccattaaattgttattgactacagggtcattttaattattaaaattatatagaagtattaattaagtccatacattcctgagtcatga

SEQ ID NO: 656079 - DNA, 1594 bp, Homo sapiens
  misc_feature (461)..(461): n is a, c, g, or t
tgggctctagaagggggtaaagggggtgctatagggtaaatacgggccctatatttacaaagattttaaggggaataaatctcataggacgagtgggcatgtgaaacgtggtggttgtgcttccacgaaattttcagagcttgtgacggatagatataccccgcggctcggtgtacggggtgaagaggtggtgtgggttataacacgtctccggcgaatatgtgccatctgtggtattatataacgccttacagtggtggggacacaagtcctcagtgcagtgtcgcaagacacgctcttggggaagtgtctaactttatatatcacgaacagggggggattataaaagctgcgggaaggtgtactatactctcgagagtgtggtccagagcgtttcagaggagagtgtcgcagaggggtcgacgcgtgtggttgtcataaggaaagaatagagtgggcgngcgaaagtctagtgtattaggagagttgggaaaaaaaattaaagattctacgaccacgaaaaagaatctcgagggggagtcccacccgaagataaggaggtctcaacaaaggagaccaccacgtaggcgggggcgcccccgaagttgtggactagtggaaggtgagaaacaagaggggcggaggggggaaaacgccgcgaggtagaaacacaactggcgcagcacgaggggctcagtggatagtagacgggaaacaggtacggaataaagcgtagataagggagcaacagaggggaacacacatgggagagcgagtgaaccaacagggggcactcgccaacgcgggagggggcgacacagacacacacgagtggcataccaacaaacaccgggatacgaacaacaacaatcgagccgccagaggcaatgcggcactccgtgggacccccggtgcggccacaaggcgagaagtcccagccgacaaccacatggcagactgcgggcacggcagtaataagcaacactctagaccgtacacagagagaacaacccgcaagagtaggcgcaagagacataacagcgaaaacacgaacaaagacaacaagatcgcgcaccaacaccagcagcagataaacaccgtagatgacctcatacaaagtccgccgacggcaaagaagaacagcaacttaaaaaagagaacagccagcagagcaccaactgcgcccttcacccacaccacactgtcacaaacagatgtatgacgaacaccaaaccacaccatcagcaaagacaagcaaacccaccaacacgccctccctgctagcagtaagaaacacaaattcctcacatcatcataattcactcatcacaggtgatgcaagacgacagagaagactcacccgctataacacacacccaccctgtgtcgtccccgctggaggccccactcgccaaacacacgcaaggtccacaccaccagtagtacccactccagtggtcacaacacatcacctctcgctatgttcaccaacgtctcagtcacgaccaccatacagcatctaccactcacgtgtggcttccccaccagaagcgatctttcagcttgttcaaatagataaaagcagacacacgga

SEQ ID NO: 656080 - DNA, 450 bp, Homo sapiens
  misc_feature (18)..(18): n is a, c, g, or t
  misc_feature (97)..(97): n is a, c, g, or t
  misc_feature (166)..(166): n is a, c, g, or t
  misc_feature (236)..(236): n is a, c, g, or t
gccttaaaacttgaaagnaagaacaagttaacaaaggttttaccttgggcaagaacatcttgcaaaggtaagatgtcctaaagaaagattttttttntccttttttttaaagacaagagtttcgctcttgtttccccaggctggggtgcaatggtgtgatcttggntcagcgcaacctctgcctccctgggttcaagtgattctcatgcctcagcctcccaagtagctgggattancagatgcgccaccacaccctggctaattttgtatttttagtagaggcgggtttcaccatattgtccagactggtctcgaactcctgacctcaggtgatccacccgccttggcctcccaaagtgctgggattacagcatgagccaccttcccagcctaagaagattttttgagggaggtaggtgacttgagaaggcactacttgaagagattttt

SEQ ID NO: 656081 - DNA, 120 bp, Homo sapiens
  misc_feature (64)..(64): n is a, c, g, or t
ggtaccctactttccttctcctccaccacaggaggaggaggcacagcagtcccaaaatgacagnttttgagcacagcgacagccaatgcaaccctgatggcagtttaccatgcagcgcta

SEQ ID NO: 656082 - DNA, 131 bp, Homo sapiens
tcggtccgtttctccccgttgcatacttgttttggcaaactacacagctggtggaatcacctctgcctacactgcacctgccccatgagctgaaggaggctggaaaggcagcacacagcatgctgacttct

SEQ ID NO: 656083 - DNA, 840 bp, Homo sapiens
ttagatattcttcagtcttccagagttccaaagggcagtaggaagaagcaatgaaaataccacctgtattctcacatctttcattgttccactcaaaaaataccaccatgttcacttctggtggaacgtttatgtccatgagaagcagtggctttgaagagttttggcagactatggcgccttactcaacattgggaaggtatcttgccatcagaccttttgggtctccatgaaacttcttataccccctctgggaaaagtcactaactgtgatcttactgagcttctaaacacagcattttttttacacttaagtgagcgggggtcctcctcatttgtgcttctcttcttgtaagggtgacttcctcccagtaggatgaatctcatgcctatttgtgttattttgctaattccagcttcttttctactcaggggggttccaactcttttaaggtctcatcttcagcacttctaaactgtgggaaactatgtgaaaacaaatggagtggccaaacacaccattcatcactgtgcttctggacagctgcaagtccatacgtgttctgatgaagtctggctctgttgcccaggctggagtgcaatggcacagtctcggctcactgcaacctctgcctcctgggttcatgcaattctcctgcctcagcttcccaagtagctgggattacagacatgcaccaccatgcccagctaattttctgtatttttagtacaaacagggtttcactatgttagtcgggctgatcttgaactcctgacctcaagtgatccactccccgcagctccaaagtgctgggattacaggcgtgagccaactgcgcc

SEQ ID NO: 656084 - DNA, 891 bp, Homo sapiens
cgcagcgcgggtgtatttgcggcctgtgccgagtaaggcgctggggcactcagtctcctcgtgtgcagagcgacgtggcaggaaatctcgaacccagtggtgatgcgcactcgttaaccctgggactcccagaggggtcgcgaagggcaggataaccggttctccctacagaggggcgggactgtgcgtggacaggtaagggaatgtgtctttttcccacgcttcatttgtgaaattcggcccctccccgcatgtgggggaattccccaaggtcaacttccccacaacgagaagggggtaatcccacaagaccccacgcagacaaggagttcgccccaagggggattgatacccatccacaagtcctgaggtaaatctctttcccaagggtgggaaaccccccaagagttgggattctcccttggtgttacacacaaaaattggggacggcaaatataatgggggcctttcccttgtgtcttccccaaacgatgctgagggtcacatataaaggataaaaccccacaaagctgtgggtggtacataaagtggggtaggtaggagaacacgggacattatttgtgggggaggcatgacaaataggtggaacagaggggggcatttccaatagtacgcaagggcggccgtattaaacacgaggggccctttacgcgaggcaacaccacgtctgcagttggcacacacatgtgtgggtgtagggatcccgtattaaacagataaccccaaagcgtggtatatagtagtggggataggggacaccaaacaaatttttatccccggaaaggaaaacgagggctatgtcaagggcaactagagtgtgccttttaactagaaggaacaaaaagcttccattgaacgccttaacaatgt

SEQ ID NO: 656085 - DNA, 197 bp, Homo sapiens
tagatcgagccggtaccagacgtcattctgcttctattaaatatttttaactttttttaggatttccacactcaaaagaatgaaattagccagggtggtggctcatgcctgtaatcccagcactttgggaggctaatatgggtgggtcggttgagctcaggagtttgagaccagcctgggcaacatggcgaaaccct

SEQ ID NO: 656086 - DNA, 1407 bp, Homo sapiens
  misc_feature (600)..(600): n is a, c, g, or t
gagagagagagagaactagtctcgaggtttggttttgttctttatttgtggggggaaacaccatcctctaggggtatttccccattggttccactgactttcttccggtgggtgccccttttaactctccgaatggcttgaaaagccgagaggattatctccccgagtttttttgtggagggcttgagagccgtgctgcaagtgtggggaagttgattagctttacaacaggctccatagctgatactcaagtagacgtggtgggcgtggacattttgtcattttatctctcgtgtgacagatctccaagagaacgaaattattcgtgggtgttattcaccaaaagtgcgaagacgtggttctctcatagtgcgtgaaactccctcacaaagattcaccgagcctcttccacgcttcttctgtccgatccttttcacaagcgtggttttatatcgggacaacttcgagaaagacgaagagaagccaatgtggtcgcatcacaatgagactaggataactccctcgagaaggaaagtgtgactatcccctacttatactctccgtgagcgtgagtggtgtctcgcgtatcccccgagaganagagtttaaagagctatcaacaataatcgctttcaagacgttcttctcctgggggagagaaaattctcgcgtgcacccgtgaaggcgagccaattgttctgtactcccatcttgctcgccttaaaaaaaaactcttgtgtaagaaaaaaagcggattatatgtgtcaatcgtgcgatgtgaggatatcagcagcccaggtcgtgaaaaaagttccactaggtgactcccttcaacaacagagtctagttgcattccaccccaattcgaaaaaaacaacatgtttctacttattacgttaccagaggggaggttacaatacacattaaacgaccccagtgggtgtggagccccccttgacaagaggggcccctttgtgaaaaaaactggttgtacaaacgtaggtgtcccaagggcggatccctttatcccgaggtatttaacaagggtaaccacaagggggtactatacagcattcggggagtttagcgcccagggaatattccccggcccttcaaaacgggccccgcacgaaaatcgcaccagaattagacttctggaaaaaacactatcctccacggagcatcaagggatcgaacaggattagattttgggaccagaaaaatatctaccccttgtagttaaaaaaggagagaacccccccgcattcaaactcttgggaaaagggaaaacgcgcagacttcccattagaaagaggcattaattcccccaacaaagttctccacagaaaaaccccaccggggccttggagaagggcaaacaagtatgccactccaacagtaacaacc

SEQ ID NO: 656087 - DNA, 438 bp, Homo sapiens
  misc_feature (316)..(316): n is a, c, g, or t
  misc_feature (328)..(329): n is a, c, g, or t
agcaagtgggcacgtgccgtcccttccccattttagaaatgggcaaacaggtgtgagaggtgtcctgcaagggtttccacctgatggctatgttctgtggtagctcctgcattgggagctactgcagagtgactccaggttccggaagatggaccggcaagcagtctgtcccttctttgatcacacgtatattccctaaagacatgtatgttccattctctccgggcttctaactggttctccctgcccatggtgtgtctccggcttctgtgccttgctctctgtactgatggctcccacagggacctgtaccaanctctctgcaganncccaggctctcctgctgtacctttctgttcacagttcagtgtatctccagaatggagttattttccttcccttccaaccttgcttttcccccggcgttcccattgctgt

SEQ ID NO: 656088 - DNA, 378 bp, Homo sapiens
  misc_feature (202)..(202): n is a, c, g, or t
  misc_feature (205)..(205): n is a, c, g, or t
cgcatgaaaatacttgtaagcacacatgatccctttgaattgttttactttccgggaacggcttttgcttttaaaaattgaaaaagttttaaacagggctttcatttggtcacccttgcaatccattggggtttagtttggaatttgacaactggaacaaaaaaacccttgaatccggggcatcccttggttttggtggtgntgntgcttcccaaagtccctcaccagggattaaaaaggaacccggtgtgcacagcaaatccccgaaattggtgggtttgccctcctggcaaattgttgggtttttccacttgctgttcaggacccctaaatgttgaaatgtggatgcatcccgaaataaaagcaattcattgtgta

SEQ ID NO: 656089 - DNA, 1043 bp, Homo sapiens
atcgagcggcgggagcgagggttcagatatgggcatctgatgaaggtgacgcatgagtccataaccagacctgcctgaggaaggggaagggggtaatgccttggagagtggagtgactcgagatgtgttcttggtagtcccagcctggggtagtaacgtgagccatggggcaagagtagccttgctcttggatgaacttgcaagataatgtcactccggaacataaagccgactggtgcaagaaaagctcacgtgtgccggcggctcgacgaggctaaggtggacccctatgtgctgtctagtccattacggcatgaggccatgatgagtacagcctcttgtatagtgtgcccagatcggtggtgaacatagctctttcaagtacaatagccgtgccaatcctgtaggaaaccatcatcgcagacggcaatccacagcatggctggaagaaggccatataaacaagggttactgaaactgtgagcagagagactgtctgcgaggaaagtttgccaaagcacgaattccgggccaacgaaggcggaatctcaaccatgggaaggaagaaaaacacgtatgataaatgccccaacgtgtgaccaggaagtacggcttacgaggcgaggcggcatcaaggatcacgtacaaccagcgacgagccagtcaagggactcaaccatagggacagaggcgtggaacaatagcgctgacatggatgtaacaaaatcgtgtctgagtcgaagagggaggcctatgttcttatgtctctagaggagttgtgggcaccagaccgttgagccatagttttgctaaatctatcagcgagagggaaccccatatccctggtgggaaaggcccaaatgcagagctccccatagcgaatttcgtgggcgtgtgtagaccaagtagctaggaggaaagcgaaggcatgaccaaggacagtcaacgctataggcttcgcgaggctctttctagggggggattgcaacttctgacccgggatagcccgcaacatagcgaaagaggttgaaagagatgagaag

SEQ ID NO: 656090 - DNA, 300 bp, Homo sapiens
atgagtatgaactgaatttaaactgggcacaaattcaccctccttctcatcgagaacatttaatggtttgcagcagttcatgttttggcgcactccaacacacccatccgagccttcttctcatcttcaaatgctcttaaagtaaacgggatggcatctaaacgccttttcaactcactgaagaaggcacgtgaagttttcatatttcagtccctactgtttagaggggtctcgtttgtaaatagttgttctctgtcctgcatcctttggcttgccctctcctgggcggtaaaaagcttg

SEQ ID NO: 656091 - DNA, 236 bp, Homo sapiens
gcatcacacacaccttttggcatgcataattttatttctctcaggtaaatagtcagaagtagaatactggttttatcctgtgtgtatagttttgtaagaaactgccaactgttttcggtatcattttgcattcccactagcaacggatgagagttcaggcgtccacatgcttaccaacactcgataatatgaggttaaaaatgtaggcatcctaatggatacaaagtcatatttca

SEQ ID NO: 656092 - DNA, 108 bp, Homo sapiens
atgtgctcactggcagctgcagctatgtagtgcttctttctagcctcaagttcagaaacaagctggactatctcagtgtgattgaattttcctgctgtggaatcatag

SEQ ID NO: 656093 - DNA, 168 bp, Homo sapiens
gtctcgacaacacgctcctgatgaagaccttgcagcagacttacgacgattccgcgcccactagaggcctgcgtcacttcatgggccgtcagtagtcccgaggccagcacaccaacgaccacttggccgccgtggccgcaccgacgggtcatccaagagaatcaagct

SEQ ID NO: 656094 - DNA, 201 bp, Homo sapiens
tcgtgggtgattagaggatcccaagttagcgggagttactgtgtgaagcggcctcagtgctgatgatcgaagaagtgaagctgggaggactctgtgaggttgtcttggttgtagtgatcaaagaagtcaagctgggagtactgtgggatgtggtctcaatggtggtgattgaagaagtgaagctgggagaactgtgggatg

SEQ ID NO: 656095 - DNA, 307 bp, Homo sapiens
gtactgataatgagtgctagctatactgctggacagagtcatggttggctgtgtagataggagtcttgctccaggcatcgcagattctcttcgtcatttaaaggtgtggatagagaaaacctcttcggccctggatggaacgtggtccttatacccatgacaggaaaaccaagtctgtacccaggattgttcctttttaccactccttgtagactggtacggcctgtgcagaacttagcattgggcaaagaagagctaattggaactatggaacagatcttcatgaatgtcgctatctttgaggatg

SEQ ID NO: 656096 - DNA, 331 bp, Homo sapiens
  misc_feature (38)..(38): n is a, c, g, or t
  misc_feature (124)..(124): n is a, c, g, or t
  misc_feature (246)..(246): n is a, c, g, or t
acatatttttatacttaaacccagttcaaattgatttnaggcttaggaaaataagttaggtttagttcagtatgtggtttagaaaatgtgtacacttattctggcttccagctaaaactgtggngtgtttcttgcctctgaattggacagatttctatgtttggcctgtattgtggcaatggtgtattattttgttcttgtcagttgcattcatcattattttaaaaagattccagaaagcctggngttacagttagcccaccttgaccctaaatgctgcactactgcattttgaccaagcattgggatcataaaaattatccaccttctg

SEQ ID NO: 656097 - DNA, 114 bp, Homo sapiens
atgtatcatattacattagctcacttgtccatgctcatttgaaaacaatcttatgcattatccgcaatattttgtcatggcttctcatagatcgatctaacttttgtagttaca

SEQ ID NO: 656098 - DNA, 1125 bp, Homo sapiens
gcggtagcccagtcgagatggaggaagatgcgacggcagacggattacgctgggaacgatggatacgacctgggggctgcggcctagacggtccgggcttggacgttcgcctcagaccgcggtggacgccgccggacgtctgacgacacggtcttcacggcacccactggacggaccaacaccgcaacgcatccagactcactcgacgtgtggacaccaccctggaccaacgccacgaacgttctaccgttgattatggttgttggcaacttgaccaactgactgactcctgtgtcacgatgtctaccccacttcaccccctcactccgcagcccgtgtttgcaacgttcacgacacggggacacgacgcctctacccacttgggaccccttcgactcgccttgcctcacacgactcctggcgacggcacgactggtactcacctgtggcctctacccgacgggattcctgtgtcacatacctatcaccctcactctctggaccaggtgttatgtcaccacattatgagctcacaccggaagataggtacgctgacctacagaccagagtaacacagtcaacactcacttggtggcttggtgcgctcagcctcccattgatggcccagagcatcacagttgcccattggatgtagatctcccagacaccttgatgatgcaacgcaagggtgcgaaacatgggccggctctcaagagtgcgaggggaacccagacgggaccaggcggtcaggaagcctctcggccaacacaccggacctccatcacggcagatacctgcagcgcttgcatggacctcgccggctcctcatcgacgccaaagtggcatccaacagggtaaaccaacataataccaaaagaagtagaagactggtgagcactgatcaccatacccactcaaaaacacagtacaacaaacaggggggccaacaggcagggccaccccaaggagactacccacccggcaccggcgccccggggtgtgagaccaacgctcccacacagacaaacacccccgagcgcaagccaccgggtgacaataggggcacaccacaccctagacctacacactcggagccacgcgcgagagaccaaagggctcgaacac

SEQ ID NO: 656099 - DNA, 348 bp, Homo sapiens
ccattgatcagctcaagacatatcatgtaacgttacattttattttacatctcacaaatatgtctgccataattagagcttcattaatgctgtcccacttggtaaacagcttgtcaatataatttacagtataagaagatgtgatggggcataatgaacttgtatacttcatcaatcgactaagaaagataatagggccttaataggaacacagtgggagttcatgaaggaaagagttcagaagctctttcccatgtggcccccaaatggtacacaaaagcaaaacacacagagcgcaaccgcgggttctctgagggaagaaaaaacgaaaagtgatcatccctgagc

SEQ ID NO: 656100 - DNA, 519 bp, Homo sapiens
tggatgtgtaaaagggcttatatttgcgggggagcaggaatttaatcaaaagggccaaatctcccatgtgttcatcattcgtgactcttaagaacctccctcctttcttctcattcttttcttctccttctgtgcgtgcagcaggggcagaaccagcagcaggggctgcagagcctgtggggcagcagagacggcatacagccccaccagcgaggtacactgtggcaagcttgccaattacccgtgggcaagtgacgttctctcaaggtttttcccattctcagctcacgtgattacccttgtttgagccggctcgtcgtccgcctcgatacccagcgcgtgttccaagaatctctctggagtgctcctgtggccctggggagaggagtggccccctatggggacacgccagcagggtacggaggcagacagtagcgacattcgacggcggcagctccttgcgagcggaaaagctcctccaacgcggtgcaaccctcggtgaagagaacgacactagct

SEQ ID NO: 656101 - DNA, 900 bp, Homo sapiens
gagacgttcttcgccgagagtcgtcggcggtttcctgcttcaacagtgcttggacggaacccggcgcatcgattcccacaccccggaccggccgcccatagaccagaccctccgatcacctcgttcaccgcacccatcggacatgcacccaaggcccccgccgccgactccagcgccgacgcagcacacacgccgaacgcacgacgaactctccattagtcgaccgcacatgacgaccgcagatccacctcgcaggtgcgccagaactaccaccaggacatcagaggccgaccatcaaccgcacagatcaaccgtggagcgtctacgccatcacaagtacgtgtaccatgatccatgatctctacgtacttggaccgcgatagatgtggccttagacagaacatatagcacaaatacctttcttcacacaatctcatgaggacgagggaacatgctgcagacaacctgatgacggctgcagaaccaaacgagggtgagacgaaatctgtccatttacaggatatcaaggaaaacagacttgtgatgactgggagagccgggatgaatgcacatggaagtgtgcaatgacatagggcaaaaaactgtgaatcagtcaactacagggaaaatggcaacaaaaaatggcccaccagacaaaaagctgaaccccacaataggcgcacgaacgccagaagagcaccaacattaaaccctggaaatggaggacagggtgcgaaaaagcccagtcaagaggaacgcagggagtcggaaccacgaatgaagccaaactagcagaccaagcatggggaaggagcgacggagagcagggaatgggagggaaataatagaaagaggagaagaaggcacaaaccgaaggggagagaacagggcgataaatga

SEQ ID NO: 656102 - DNA, 101 bp, Homo sapiens
acatcaacatcttgtcagactttgaactcttcaatctcttgcactccaagcttgttaagatagttaagcgtgcataagttgcccgccaagtcgaatggtgc

SEQ ID NO: 656103 - DNA, 106 bp, Homo sapiens
gggtctcagcgaagcgtctgcgaccgtcgtttgagtcgtctgctggccgctgccgcgtgccactgccactgccacctcgcggactcacggacgccagcgttgttcg

SEQ ID NO: 656104 - DNA, 778 bp, Homo sapiens
  misc_feature (32)..(32): n is a, c, g, or t
  misc_feature (117)..(117): n is a, c, g, or t
  misc_feature (138)..(138): n is a, c, g, or t
  misc_feature (140)..(140): n is a, c, g, or t
  misc_feature (147)..(148): n is a, c, g, or t
  misc_feature (150)..(151): n is a, c, g, or t
  misc_feature (156)..(156): n is a, c, g, or t
  misc_feature (164)..(164): n is a, c, g, or t
  misc_feature (177)..(177): n is a, c, g, or t
  misc_feature (181)..(182): n is a, c, g, or t
  misc_feature (185)..(185): n is a, c, g, or t
  misc_feature (190)..(190): n is a, c, g, or t
  misc_feature (192)..(192): n is a, c, g, or t
  misc_feature (228)..(228): n is a, c, g, or t
  misc_feature (236)..(236): n is a, c, g, or t
  misc_feature (243)..(243): n is a, c, g, or t
  misc_feature (440)..(440): n is a, c, g, or t
  misc_feature (442)..(442): n is a, c, g, or t
  misc_feature (459)..(460): n is a, c, g, or t
  misc_feature (479)..(479): n is a, c, g, or t
  misc_feature (589)..(589): n is a, c, g, or t
  misc_feature (639)..(639): n is a, c, g, or t
  misc_feature (660)..(660): n is a, c, g, or t
  misc_feature (674)..(674): n is a, c, g, or t
  misc_feature (778)..(778): n is a, c, g, or t
gaagagaggaagcccatttccaggccagatcnctcaaatggcccattgagggtcattgctgccctttttcttcccttgctgactggcagtttgtagaacaggggatccatctaagtnccctaagagaaggtagagctncngactggnngnntctgnccctctgnctcatcccatggntggnngcncattngngctgagttaggagagagaaatcatttaatgtggtangccagttngatttangagctgtttaacatactattttgttatgttatgagtagcattcagattgcagatccagcttctgaataagctcaagaactttaacttctatccctatggcctatgcccaggggaagatgggacttaaagggtgtttgtagaaatcatggtagaaaaacttacatacatatgtgtatatatatatatagatacaaaananaactatacatatttaannatactgcgcggcttgctgngtttcctgagcaggagtggattgcggcagacaaaaatcagcaaatgccccctgcgtcctgtagagagggcctcgccaatcccctgattccataagctcttgagatctgcnactggtttctctggagtcatattgggatccctgaatcatctgcagcctgngtgtcctaaagagcaagccanatagctgggggggnagaggctcagcggctgggataaggctgttctcataagggttggagtaggggcatcggataagcccccttggctccctgggagtccctgagctgtagtcagttgn

SEQ ID NO: 656105 - DNA, 204 bp, Homo sapiens
tacctggactcagtcggctcatggatacgctgggaggaactcagctcaggtataacgctgggaagaactcaggctcagagtataaagctgggaggactcaggctcagggataaagctgggaggaactcaggctcagggataacgctgggaagaactgcagcctcttcttccctttcttggtctcttcagaaggcttagggcttg

SEQ ID NO: 656106 - DNA, 108 bp, Homo sapiens
tcagtaatgcggagcacagtaagggagttcagtaagcgcagcggtcacgcctgctgggggtatgttgttgttggaagaagaggaggcgaggaggtgtgcatagatctg

SEQ ID NO: 656107 - DNA, 285 bp, Homo sapiens
gagacggggtctcacgagaggaaagataacatagtgaagatcccgccttgggggaggctgaaccacccaggcctccattgccaccttggctggcagggcaagaacggtgtggtgtggtcttagctttaaaacagtcacagttctagctctatcatagatgaacaaatactttctggatcattctgtaagaccaggaggtgggtaagagtgactaaccagcctaactttaatacacatgtataaagatgtccacagaggaacagatgctctgtagagaatcggcta

SEQ ID NO: 656108 - DNA, 178 bp, Homo sapiens
gggtgactctgaggatcccccacatcatcacatcatcatcatcaccagcagtcatcgtcatcatcatcacatatcatcagtcatcaacatcgaccctccattaagctctacttttacctacgcctaattctactccacctcatcatcagtatcaccatcatcatcatcatcaccatca

SEQ ID NO: 656109 - DNA, 373 bp, Homo sapiens
cctccttacatcaaaaagatctctccggtgtgagtctctcgtgattcgaacagaactgcgcactaaaggctttaccgcactgtttacattcgtagggttctctcctgtgtgagtcctttcatgtattttgaaagtttgggagaataaaagcctttctcacatatactacatttattaggtctttctccagagggcattcttatgtgtttttctgtcctttcatgaatttggaggtggttcacatatttgagggcttcccacattccttacattcatagggtttctctccagtatgagtcctaccatgcactcgaaggtgtgaggtagatctgaaggctttcccacattccttacacactgggttaagtaagca

SEQ ID NO: 656110 - DNA, 128 bp, Homo sapiens
cgcatacggttacatttattcttacaagtcttgccctccctattgagatagtgatactacctccggtttctcatgaatgttcgttcggtcgctcttacaggaaacagttgtccatgtataggagtcaa

SEQ ID NO: 656111 - DNA, 638 bp, Homo sapiens
gcttgcgtccccgcgtgtgtgcgcctaatctcaggtggtccacccgagaccccttgagcaccaaccctagtcccccgcgcggccccttattcgctccgacaaggtacaaaaaggctctggacggcggcgtggtaggaggacgggagcgggggcgggaagttccctgaaggagcgagacagggagggacagggcagaggaggagaggaaggcgatgcgacggacagggcgcaacccggttccaaggctctggattcctccggggccaaggccaacccagggcgcgggtggcccgtggggcggcgagcgcagacgcgtgtctacactctccatctcgcggcggacacccgaggacggggcacgcctcatggatgagcagaaacaatcatgaaccaggaaaaactcgccaaactgcaggcacaagtgcgcattggtgggaaaggaactgctcgcagaaagaagaaggtggttcatagaacagccacagcagatgacaaaaaacttcagttctccttaaagaagttaggggtaaacaatatctctggtattgaacgaggtgaatatgtttacaaaccaaggaacagtgatccactttaacaaccctaaagtcaggcatctctggcagcgaacactttcacca

SEQ ID NO: 656112 - DNA, 219 bp, Homo sapiens
aaagttttattattcattctgcccacaggtacacccttaggtccaagagggtgactatctactaagggtaaaagtactacggatacttttctcatgttctgtcctatgacccatctctgccctcaggatactcccaagtctagacataaagacagtttaaaaaggacaaggaatctgggcacagtggctcacacctgtaatcccagcacttttgggagg

SEQ ID NO: 656113 - DNA, 135 bp, Homo sapiens
  misc_feature (126)..(126): n is a, c, g, or t
gaaacaaacaatacaacaacaacaaagaatgcaatctgtacttttcaacacctacccttcataggaccttgcttggtaaagtaacccccactgcaaaacctgtaggaaagaagatatttacaaagngaatgtgca

SEQ ID NO: 656114 - DNA, 99 bp, Homo sapiens
  misc_feature (29)..(29): n is a, c, g, or t
  misc_feature (39)..(39): n is a, c, g, or t
ggcccacgttcactgagtagggactgctntagccggatnttaccggcggatctccgatgaggagagatcctgcggaggaggattgtcctgaattggttc

SEQ ID NO: 656115 - DNA, 1248 bp, Homo sapiens
  misc_feature (778)..(778): n is a, c, g, or t
gttttttttttttggggctgtcaattggtcagtccagtgtttaaaatctagacgcaggcttatgcggaggaaaatgtttccatgtcacttatactaacattagttcttctatagggctgatagattggctcccaatggggtgtgaggagtccagtcatatgttcggggattcttacacggtcagctgggtgtacgacgcttgaaccgcttactaaatgaggtaggcctgcttatcaggcctactatgggtgttacacttttttactctctctacaaggtttctccctagtgtccaaagagctgttcctcttgggactaaccagttcacactttacacaggggattcacacgggtcctgtgggcacacattcacacagctcgacctacagactcctcatcttggaccacaccagctatacaccaggctacggacaaggtaaagcacgcccatccaaccctattacactccttccccactaatatctgcgcataccaatacacaccggccagcaagcccctatcacaaccactgctcctaaacgcgtagcccacgccataggctataccagcggagcgacacaaccctatcggcctacatcactatgccacaagctccacgaacgccatagctagaaactccacatatactgccccaaacacggcaacacacgggcgctccaccccgccatcgccaagcacacaaacacagaccacagaaccaacaaacaccaccccacatccactaccacccagaccagcaaccagcaacgacaacggnaccacagaatccccaaccacccacacgcgccaaacaaccgacaaacctacgcgccaaacacaagcagcggaggaccacacaggacgaagaacaagagctaaacaacaagcaggggcaacatcacaacgccaccagaaacacaacaacacaggcacacacacagacaaacaccccacaccagcacaaggccccaaccagcgccactcaccacgcaagcgacccggtgggcaaacacaccacggactaggagactccacgctaggacgcgtaagcgacccacgagatacacccgccacacaaaccataccacgagcagaaaagagaaaacacgaggcgaccgaacgcagcagacgcgacccacacagcatagagaccacaacccacgccaacacccaagaaaacacaaggcaacacgacacgcgaccccgcagcacaacacaacgacgacgcgcagcacgccgaaacagaac

SEQ ID NO: 656116 - DNA, 233 bp, Homo sapiens
aaataattcccttttgccccttactcttcccccctttttttgcatgaagtcataaaaggtatggccggtattttttggcttggaaaaaaaaaaaaatctatttttgccggttgaagatgggatggaaaatttttggggaacatggatataaaaggatattttttggaccctccctatacccatatccctgctgattcccatggaaaaaaattaaagttttttggaattttcca

SEQ ID NO: 656117 - DNA, 195 bp, Homo sapiens
tatactcggactcatgatgtatatgattcgccgcgctacttatgctccctgaatactgccacaatattgtttgcaggacggactgggaattaatcatccagcacattgtccatacctgtgtcacattcttactccgacaacaccctcatgttcatacacctatcccccattcagcctcttggacacgaatgttca

SEQ ID NO: 656118 - DNA, 406 bp, Homo sapiens
gtaatccgaccggcttacaaaagtcgctcgccttctccaagaaaatccttcatgttgactatgtaatatactacaccactatctgcaccaggcaacttactccatcattgatgatgctacaatgagcgatggacttcctgcttaggtaactaagaacgaaaggttgagttgcactgcccaagcagttcgatgacgtccattgtggtgacccctagcctttaaaggagttagcttacatagaccagctcagtctctgaaacctcaaatagctatggaccatgaacatgaagatggacttggatgggacaatggggatggtcttcaaagtgataccagtgctgatggagcacaatttgagttcgatgcagccactgtcagtgaacacacaatgctattagaaggaaca

SEQ ID NO: 656119 - DNA, 1027 bp, Homo sapiens
attggactcttcatgcctcccggccgcaatactgccacgatgtatgcctggagtgcgatgcccgggatgcatccgtggacttgagtggcttggttctggtcattgaacctcctcgatccgcacagacgtgcctggcatagcccccgagagactcgggcgatccttcgcggaatagccgcgtcctccatctcgcgcgagtgaggtgggcatgacatcaatgggataaactaggaattcaacgggtccatacgtggtgagccacgtgcatgaccacatgccccattggatggtgctgccatgaccgctctgatcgcgatggccgtgtgtgctcgctttctcccatgacatggtacagcggaagggacagggactgtgacacataaacacaagagaaggccccaatacacatagatgtttgtgccttgtccctgtgctagtctccccacatacagaagtgcaggccggcgtactcgcgttacaaaagcgtgccgttgtaccgagccctgtacaggggcttccggaggggcttaccacaaagaacgggaagtgatttctgtaagagctggccccactttaaccctagtgatacacggcctcgcgcaggaactgattgtgtagcgcagaccacccccgaatcaccatgaccggaacgaagccgacctagtaagatgcgcacgtgcgcgaggggaagggtgcgaaagccccacagtgaagagcaaggccacttggagcagcatggaaacagcgggatcccatagaggagtacacataccatgcctagggcatccaggtcctcctagttgtttcgccccttatcagggcccaaactaaatatcccaacttctggaaacactcgtgggattgagccaaagaggtgccctatgggtcacaaaccacggaaggtactagggagttaccgagacgtatcaagagggacatatcgcagtcgtagaaattgaaagggatgaacctccatgggccaacaacttgaggtcaaaagagaagaggccattacagtacttccaaa

SEQ ID NO: 656120 - DNA, 813 bp, Homo sapiens
agcgtgcgccagaggtgccgctggagtgttcccgcggcggcaagagggcggcttgccaatgctggttggccccccgggcgtacagaccgcgtgccgctcgctcgcctcggtgagaacacttcccagggccggacctttagtcccccccgggggaccccatgggggataatgatcccggacgctgcagccccacaccagcgggcaaaaaaaggggggggtttctcctagaaacgcaggcctcgatcaggcgccgccgacatccagcaagtggtgctgagaccgcactgaggcgtccccacaccctggggttggccttcgctgtgcgcgaaggcgagccccccccccagcaagtttgttgcttcggcacgcgctgtctcacctcgccccattggtaaaatcttgggcgccagatggtctaatcttccccccgacacacttctttgttcgaagcggcttgggactcctccgccagaagctagaagtagcctttcggtgcagtggcccccaccgcaccccgcgcggggggagtaagcaattgtgttgactccccacgcaagtaaaagaacaatattgtagatgatcgcggggccagcgccacaacaggtgtgtccacgcgaagacttgcggcgattccccgaacatgttctcccgcaaagaagcactaactcattttcttcagccttcccgcgggcaggccatcgagcattggttgctcgtcgtggtggggatcgtggtaattattactctcagccaaatcggggtgtttcaaacgtccatagaacccgcatatgtaaaagacggcgcaacaaaaca

SEQ ID NO: 656121 - DNA, 1822 bp, Homo sapiens
ggttgcgtatggggggaccgtgttgatgtctatagacgcgttcaggtatggctgtttgactcagggtggaccttatttatatacgcttaagagcgagcgcagacgacattaccgcgagtccagcgagtcagacatccgctcacgtcggtgtgatccgcgtccagcttcgacttgtgctctttactgtccatcgagacgtgggagggtggtaccgcaataatcaagagatccttagactggagcaacagatcttcgtgtgtagaccgtgagcagaaggagatgaggacgagtacctgaacctctctagatgactcgttgaagaggaatatcatatcgtagatccacattgtcttacctcttagcacagactagattagccagaatctaaccattcgtgggctggcccatgaatgcaaatacacccgacaaatgtttgtggttactgtaggataacaacgcattatgccaaatgagtatccttggaatgcgagcatagtgacattgagcgattctaattgctgtccatttaccctaagaccggacaattcaatttatgcgtgccccaatgatcactttgtggaatgcacagcccagggatgagcgtgtgtaatttcctacccaagttgccctagaatgcgtaagcacatgttccatgcgagttccttagggtcatttgtgttatacgctattgagtcacgccgtactaactaaaggctggagattagaggttccccctatttggggaaaagactaaaaaaccctttatgacggcaaggtaagcgtttaaattgcggaaatgggctaccccttttgtaactgattacaacaccgctgaagacggaacacgatggaccctcctctccataggggacggttgttgcttgttgacacccctaataggacaaggccacatggcaccacatttttgtcggaatgcaatagctacgggttcaaggaaaccattttcggttacacaatgacaagtctctttggacataaggttttttccgtttgttcaaatctacaacgtttgttacaggtgagggtgacatacatcccttagagagacaaggggaggctttttaaggaaaattcacaacgttgagaggagttcccgtgtccaacaagaggcttggactaaaatcacatgccggaaagggattaatctccaacaatatccgttggttcatccaacaggtcataattgtcctcaccctaacattagcgttttctaatatccttgcccacttttttgcaatcattgtggtcgacccaccggttctttgtggtggacatatcaaaacacaaaagcgttatccctgtcggagagcgcagacgaaataaagaacatggggaatctctcatgtaagaagatttcggaggcacaggaagatattaccccaaaagagtgagattcccgtataataagtttgaagacaatcacgcctagaagaaagtgtggagcgtctgtaaaaacaccagatgtaggaagagaagtcaaagcgacctttaaatataaccgaacggcgcataacaaagaggaaaagaaaagtgggtgaccgacgaaaccacagaggcacccacgcatcagccaaacctagtagcagatagaaccagaacagccacaagagaggagttggagcagaaagaacaaccgagactgcatgcacgaccaactgcaatagccaaccgagcattagcagcaaagacagagtgtagtccaacactgcagagcagcaatgagtccgtagcgcacaatacatgacaatcatgcaagcgacatggcacgacaacaacaagagcaacaagtgacagaatgaac

SEQ ID NO: 656122 - DNA, 114 bp, Homo sapiens
caggttctttttgcacctttcccagacatgcaaatgactccaagggttccatcgtcccctcctgccctgtgtacctgcttgcctttttcagctgccccacctcccctgggctgg

SEQ ID NO: 656123 - DNA, 590 bp, Homo sapiens
aagatttaaagaaggaagactgaactaccccgagcaagaatcccaccagcacacaaacttacgactctgctgcgcgcaatcctgagtccccagcctgacagacccgacctgcagatataggactcgacaagcctccacaatctctctacatctctatatcctgtagctatacgggcttctctgaggaaccctgactacatacaggacacattttatttatatgagaaacatactagaaattttatgtcactaaaaagaaaatcttttcatttctatgaaacatctttcacttgtccatttttgatagagacacagcgtgaagaagtacttctctactttgaaaaaaacaacaaatggcacacgatcaatgacaactaactctgtggtctggagacagggacgacagggaggagtggggtctgcagtaaattcaaactaatggaggcagtggctccagcgatggctgctgtgtgtgcaggactgtgaggctccgtatagtacagatcttctgattcttcaaaaggatccagaaatctgaatatcttgtgtaacatatccccatttataaacacagcctcaaaaataccttg

SEQ ID NO: 656124 - DNA, 265 bp, Homo sapiens
gccaaaggcttggccaagctgagccacacgtttttcaagacagcctgtgaactaggcacatatccttcccttccagtccataaaaaccctggaccagcctcgtagagagaaccactttcagatacctatctctgctggcaaagagctttcttctcttgcttcttaaactttcactccaacctcacctttgtgttcacgctccttaatctccttagaggtagaacaaagaactctggatgttatctcagactacgagagattttta

SEQ ID NO: 656125 - DNA, 152 bp, Homo sapiens
tgcgcttgttggaccccctatggggtcaccgtgatgttgcctatattgtggtgtgtccagaaaatgaggccttgtccgaagggagccaaacagtttcttcaggtgacttgatgtgcctgtatacgacgactgtgtaggctatgggcacgcac

SEQ ID NO: 656126 - DNA, 165 bp, Homo sapiens
atgtgagtctgagatttagctggaatggcttgttatagttaggggaagtgatctgagtttgaaaaacgctgtgtgccaggtcaccattgttgccccctcgggcgcctctgtttccagttgaggcccccggtggcatcctcgtagatgtcgaccgtgcagtgcgtg

SEQ ID NO: 656127 - DNA, 289 bp, Homo sapiens
gtgagcagtagtgacgccagaatttctgttcccatgactcttgtagttctgtcccggtccccgcaagccccaggaggggaaaaatgtagatacaaaactggtagggcctcaaaccgagttaggcacaagtcccatttctcgtcaataattgatttcatctcccaaggagctgaaggcacgtgcagttacagggctgtgcccgtattcgtctgggtcaagagaagaacacagctttctttagaaggaacatttactttaaaaccaagcaccttgattagatatgtcagtg

SEQ ID NO: 656128 - DNA, 669 bp, Homo sapiens
atgctaatggaactcctgctacatctgacagcagacttttctaggcgaaacatattacaggctgagcagcagtggcatgcacatattaaaacaagctgaagacacataaaaaaatactttcattttacaataatgtatttggcaaaaagtcctttaaacttgacagagaaataagaactttttccgacaaacaaaaactgaggtatttcattaacaacagacctgtcctacaagaaatgctaaagggagttcttagcctgaaagcaaaaaagtgcgtgagcaataagtcatctgaaggtacagaactcaactagtaatagcacatggaaaaacacagaatattataacatggtaattatggtgtgcaaaaatctcaaatagaaagagtaaacaataaaccagtaaaaaataactacaacatatttccaagacatagacagtaaaatagggaaggaagagaaacaacaaaaagtttacaagaatggcaatggagttaaagtgtagagttttaataagttgcttagcttgtatctttgtttatgcaatcagtgtaaacttgtccacaggtctaaaatgacatgttataagatattatattcaagcctcatgatattttaaatcaaagcgtacacaatgccaaaaagtaaagcatagttgttatttacgata

SEQ ID NO: 656129 - DNA, 166 bp, Homo sapiens
tacttatgcaccattcagacttgtgagagtagatgtgggttaatgactgccaagtttgcccagtaccagtagtttattatcactaaaagtcggactcattgatggagtcctgtagtacgttcagtgttagatacagttttttccaccatacatctgttgcttttct

SEQ ID NO: 656130 - DNA, 159 bp, Homo sapiens
gtgcaggccctatataaaagattgttaagggaattaattgttagaccacgggcatgaaactgtgtgtttgctccacagatttcagagcattgaccgtagtatacccccagacgtataacagcgcaagacctttggattacacgtccgggaatagcctct

SEQ ID NO: 656131 - DNA, 616 bp, Homo sapiens
  misc_feature (428)..(428): n is a, c, g, or t
  misc_feature (539)..(539): n is a, c, g, or t
ttttagtttcatcccaacgttttaatatattctctatcattcagcccaagtattttctaatttctcttgtgatttcttctttgacccgtgagttgtttaaaagtgtgtttaatttctgaatatatgggggctctttatgttatatttttgttatttatttttcacttcagttgtggtcagagaacatattctgcatgtttcgagacccggcttatggtctgtcttggtgagtgttccaggtgcacttggaaaggatgtaccttctactgttttgggatatagaatatatatgtcattgggttaaccctgttcaagtcttctgtattcttactgactttctgtctgcttgttctgtcaattactgagagaggcgtggttttgactattttttaggagcatacacatttaggattgttttgtcttctggntgagctcatccttcttaagctttgaaaaaataataataattttttatgaccttccttgcttttaaataatgggtttcgttcacccctgaagttgtcccctttctcttggcngaggagttttttttgggtggcattctttgtgagtgaaattggtagtagggctcagaaggtcagataaagcaataata

SEQ ID NO: 656132 - DNA, 436 bp, Homo sapiens
ctgatgttatgaagaactgtaaacttcttccaaagtacttgtttcattcatgactccaccacaagtacaacatggttccaattcctccatacttttgccaaacctgttattccctgactttttgttacagccttcttagtgggtgtaaaatgatctctcatcctggtcttggattgcattttcattacggctaaaggtgttgagaatcttcatacgtgcctactgatcattcatatatcttctttgaaaacagtctatccaatccttggaacatttttaaactttgctatttgtcttattattaagtttaagaactatttatatattatgggtcatgtcagatatataacttgtaaatattttgtcccactctgggtgcactaaattttactttttgatgttggtctttgaagcacaaaaaatataattttaagtt

SEQ ID NO: 656133 - DNA, 653 bp, Homo sapiens
atgatcctgcattaaaccaaggacagcatcaaaggcacgtactggacagcgaagggtacttgctgttctatcacaaacagatcctggaatacgagtagccttatctagcagctggtcagaaaaacaaaggcaatgcattggcaagacctcacaaagtgatcctccctggccgcaccatcaaacaaaagaaaccaaacgacaacaacaggacaagagagaacacacagcactcacagagcaacgagcaagagacaacacagacacaaggaagacaacaacagaaacaaacaagggactacacaaggcaacaggagacaagcagacatagaaacataaaaacagcaacaagcaacaaaaaaaaaaaaaaaatagaccaacacgccgcgacgagcagaaacaaagaacacgaccacacataaagaaaccaaagcctcagaccacagctcgaataacatgcacacaagcccagaagacagacaaccagagaagcagcacacgacataacccccaacactatacacccacctcgcatccctctacacaaagcaccacaacgagcacttaaaaaaatacactatcatgaaaagaagaacaaacaacagtaatacaaacaaaacctaacatagaaaacaaacacaacacatagtcacaga

SEQ ID NO: 656134 - DNA, 188 bp, Homo sapiens
gcagtatcaacaaaccatctaatataacgcaaataatcactgaaactccacccacatcttaaacctgggctaaactgtcttatacctttagcctatgaacgttgcgggcggagaagaagagatgagtatctcattttgacgcgacaactcaataattcggtcgtgagcctctagcagtaagctctgag

SEQ ID NO: 656135 - DNA, 164 bp, Homo sapiens
attctcttcgttgtctggtgactgcacattcactccaccaccaatcctaaacgctgtccctggccacctaacgcgattgctgctgcattagacgacccggtggacactacgacgagctccgttgacggagagccttggattagtccgcccccgctggtaggcag

SEQ ID NO: 656136 - DNA, 218 bp, Homo sapiens
gcccctccccccttcctttttcccccccacagaagaggccagggactcccgcaaaggggcaaggttcctccctttcctgcagagtaggcttttgggccccaagcccttccctcaacagagggccctgggccccacggagttttgggatgggaggggtgggggcatgggaaggggggcctccccccccccagaagaactgaataaagattgttgggcca

SEQ ID NO: 656137 - DNA, 578 bp, Homo sapiens
gaggggtggtggttcacccccacctctttggtccaaggcaataatatttctttcacaaatttacaaacgtcaagacctgccagcaataagacaatagaacagcgtactcagctctcgcgtcgggaatgcctctcgcacaaggcattaatgtggattcacttgcacagctgctctcataaaagctacacgattcagaggtaaccctaactatccgcaatcccaaccaaagtcatgttcatgccgctgtcctagtctggacaatcatctgtcactcatccaacacagttaaatacagaatgcgcagtcccagcaacagtgtagattacagcaggcgttctctacctggactcatgattggatttcatttctaaattacatcagagctttcaaagattgaaatacacaaatctgcactacccaagcctccttgcctgtacgggaaacaaatcagaagagcatttattgggaactgacacgtcaggcctcacaggtgctgggcaggaatcacagaggcttgctctgcatcatgtcttccgttaacctgaagctttgggtttattgtgcttgccaaccatcgt

SEQ ID NO: 656138 - DNA, 128 bp, Homo sapiens
ctgctcttgatggatcccatcagttgcttacaatcaagtgctgtggagtacgctgtggcaggatgaatgggacagtttctagccccctaggtgatgcacttgggtgggcactggtggtaggtggggca

SEQ ID NO: 656139 - DNA, 220 bp, Homo sapiens
aaatctggatgacattttcaataattcggcgctcacaacaaaaactgccgtttttataaagaaggaaccagtcaaaggcgcttgcacctgactttgggtgctggggttcatccgaggccggcttcgtcggacagcgatagtcacacccctggccccacgcggagcacagtccccttgaggccttttttgcgtggccccaacttcctgctctcttgggcag

SEQ ID NO: 656140 - DNA, 574 bp, Homo sapiens
tgtggtagctcatgcctgtaatcccattactttgggaggctgagatgggtggatcacttgaggtcagttgttcgagaccaaccagaccaatatagcgaaacctcatttatactaacaatacaaaaattagccaggcatgcttgttatcccagctactcaggaggctgagacaggataatcgcttgaacccaggtggaagaggttgctttgagccaagatagcgccactgcattccattctgggtgagagagtgagacgctgtctcaaaaaaaaaaaaaaaaaaaaaaaaaaaattctttctttctttctttctttctttctttctttcctttctctctttctttttctttcctcccttcctttatctctctctctctctctctttctctctttctttttgagatggagtttcactctcgctgcccaggctggagtacagtggtgcgatctcggcttattattattctccatgttggtcaggctggtcttgaactcccaacctcgggtgatccgcctgcgttggcctcccagtgctgtgtttaccactgtacccggcttgccgtcttctttccct

SEQ ID NO: 656141 - DNA, 249 bp, Homo sapiens
tcgtcatcaccaagatgccacagcaggggaggtgactagcatgggctatatcgtgtaaaatgactgacatgcgaaattattttaatcgatcgcacagaatacttgatcttattgatgcttttttagtgatatggaaaagttgaattggtagctcttcgtgtcctcccttccacgatgtttatgttgcccccaacttgagaggtatgaagcatgtatttggtctgcatataagaggcagagccaccaggg

SEQ ID NO: 656142 - DNA, 1277 bp, Homo sapiens
atggcctcattggtatcagcactctggcctgcaggcctccctgacaccccccttcactgatgcagaccccagctaaacctgcctctgtgccagtggctctcaaatcaacctgtgcctgtgatgtcccctctgatcatgggacttgatgtgaacccagatgcctgcttgacggctctgctggacatctgcaagctcctagaggctgtctgtccctccagccctacctcctctggccatgaaatccccactcagctgctcggcaaggaccttcagtcatccctgtgcccaccctttcccttggcctgggcactcctcctgccaactccacttctgagctttcacccagagggctgtgcaccctcccactcccactgccttgcctgtcatctctccttgcacccagtgcaaacctcctccagtggtctcccggcccatcagcctgtcatgggctggatgcccaaatgcagggccaagctcatgcacctgctgcttatgagcttcagtgtctgcctgatgacctcaggggatccgagctcctcggcacggcagccgaggtcccctacgctgagctcagcatacctgcccagccacggcagacagcatcctcagtcacgagaagtctgtgcttctggaacctggaacatgcagggctttgcagacagagctccatgctacttcctctgcccttctcactccctccaaaatccacactgctcccccgtcaccacctgtgccctcctaattccatcagcacccatcagccactcaccagccatcctaactccatcggccaccttcctaattccttagcttctacgccactaaggcccccaggaagagactatgctgttcactctgatgaccccaggacccaggagtgttctccctgcgtagcaggtcccctctatatgctgttaattcaaaggcactcaggttagtcctgagtcaggcctggatggggatacaggggggaaagttacaaaagaaggatctggggacgggtatggtggctcacgcctattatcttagcactttgggaggctgaggatggaaaatcacttgaggccaggagtttaaggctagcctgggcaacacgctgagaccctatccctaaaaataatattttttaaaaataggcatggtggcaagtacctgtagtctcagctattgggaggctgaggcaagaaaactgagtgagcctgggagttcgaggctgcagtgagcaatgatcgtaccactgcactccagcctaggtgacagggcaagaacctgtgtct

SEQ ID NO: 656143 - DNA, 377 bp, Homo sapiens
tccacttactgcgacctctgcctctcgggttcaagcgattctcctgcctcagcctgccaagtagctgggactgcaggcgcgtgccgccatgcctggctaattttttgtatttttagtagagacggggtttccccgtgttagccaggatggtctcgatcttctgacctcgtgatctgcctgtctcggcctcccaaagtgctaggattacaggcgtgagccactgtacctggcccgtaaacttttttttttaactgaggtataatgtacatacagaaaagtagtttaattgtaaggtgaccacccagatagagatatagaagacccagaagtctttttttgttttttgtgacagagcaagacttgccctcaaaaaaaaa

SEQ ID NO: 656144 - DNA, 277 bp, Homo sapiens
ttagtgaattgtcgaagtgagagtgaatagtttaagcactaaaaaccctagaggtcagtctaagaagaagcccatttctgaatatatctcaaagaactccaaaaattctcaaagtaattacggaagaaagttaccctcatgactgacaaggggaggggaagtaacactttttaagttcaccctggaaaagcaaccactatctacacaccacaccagacacatcgcacactcaccataccacacactacacacatcgcaccacacacacatcacacac

SEQ ID NO: 656145 - DNA, 111 bp, Homo sapiens
  misc_feature (37)..(37): n is a, c, g, or t
  misc_feature (103)..(103): n is a, c, g, or t
gagaggtgtgagggtgtggccagcctgggagggagtngggacagaggcagacctgggagaggggccggcaagatgggccaggataggcagaggtgcgcaggcngagtgaaa

SEQ ID NO: 656146 - DNA, 479 bp, Homo sapiens
ttgcaggactcggaggagccttacccgacttttactccaggatcacatcaggccgacccctgtgccctcccccaggatccacctccaggtctgcctcctggtccccctcctcgtggagccccaccaaggctacctccccctgcacctcgcaggtattcctccaactcgtcctgggatgatgtgcccacctttggtgccgtccccttggatcgtgccccccctgggctgttcgcatcatctctcttgccaaagcctggggtttgaagtgccccacccaacttgattcagcgacccaaggcggatgatacaagttgcatgcatcattgagaagcaagccacagcatccatcagtgccaagccacagatcactaatcccaaggcagagattactcgattggtgcccactgcactgagagtacgtcgggagaataaaggggctactgctgctcctcaatgaaagtcagaggatgattctgctg

SEQ ID NO: 656147 - DNA, 131 bp, Homo sapiens
gcccagattgagaaagaaggaaggaaacaacaagacctggcactagtgcattctcagtttgtgtttgtttccttccttcttttctttctttcctctctcttccctccctccctccttctttctctttcttt

SEQ ID NO: 656148 - DNA, 444 bp, Homo sapiens
  misc_feature (9)..(9): n is a, c, g, or t
  misc_feature (11)..(11): n is a, c, g, or t
  misc_feature (14)..(14): n is a, c, g, or t
  misc_feature (190)..(190): n is a, c, g, or t
  misc_feature (360)..(360): n is a, c, g, or t
gagacggancnacntctgtcgcccaggctggagtgcagtggcgcaatctccactcactgcaaactccacctcccaggttcacgccatcctcctgcctcagcctcccgagtagctgagactacagatgcgcgtcaccacgaccggctaatttttttgtatttttagtagagacagggtttcaccgcgttancaggatggttttgatctcctgaccttgtgatccacctgcctcagcctcccaaagtgctgggattacaggcatgagccaccgcgcctggccagcaaatcattcttaattaccccagagtggaagagaacaaaggttgaaggacaagagcccaggtttcaggatctgttttntttgggggtcatggacagagggcgaggggaagggagttgaatttgggattcaggcagtggggtgcttccctggttccttccttt

SEQ ID NO: 656149 - DNA, 498 bp, Homo sapiens
tagtaccactagtcacggttggctagttggaaagttaaggagactcagatcactgggtgggtgaagctgagaggtgacagcatgctggcagtcctcagagccctcgcttgctcttggcacctcccctgcctgggctcccactttggtggcatttgaggagcccttcagccccccactgcactgtgggagcccctttctgggctggccaaggctggagcccactccctcagcttgcagggaggtgtggagggagaggcacgagcgggaaccagggctgcgtgcggcgcttgcaggccagctggagttctgggtgggtgtgggcttggtgggccccgcattcggagcagccagccagccctgctggccccaggcagtgggggacttagcacctgggccagtggctgcggagggtgtactgagtaccccagcagtaccagcccaccggtgctgtgctcgatttctagctgggccttagctgccttcccgcggggcagggct

SEQ ID NO: 656150 - DNA, 617 bp, Homo sapiens
ccggttgtgacccgctccgtaggtggtaaattgtgctcccactgcacatccggggggaggttttaacaacctgctttagtatagcccggttaccagttggggccacgccattccactccggaaagttaaccatctcccatccacaggcatctggggccgcctcagccccctcggctctcctaccaggccctggccaagcccggggacccttttcttcctggaggatcccaggatcctagcgatcgcaccccgcccattactccagcccaggtcctgatccggttccccacgcagaggaacttggtggtgatcccccagtctgtgacaccagaacgcattgctgagaactttaaggtctttgactttgaactgagcagcccggatatgacccccttactcagctaccacacggaactggagggtctgtgccttgttgagctgtacctcccccaaggattaccccttccctgaagagttttgaaactgtggttgcctgctcgtccccaagtgacctatacctgtgtttcttgcctcatttttttgcaatccatctgtcctccatgacccaattcaaactgcacctccttcataccattctccattaaaccagctgccat

SEQ ID NO: 656151 - DNA, 1870 bp, Homo sapiens
  misc_feature (560)..(560): n is a, c, g, or t
  misc_feature (565)..(565): n is a, c, g, or t
  misc_feature (567)..(567): n is a, c, g, or t
  misc_feature (571)..(571): n is a, c, g, or t
  misc_feature (575)..(575): n is a, c, g, or t
  misc_feature (578)..(578): n is a, c, g, or t
  misc_feature (580)..(580): n is a, c, g, or t
  misc_feature (585)..(586): n is a, c, g, or t
  misc_feature (588)..(588): n is a, c, g, or t
  misc_feature (592)..(593): n is a, c, g, or t
  misc_feature (598)..(598): n is a, c, g, or t
  misc_feature (600)..(600): n is a, c, g, or t
  misc_feature (607)..(607): n is a, c, g, or t
  misc_feature (609)..(609): n is a, c, g, or t
  misc_feature (613)..(613): n is a, c, g, or t
  misc_feature (615)..(615): n is a, c, g, or t
  misc_feature (618)..(618): n is a, c, g, or t
  misc_feature (622)..(622): n is a, c, g, or t
  misc_feature (637)..(637): n is a, c, g, or t
  misc_feature (647)..(647): n is a, c, g, or t
  misc_feature (670)..(670): n is a, c, g, or t
  misc_feature (675)..(675): n is a, c, g, or t
  misc_feature (704)..(704): n is a, c, g, or t
  misc_feature (711)..(711): n is a, c, g, or t
  misc_feature (856)..(856): n is a, c, g, or t
  misc_feature (864)..(864): n is a, c, g, or t
ccggttgtgacccgctccgtaggtggtaaattgtgctcccactgcacatccggggggaggttttaacaacctgctttagtatagcccggttaccagttggggccacgccattccactccggaaagttaaccatctcccatccacaggcatctggggccgcctcagccccctcggctctcctaccaggccctggccaagcccggggacccttttcttcctggaggatcccaggatcctagcgatcgcaccccgcccattactccagcccaggtcctgatccggttccccacgcagaggaacttggtggtgatcccccagtctgtgacaccagaacgcattgctgagaactttaaggtctttgactttgaactgagcagcccggatatgacccccttactcagctaccacacggaactggagggtctgtgccttgttgagctgtacctcccccaaggattaccccttccctgaagagttttgaaactgtggttgcctgctcgtccccaagtgacctatacctgtgtttcttgcctcatttttttccttgcaaatgtagtatngcctntntcantcancantnggacnncnaccnntagantngccaacnanggcntntcnagcntgatgttggatctcnagagcccttncagtagagtagaagtctcttccngtttnctttgcccttctttctaccctgctggggnaagtacnacctgaatacccttttctgaccaaagagaagcaaaatctaccaggtcaaaatagtgccactaacggttgagttttgactgcttggaactggaatcctttcagcaagacttctctttgcctcaaataaaaagtgctttgtgaaaanaaaaaaanaaaaaaaaaaaaaaaaaaacaaaaaccaaaaaaaaaaaaaaaaaaaaaaaaaaaaaaaaaaaaaaaaaaaaaaaaaaaaaaaaaaacaaaagaaaaaaaaaaaaaaaaaaaacaaaaaagaaggaggcgcgcggcgcgcgcgcgcgacgcgacgacagcaagcaccacagcacgcacagttgggggggcggcgaggcgcacaaggagaggcggaaggagggagagagaaagcagagcaagcgagggacagcaaggcccggcggaaaaaaccagagaggacgggggaggagcacccaacaacaaagcaaaaaagagcaggggcggggaggacacacccacgtcaggccagacaaaacagacacgaagaggagaaggaggaggcaacacaaagagggctcccacaaccagcagggagggggaggcaggaacggggaacatgaggaacaaaaaaataatccgacgcgcccgcgccgggggaggacagacacaaaaaacgagagcagcaacacggtgacaagagcaggaaagagagagaagccgacgccagaagagcagaagccaagcgcaagaaaggcaggcagcaaagcgagcagcacaagagagaagcacaaaacagagcgagaaaagaaggaaagagacagagagggagaaacagacaggaagagaaaggagagaacgggaaaaaaaaagaaagaggaagaaagaggcgagaaagcgagaggagggacaacagagcgggacgcgggggagcgcaagaccgcaagaagagcgccgccacgcgagagcaagaggacagacagggagaggcgagagaagcaaagagaacggaaagacacaaacaggagagagagcagaagagaggaagaaagcgcagcaaaggacgcagggaggaaaagagaggaaaaagcatgcgaagaagcgaaacacgagacacagcgagaagaagaaagaaaagaggagagagagaaagcgaaacagaacagagaaaagaagaaagaaaaagaga

SEQ ID NO: 656152 - DNA, 144 bp, Homo sapiens
atcaagtctattccctaccctcactgctgccaccatgccacagcctctttatccccagcatgctgtaccgagtccatctgctgtttgaaaccatcctaccttgtctgttccacctatggcggacacagacaaggtagagccgag

SEQ ID NO: 656153 - DNA, 158 bp, Homo sapiens
cattatagtggaggccttcaattgtatcagacttttttgtaagctctggcacattgagctctatgtgttaccagtcattaatgagctgctgcagaggggactatttggtttactttcgtgagtggtaacattacactactctggatagggggatcctc

SEQ ID NO: 656154 - DNA, 1345 bp, Homo sapiens
  misc_feature (560)..(560): n is a, c, g, or t
  misc_feature (565)..(565): n is a, c, g, or t
  misc_feature (567)..(567): n is a, c, g, or t
  misc_feature (571)..(571): n is a, c, g, or t
  misc_feature (575)..(575): n is a, c, g, or t
  misc_feature (578)..(578): n is a, c, g, or t
  misc_feature (580)..(580): n is a, c, g, or t
  misc_feature (585)..(586): n is a, c, g, or t
  misc_feature (588)..(588): n is a, c, g, or t
  misc_feature (592)..(593): n is a, c, g, or t
  misc_feature (598)..(598): n is a, c, g, or t
  misc_feature (600)..(600): n is a, c, g, or t
  misc_feature (607)..(607): n is a, c, g, or t
  misc_feature (609)..(609): n is a, c, g, or t
  misc_feature (613)..(613): n is a, c, g, or t
  misc_feature (615)..(615): n is a, c, g, or t
  misc_feature (618)..(618): n is a, c, g, or t
  misc_feature (622)..(622): n is a, c, g, or t
  misc_feature (637)..(637): n is a, c, g, or t
  misc_feature (647)..(647): n is a, c, g, or t
  misc_feature (670)..(670): n is a, c, g, or t
  misc_feature (675)..(675): n is a, c, g, or t
  misc_feature (704)..(704): n is a, c, g, or t
  misc_feature (711)..(711): n is a, c, g, or t
ccggttgtgacccgctccgtaggtggtaaattgtgctcccactgcacatccggggggaggttttaacaacctgctttagtatagcccggttaccagttggggccacgccattccactccggaaagttaaccatctcccatccacaggcatctggggccgcctcagccccctcggctctcctaccaggccctggccaagcccggggacccttttcttcctggaggatcccaggatcctagcgatcgcaccccgcccattactccagcccaggtcctgatccggttccccacgcagaggaacttggtggtgatcccccagtctgtgacaccagaacgcattgctgagaactttaaggtctttgactttgaactgagcagcccggatatgacccccttactcagctaccacacggaactggagggtctgtgccttgttgagctgtacctcccccaaggattaccccttccctgaagagttttgaaactgtggttgcctgctcgtccccaagtgacctatacctgtgtttcttgcctcatttttttccttgcaaatgtagtatngcctntntcantcancantnggacnncnaccnntagantngccaacnanggcntntcnagcntgatgttggatctcnagagcccttncagtagagtagaagtctcttccngtttnctttgcccttctttctaccctgctggggnaagtacnacctgaatacccttttctgaccaaagagaagcaaaatctaccaggtcaaaatagtgccactaacggttgagttttgctgaaaggattccagttccaagcagtcaaaactcaaccgttagactgcttggaactggaatcctttcagcaagacttctctttgcctcaaataaaaagtgctttgtgagcttggtttgtgagcttggttttttaaaacaatagcaaccttctgtctcacttcaaccatcactctccacatacccataaggcaggccagtcagtgatgcaaaaggagtgaggacttgacttttctacaagtcctcaactgcaagttgggggcccctcaccccagtactttacccatttagctttagggttgtgggtctcatcctggctgcacaccaggtcacctttgggggctttaaggctggtgatgtctggacctcgccctggaggctgatctgattgggctgtgatcaggacagcaggagtgtacaggctctccaggtgattccagggtgcagccaaggctgagccacagctttagggtaaacccatgttcgattccacagattccttggttgctccttctacgtatgaaggccgaggtcggtgtttactaagcagcacaacctga

SEQ ID NO: 656155 - DNA, 355 bp, Homo sapiens
  misc_feature (9)..(9): n is a, c, g, or t
  misc_feature (25)..(25): n is a, c, g, or t
  misc_feature (54)..(54): n is a, c, g, or t
gaaaagttnagggattttttggccnccccctaagggttccaccaaaaatttaanggttacctaaagatggatagggtttgggctttgccatccccccaccccaaatctccttccttataactccccataattacccgtgtgttgtggggagggatcccagtgggtgagagatgattgaattatgctgttctcatgatagcgaatgggtctcatgagatctgatggttttgaaaatgggagttgccctgcacaagctctccttttgcctgctgccatccgcataagatgtgatttgctcttccttgccttccaccatgattgtgaggccttcccagcatgtggaaatgtaagtcca

SEQ ID NO: 656156 - DNA, 202 bp, Homo sapiens
tccgcgctcggtagtcctacgtgcttggcttctgggcgccctcttctgctttgtctcgtttggatcttggaggcatggggcttcattgctaggatgaggctggcacgtaatagcgcactactggacatttatgtttttttcaagttgttcttgcagcgcaccgtgtgttccatttctagctacgctgaactaatctcaagga

SEQ ID NO: 656157 - DNA, 325 bp, Homo sapiens
  misc_feature (17)..(17): n is a, c, g, or t
  misc_feature (104)..(104): n is a, c, g, or t
  misc_feature (125)..(125): n is a, c, g, or t
  misc_feature (130)..(130): n is a, c, g, or t
  misc_feature (168)..(168): n is a, c, g, or t
  misc_feature (174)..(174): n is a, c, g, or t
  misc_feature (178)..(178): n is a, c, g, or t
  misc_feature (185)..(185): n is a, c, g, or t
  misc_feature (195)..(195): n is a, c, g, or t
  misc_feature (230)..(230): n is a, c, g, or t
  misc_feature (292)..(292): n is a, c, g, or t
  misc_feature (322)..(324): n is a, c, g, or t
gccttcttgtagatgtnaatctggctacactggacagcactgtgaaaagacagactttagtattctctatgtagtgccaagtaggcaaaagcctccactcatgntcttattgcagccaattattngggcntgtacagaattgcccatgcatagtagcaattgtaatgngcatanacangaaaatnccccaaaaancaatagaggacgtcgacagaaagcaaaacctaggncattttacttcagatacgtcatccagaatggtttaaactgatgacttttatatgtacactgnaccatgtgatgtacatttattatgtctttnnnt

SEQ ID NO: 656158 - DNA, 742 bp, Homo sapiens
ggttgttgaggggacgtccttggtcttgcacgcacactacctgggggagtctaatcactgggatggtctgtggggtgggagggcctacggatagatgcgtaagagtgtcgcatgctccgtcattcttcgcttgagacccatctccctagtctcctcctagttagctcctatctggtccgtgatcccatcctccttagctcttgtggcccctatttggtctctgtgcttaacgttcgctatggtccacctccagccatcactaggtcgtgcgagtcccgacgcctgtcatcaggcaaaagatagatctacttatgaaatgtggggcataaacaacacaaggaagacgagacattggaaaagctaaattgatccaacagctgttgaccgatcaaagcgccaaaaacgggcaacgtggaacagcaccaagagaatacgtgcgggactatggtggtaaaacgtgtgtcaccacaacacgcagtcagagacgttgcaaccttatcgaccagccaaaaaaggatcttcaagggtctggcgcctcggctccagttgtgccagggatgatgtgtccccagcgacaggcctttatgggccgcctgcaccagacgtatgctaggcgcatatgggaattcttcgccaatgttgcccacagataggccccgtggtcaccccattcaaggtctggggcttgttccccaatcgattgatcggtgccactggagggcacggtccggcggagaatccg

SEQ ID NO: 656159 - DNA, 711 bp, Homo sapiens
tgaggcggagtctcactctgtcatctatgctggagtgcaatggtgcgatcttggctcactgcaacttccgcctcccaggttcaaagtatatttttgcctcagcctcctgagtagctgggattacaggtgcccaccaccacgcccagataatttttgtattttttttagtggagacagggtttcaccatgttggccaggctgctcttgaactcctgacctcgtgatccccccgcctcggcctcccaaagtgctgggattacaggcgtgagctaccatgcccggtgactcttttcagtccaaagagtcatcattgtcactagaccacctttgaacatggacagcaacagcactatctaatattaactttccctgaatcaataccctcgtttgacaaattataatttaacaaaaatatgtttatgtgtagaaaaaagactagaaggatgcagtgtctccgtgggtgagaaacacgtgatttctgttttattctcactcacttatattttctaaatttcctactgaaaatgttaatgaattatttaggtaatgagaacacaatcttaatcatgtttaattggttcataaggaacgacagagcttggcagcttcttgcagggtgctttctgccatccccagctgagacaccagtggggctcgggagctgccctccaatgacagctggtgatgacggggacactgccagctcccttt

SEQ ID NO: 656160 - DNA, 188 bp, Homo sapiens
aagaggcaatacagatgacaggtgtacgtacatcaatcatcggtattgccatcgtaattattaatgcgcgggcatcacgttggggcgggatagcagtgcatccgatcagacactccacccagctgaccgccagggccgccccgtgaagtttctttgtatttgtcatgcatatcggcgccggaatcgcg

SEQ ID NO: 656161 - DNA, 599 bp, Homo sapiens
cattaattttattttttaaaacttttttaaagtttcggacagaaaggccaaatttccggataccaacataacggggcgattggcgcgaaaaaaaaaaaaaacaaatccagagctcggagatcggggaaataaaggaaatagcggttaaaggggggaaattggggaaagtttacaatagataaagtacttggcatattttgcacctcgggcccatccaaaatacgccatagaaattccaaagagataaaagggtaaaaaccttcaacgggggaagggggcaaaataaccctaccaattttttccgcttaggcccgcccccacgcaacctgaagcgagagtaagggggggatttcaaattgtcaaactaaaaaacacagcgagaccggggaaaaaacgggtacccgggggaaatggggaaaatttataaacttcacaaacatatcgacccgaaaggttaaggtgaaaatccggaagcccaaaggggcaaagaaataaaaaaaaatacttgcggtcatgcgcccttttaacttccaaaaaccggaagcccggcctatcaagtaatcgcaaaacccccgggggggcgggtgggttttgttccg

SEQ ID NO: 656162 - DNA, 218 bp, Homo sapiens
tgccctatgacggtgagagtgccactggttcctgagcccccgcacggagtacatgtgtggcctgtgtccagacgtggagtgaagcaagagcgatggggagtacctggtgtccggacttgggagcgagacgggtggagttctgcaactgggggatttattgccaaggagcacctggcttcagcttccaggagaacagctgagcagaatcggcaggccgc

SEQ ID NO: 656163 - DNA, 560 bp, Homo sapiens
  misc_feature (50)..(50): n is a, c, g, or t
aattgaaatgtagatgataatctgatcattgtttgttttaccaaattagntaggattctgaggatacattttgaatatttgtgtatgtttagcattttgtccctttgttagaaatctctcagtgtgacttgtttttaataggatgtgtcttgaattgtaggccaatcactcctgaaaagtattaagccctttaaacacactggttggacccatagagggaagcctacaggtttattagtactccttatcctgaaagcacagcatacccttttaggtgcacagcaacagactcctagcaaccgtaatagattgaatttctaagagtgaccaggccggatgtaataataaagcaagaggtacaaacagttgtcatggttttcttttcacggtaagctagtttgatttgggaaagcttagcttttcaaaaatgggcaaccttcttataaaactactgctgtttgtgcacaggacttgtggtattaaaatagcaataatagtaccaaatttaaacagctactgcttaaaaataatatacccaaaataacaacaacaaaaaaaaa

SEQ ID NO: 656164 - DNA, 513 bp, Homo sapiens
gtcatcctgtaattaatagtttctcgcataacaaggtccgatatttgcaaacaaacaacatgtttggaagcattagatccagtccatagatgctgtgacaaaattaactacagtcagtctgtgcaatgagattgatgtggttggagttctatgtgtgtggcattgtcaggtcgaaaacagagtggtgtgctcctagaaaatatttcttcttctagcttatgtgcattggacctacacatgtataaccaatgactgactctgaactatcacgcacggtggggtggctggaaggtaaaggtctaagctgtgtgaaacactatacatatataatctatatttacttgtatgggctattactataacagtccaagtcacaatacacctagaacataccagaaaagcaagctttgtcattcctgcttgaccggtatgatctcgtctaaacaaacatttcatttcagaaaatctgcatcaatctacacggaccatacacagtgcacaaactgaaatgag

SEQ ID NO: 656165 - DNA, 216 bp, Homo sapiens
tttcctcccccccccccccccccctaaggggggtttggggcctcccaatggggcttgtgctttttccacacgtgtttgtggggggtttgggcccaaagttccagggtgagaggcagggaactccagggctggttcccaaatgttgtttgggggccccttttggttgaggccccccctaagcccggggccctttaaaatcagttttctccctgggga

SEQ ID NO: 656166 - DNA, 659 bp, Homo sapiens
gtgatctggttgggtcagatcctgtagatatgtgagatacctgggtctatccagtcccgcgaggagcaggttgggctttcctggcggcaaaggtcacaatagtgcagttggtatcatatctagactagcttataatcgtcatctgctgcaagcacaatcaactcagtgcacgagggctactccaagtgtgatgtgtgatgagaagctggtgacgaaatatggtcggctccgtaattgctgctatcgttgtggaaatatagcttcgatcatggtcttgaaatgatgtaaatacagagaaccgaaagttattccgggcagtgccagattcagagacgtgtccattccgtcccagaaggacgacgccagtatctcctgtagaggccttcgcaccagtcctgctgagctgattttgctgagcctcttcttaccccaagtcgctggtattacccgctagaatatactgttgaatgtgaggcactttgctgctgaagatgcgggctcttgccttgtatttttttctgcacattgttaaagtcattctacaaatgcacgggtggctggagggggactatggccaagatggcctatgaatttgtccgcacagacccgggcaacaaacgtggggcgatttggaaagactgggaagaggggtcgaagtc

SEQ ID NO: 656167 - DNA, 1389 bp, Homo sapiens
ggggactcgcgtcggatgggactcccggacgtaggtagtcgtgggccgggtactgaggccatatgctacatctattacttttccactcataggccacgatgacagcagataccagacctgggagtgtctgttccagacgcgctgccgagaagcattaaactcgactgaccctatgaaggcacagtgtggttctcaaaatatacggcatcctgcatgggacctaggtgcatgtcaaacgcatacacacgactgactcaacgccgacacgcgagagtaatacaaagcacgagacacagactcacagaaatgcataaagacaagcaccaggcgaacacaaccacaacagaatacaaaccataaaaagaacgcaacacaaacggaaacgacgcacagggaccagccccgaccacagtacacccaccatggaaacacacctgaacgatgcaccactgcgactaaaagcaacaaagtggactagcgacacaaacggcaccgcaacgtcacaccactaaggcgaccaagatacccaagtacgaacacaacgacagacaaatcaccgaacgagcacacaagaatcgaaacgggcggacaccacaagcaaacacaggatcaaaaaaaacaccaaggcacacacacgataacaaagcatgcaggagcccatcgacaaccagcacaacaagagcaacgacagaacagcagaaacacactgacaacaagaaacggaccaacaaccagacacccaacacagacaacaacaagacacaagaaacaacatcagaccagacacaccacgcgacgacactcgaccaacagacatcggaaaacacaaaggatcaaacacacacacagaccgcagcaacaacaaaaaacaaccacataaaaagacgagcaacacacggcaggccacaaccgacaagccacacacgagaccacacaaccaagagaccactacaacagacaaacatacgcggcacacacacacaccaaccgaacgaacaccgatacaccgacaggcagcggacagcacaagcagacgaacacacaacgaactagaaccacaccagcggagccaagccgaacaccggccaagaagcagcacaacacacagacgaacacaacacaacagaagaaagccaaatcacgagccagaacgagacgcgacgaacccaggcaaagagcatgccgcaacagacgagcacagagacagcgacacgacgacagagtagcacaaacagacaaccagaccaacagcgcccagaccacactacggagcgcagaaacaacgcacagacaacaacaacacggcgacacaggcacacacaacgacacagacagacgacccgcacgacgacacagcacgcagaacaaacacaccagccgagacataca

SEQ ID NO: 656168 - DNA, 884 bp, Homo sapiens
gactgcttaaccccactcggcatcaggtgaatcgcgaatcagccacttgaattaatgctaagcccttactagatcactgggacttaaacccacaaaatatttagtataacagctaggtcacccgaatcaagcgtggctacaatctacttctcccgccggcgggaagaagaggcggaagaagccccggggaggtaagaacgcgtgcttcattcagaactaatgcgagtatcaaatgagtgcataacatcagccctcggaagtctggttccaaatgaggcgcgtaacccgcctgtctttaatattctatcggagtcgctagatgcttcactcaatccattttaccttcacccccagtgatgtacgccgatcgttggactagtgcttctacaaaccacggagagttcaattgcgaaacgagctgatatcctatgaacttcggacgcactgagctggcagttccctagagtcgcagtctctaagacctccttattcgagaccgagctgggcgcaggcacaggcaatgcgttctaggtaatcgggcgcagcagtgctagcgaagataatcgtcagcgaggcaccaatgacaatagtgtagaatagaggcttcttcagtagatgactacccattcatagatcggaggctttggcatctggacatagttcccctaattaatcggttgcccccgtacttatggcggttgtccccccgcagattaaaacctaacgataaacgtcgtttccagaacatcctataaccatcaccacatctcttcccgtaacttccctagcgtctggcaatttcgtggctaataggttggcaggccccggaaggcagggaaaccaggttgaaccaggcctaacctcccgtttagaggggaactact

SEQ ID NO: 656169 - DNA, 104 bp, Homo sapiens
cagcccctacccttggcctcttcagcaactacagcaccatggaccctgtgcagaaggctgtgctctcccacacttttgggggacccttgctcaatacctcgcgg

SEQ ID NO: 656170 - DNA, 176 bp, Homo sapiens
aaggtctgacttgttcccgtcacggcccagtggttaacgaacctgactaggatccatgaggatgcaggtttgatccctggccttacttggtgggttaaggatccggcgttgccatgagctgcggtgtagattgaagattcggctcggatccagcgttgctgtggctgtggtgtagg

SEQ ID NO: 656171 - DNA, 236 bp, Homo sapiens
gctggcgtgctgctcgtcggccccggcccggaaccggctgggtagagttatgcggaccctccagctgggactgtggctggcgacgcgcggaaagtcatcctaacttgtcaaaacggagagacggagaagaagtctttattgaggagatacccgacgagaacaaggacaaaggaaactaacccgacgcagctctatagacaaacaagccggagggagaaccaacccggcccaccccg

SEQ ID NO: 656172 - DNA, 879 bp, Homo sapiens
gagagaagtttccgggactgtccccacgacagtccggttgtagatcccctgatctgcaattcttcccgtcccttcatggattggaaggctctcctttcttccttgaatgactttgcatccctctcgttgctgagagttgggacaatgtgtggattacgtggtggaacggcagatggcccacactacatactgtaaatacaactcttccgtgaccaatgactgtgaactgaggaagtgatggaggaggtgctgcaagaagaaggcagacctcattctctcctagcatccgccatatcttccgacccatgagagcgcataagctggaacagcatggaaggacgcgcctggtgatccgggctcgtgtgagaacagagtcggtatctactctcctcatacggcctatgagtgctgcgccccagggtgtcaagaactggttggctaaggggcttggagcttgtacctccaggcccatacatccttccaaagctcccaactaccctaacagagggaaaccaccgagtagaattcaacgtgaactacacccaagacctggacaaagtcatgtctgccgtgagcggactggacggtgttctgtcacttctttgtctggtaggactggtactgaggaacaacacggttatctggattgtactcagaacgcttgatgccggtgggtgatctctttcgcgcgaacaacacttatccgagacggaattctgccagtggaaagcttgtctcaatactggatggcggtatgaccgggattggtcctgcacattttggggtaaaaactaaaattttattcttcccggtggggacactagttttaaacgccgggggtggaacacagggggcaccccacagagacccaatgtgtcc

SEQ ID NO: 656173 - DNA, 179 bp, Homo sapiens
gactatataacattaaaaggggttaagaaacaaactctgcctttgtgctatgaatattttagtcagaggtttaagctgtgtgtccattcctactctgaaatgcatagctttgttctggatgtcatctcttgaagtagaaactcctatgtgttatcacattgcagggcttgctaatgtat

SEQ ID NO: 656174 - DNA, 412 bp, Homo sapiens
acctttgactcaagaagaagatgatgaccaaaggtgatttgtaacttaacattccttgtcctgattttgaaggatttttgaagggaaaaaaaattttgggctctttggtttaataaaatggggctgggggccttttgaaatgaaagaaactcctttatttttccaaccccaatcaaacatttaaataagcctggaaaaccaactacaacccgcaatttaaggtttcttttactttaagaaaatcaatttcatagtattgggtttaaatctttttaagtttttttaatacgatctatttttttaggttctttttcagaagtaaaattttgtacatttttacatgtacatatctgtttaggttgggttcatttttttaacattttgtaagaaaataaaagtttgggcccctgga

SEQ ID NO: 656175 - DNA, 158 bp, Homo sapiens
agcgtatctctcttatacaatcaggttgatacgcgaacctttcaagaacatcagcctttccaggggcagcagctgcggcatttgaggcgctggaatttcttccggaaaaagaactgaagaagtcggtaatatccatcctcgaaaagggtgaccaggtt

SEQ ID NO: 656176 - DNA, 236 bp, Homo sapiens
ttatctccaatctgtatgctttttatttccttttcttcctatgctacttgcaatgctgtttcataatagtggtgggagctgacgagcttgtttctgatcttagtggaaaagcattcagtctttcaccagtaagtatatgttagctgtaggttttttgtagatgctgtttatcaagttgaggaagttccctttttatttgtagtttgttaagtgtttttatcatgggtagtcacaga

SEQ ID NO: 656177 - DNA, 197 bp, Homo sapiens
gatcgcttcctcactctcgcacgctcacgacgctctgcattttttgtttatacaaaaatgggagctaatgtgtttgatactgatgtggtgaatgtgggtaaaccaatcacagcatttgttttggacatgtaccatattgtcagtcttttttactcttcagcgcatcaaaataatttaaaattctttttttaattttt

SEQ ID NO: 656178 - DNA, 390 bp, Homo sapiens
ggaatacgagattcgaggcctgaggaccctactgtgtaggctatgcggggaggctggcattgcagaggtattagaaatgggccaaacacggacaggctcgagaggttagtgtcagtagtgatacctctgacagctcttgggggaggatcaatgatggggattggagacggagggcaaggcaagaggctggtgagccaggcggttgtggtcatggtccagatgaaggaggaagtggtcagtggctgtgcaggtgaagaagagggctagtcagatagtctgatagtttgtgtctcatgcccccacctccaggaagccttcaccgctttcctttccctacctccattctgctggtggtcttggagctctgggccagaatctgaaactctaaac

SEQ ID NO: 656179 - DNA, 735 bp, Homo sapiens
gtttgattagattttagggtgttcccacaaaggtttaaattcgtcgacctctttggcatagctttcttgaggttctacagcggctcagcacttctctagagtggggtcatatgtcttggccagtgttcaacaggagcactgcaagagtaatcaggatgctttcatgcatattcatctaatgtcatgccaggaatgacatcctttgcctcagcatagttgtagcgaacatcctgactttcatcagaatcagcagctaatgaaggcaagtcagcaggcatctcgtcattttccacttcggcaatgcagtgggatttttctaacagaggtttttcgcagcattccttcagtttactgcagatcgagtcttgacggtctcaggggcacttggcaaggctcgcactgtcatcagcacatgcaagcagatctccatgacagcattctgtgtggactttggtaagttctgtcactaacttggaatcttatgcaaacctagctttgggcaatgtctgggtcaggctagctactgtcagtgctttgaaagctctttctcctaatttttgtagtctggcacgcttcagtctctgtttggcagccgaagctttcgtatcatcgcgaagttcatcgagctttgtcaacaggcaggcagctttagcagcagcttgactacgttctgtgagagcagctttatacctatatcaaggatagtaaatccggggcataaagctggtccgattc

SEQ ID NO: 656180 - DNA, 122 bp, Homo sapiens
aggtgacctggtaaattagataggcttggtgatttgtactccctcctggtcatttgaagggccctttagtttttatgataatttttaaaataggaacttttgataagcccttttggaggcga

SEQ ID NO: 656181 - DNA, 104 bp, Homo sapiens
accaacccctgacctggcactgaggaacgcatgacgccagcccggccctcacctccggcctcagttctatctccccaaccaaaatatatcccttatacaaatta

SEQ ID NO: 656182 - DNA, 810 bp, Homo sapiens
  misc_feature (96)..(96): n is a, c, g, or t
  misc_feature (147)..(147): n is a, c, g, or t
  misc_feature (149)..(149): n is a, c, g, or t
  misc_feature (152)..(152): n is a, c, g, or t
  misc_feature (242)..(242): n is a, c, g, or t
  misc_feature (318)..(318): n is a, c, g, or t
  misc_feature (418)..(418): n is a, c, g, or t
  misc_feature (440)..(440): n is a, c, g, or t
  misc_feature (481)..(481): n is a, c, g, or t
  misc_feature (491)..(491): n is a, c, g, or t
  misc_feature (553)..(554): n is a, c, g, or t
  misc_feature (561)..(561): n is a, c, g, or t
  misc_feature (564)..(564): n is a, c, g, or t
  misc_feature (570)..(571): n is a, c, g, or t
  misc_feature (576)..(576): n is a, c, g, or t
  misc_feature (578)..(578): n is a, c, g, or t
  misc_feature (595)..(595): n is a, c, g, or t
  misc_feature (617)..(617): n is a, c, g, or t
agcggacttacggccggagctgtttgtgctgggagctggtggcgcggtgcaggctcttaagaacgaacggttgggcgcggactggtatccgggacngtgacttgcaggtccgccatgagccagagcagatgctgagggacaaacgcngntgnagaaaatcctcatctgagtacggtctcacagacaagttgagagaatagtagaaaatgagaagattatgcagaaaagtcatcaaagcaganggtagatctccagtctttgccaactcgtgcctacctggatcagacagttgtgcctatcttattacagggacttggntgtgcttgcaaagggaaagaccaccaaatcccatgtgaatttctagcatcttatcttttaaaaaacaaggcacagtttgaagatcgaaactgacttaatngggaagaacagaaaatttagtngctactgtagatttacatgattaagaggcagctttaattgncatgatcatnccctctttgtggatgtataagaaccttccggaaacagaacctattctggaatggcgaagatnncatattnccnttattnngattnantcaccataaaccatacntatttaatgagtgtatctggcnattttttctcagattgtctttacttttgtttttaaaatgaccttcaaaataaatgtcaaaccccttttaaaagaacacacaacatacacccatcaccacacacccccccccacaccacacccacccaccaccccacacccaacccgcacacacacccaccccacacaccatcgccgccccgcacaacaccgcg

SEQ ID NO: 656183 - DNA, 1024 bp, Homo sapiens
  misc_feature (35)..(35): n is a, c, g, or t
  misc_feature (297)..(297): n is a, c, g, or t
  misc_feature (393)..(393): n is a, c, g, or t
  misc_feature (940)..(940): n is a, c, g, or t
  misc_feature (946)..(946): n is a, c, g, or t
  misc_feature (1024)..(1024): n is a, c, g, or t
aaaagggcccagggccgcccgggaccgcgccacgnccagccggacggcaggcaggcccgggcccagaccgggagcgcggaacggggaaggcccaggaccgccggcccggagggggggggggggacagggaggggacgccgggggagcaccgggaggcggccgaggggggaggggcggcgcaagggggcccggcaccgccagaggggcaggcgggggcaggagggagcaggggcagaggcgggggaccgaaacagggcgggcggggacaggccgcgggggggggagggcaaagggganagcagcagggacagaggcaaagagaggcggcggggggagggaggcagcgaagaagggcccagccgcaagcgggcggaccacagggcgggggcaggncgccagggacaccgccaccgcaagcgcccggaaggcagggaaaagaggcggcaggcgcgggaggcacacaggggccacaaaggagagggcacccagggccaggaggaggcgggggaaggcgggcggaggcaggcccagggccggcaggggggacccagcgggggccggggaggcgtgcgggaccaggggcgggggcagcggccagcggagcgccggagcgcaccggcagcagcgggcaggccgcaacgggggggcgccgcagggcggcaaggcggggggggacaggaagggaaacggaggcgcccgggggggaggcagccgggggccgaagcggcgccgcgggcggcaggggcggcagcggcagcggcgccggcggcgggagcaggggcggcggcggggagaggaggaaggcgacagccacaccacaccgcggcggcagcgcagcacgggagaacgcagcaggggcaaaggacacgggggccgaggagcggaagaccggcaccccccggacggccggggccgcggaggacgcggccacagcgcgggnaagagncggggcgggcaccggccccaggacagaggaggggggcagcgggggccggaccacacgagcagcagggagaagaggacn

SEQ ID NO: 656184 - DNA, 324 bp, Homo sapiens
  misc_feature (324)..(324): n is a, c, g, or t
gtggtacacagaggtactaactctgtgaatgggaagagcacttggctatccagagctctcttataaacataagtgcacagagagtgttatgagaaacgcgttttgaaggcttggtttgaggatgagactctgaagagacacgaatttctggcacgaatgcgcacaggacatatagtcagccaagtgtgtcgtgcgcacggatactttgactttgggttgctgctgctgcgtatggatattgggagaggtatacttttcaggttgtaagagagaggtgtgggtaaaggtctgtcctaaaggaaccctggctggtatcttcaactn

SEQ ID NO: 656185 - DNA, 840 bp, Homo sapiens
  misc_feature (154)..(154): n is a, c, g, or t
atataagatctttcttaacaaatcacaatctatgtaatacaatattgaactgtcatcaccatgctgtacattggatatccataacatcgttcatctctgtatcactgagaactttgtcaccatttgaccaactatcatctcgcaatttcccccnttccctctagtccctccgtggtaaaccgagtcgttaccgcgtctgcttctattgatatttggatctcagtatttcacatactaatgtgagatgatcgtgcatgtatgtctcttctctgtgtcttgcctatttcaattttgatcagcataatgtcctccatgttctgaatggcaggatttcttccttttataaggctgagcagtttgatgtcactggtaatttccataaaccctatctttattcagtcaccaggacgttgagtccatgctgcagtgaacataggagtgcagactatctctttgcaaccttgatgtcaatgtctttcgggtactatacccagatatcttctattcttcaatcttctgtggggggaacctccatattgttgccataaatttacatccccaacagaagtatacaagcgctgcctctgctcttcgtcctccctagcccttatctttgaccttggatcccgattcatcctaccaggtgttgaagctgtatctccctgggtttgattagcattcccgtcctgcctggcatgtgggccacttttcattatacctggttagcattgacttctttgaacacgtgcctatgttggccttgcccatttaggcgaccatttcccgcctgggtgttcctcttcaaaaagggaaaacccccgccgggatcaggagggaccc

SEQ ID NO: 656186 - DNA, 183 bp, Homo sapiens
ctcattataaacctgtctctactacaatacaagtattagctacatgtggtgtataagcttgcaatcccagctattcgggaggctgaggcaggagaattgcatgaacccaggagacggaggttgcagtgacctgagattgcaccactgcactccagcctaggtgacagagcgagacgccgtctc

SEQ ID NO: 656187 - DNA, 423 bp, Homo sapiens
  misc_feature (6)..(6): n is a, c, g, or t
  misc_feature (391)..(391): n is a, c, g, or t
taaaangggcacccaagtaaagttaccctctgtatccgtctgaactggtttttgaggtaccctacgagttttgaaaataggtgttatttgcttattttaaggaacctacaacccaggaagtagaatgaatgtggaaatattcttcttctcttgccgagcatggtggctcacacctgtaatcccagcactttgggaggttgaggcagatggatcactgaatgtcaggagttcaagaccagcctggcaccaacatagtgaaatcctgtctctactgaaaacacaaaaattagccaggtgtgttgcaggcgcctgtaatcccagctacttgagaggctgagacaggagaatcacatgaacctgggaggcgaaggttgcagtgagctgcgaattngccattgcactctaggctaggtgacggtgcga

SEQ ID NO: 656188 - DNA, 508 bp, Homo sapiens
gagcatttaaaaggatttcccttcaggtataattaacctgaggagaaagaaaaaaaaagtggaaagaaaaaaaaaacaggcttctaacttttcctcccgtcttacgtttggcatgacacggtccactgcgaggacattgaggctgtttttacactgtctgatgcctgcaggaggagaaagaaaacaagctctttcacagatttactttgatgttaatgagcctggaagtttgtagcgcttttctgggggccggtgtgtgtcaagagaacccgcgtcaataggtggaaaactgctgaaaccacaaaaagagcagaggaatgtttagtaggagccattgtccttcatttgttagttgatttgtgtctagatatgtcagaaatatgctgtacttcatcctgtgggtgtgtctgtttatagttctttcagtgaaagagaggtattattggtgtgaatttgttctgttgtaatatgttttaatacaaactaagtaataaagttagtattttta

SEQ ID NO: 656189 - DNA, 747 bp, Homo sapiens
  misc_feature (704)..(705): n is a, c, g, or t
aatgtcacgtggcttctaaatggataacctgtcaccacttgctttttaaaacggtttatttgctcaaaatttacccatgcaaatgggtgaaactactgctgacagaaacttacactgagtgcaaaggcaatattgaaatataagctggcaacacaagacccacttgacacatggaaatatcatagggttcacatcaaacggatcagtaaaggcctattaagaaaatgcaaggaaaaagaaaacagagtgaatcacaggattaacctcatgataaatggccggagtcaaggcataaggcaaaattcatcatgatggtcatggagattaaagagctcccccatatggatacgcagacaattcctcaactgcggctccctaaggtttcttatgagttctctcatctacttcatgaaaatttccatatcatctgcatatgcacccatcccatcattgatctggctattgagtatggcccatcgggctttaccatctgccatagggcggacttactctccattctgcataagctgatgcatctgttcaatttcttggcctatccttgcaggctacttattcttcggatctcgcgagaagtgcactccgtaacactagcctcgagacctggccggttttcccggcccaatgccacccgccaggtcaggccatggtagctgccttggccaattctggagcccggggaccgnncggttaaacggccccacccgaggctccagtttgtcctttacg

SEQ ID NO: 656190 - DNA, 167 bp, Homo sapiens
aggacggtgatggaccagcctttacatgctggcctttctgctcccagagctagtgtgcttcccattgctttcctatcctgtcctgcctgccttctcatacactgcctctcatgctagggggcacagcgagaactgctgcaaaggccagtgagcaatgtcacggagta

SEQ ID NO: 656191 - DNA, 262 bp, Homo sapiens
attcgcggccgcgtcgacgtatgacaggcataaacccaggcctcagtgcatttctatggttaggtggaattagctccaatgtctgatgcccagttccctcccatggaaagtacattcgccacataccattacactgccagtaaagataaagtaccttctaatatacttataaaagcacatagtgcatgggctagggactatataagaaggcaggtggcatggaaactaagggttttatttttatttaatgctcccaactctt

SEQ ID NO: 656192 - DNA, 399 bp, Homo sapiens
ccaatctgcgggaccactcagaatacttacacaacttctattattcagcatatgttcatattttaggcttcaggtgctagaaggattataatgtaatgtctaagatttgctaatgctgttatctatttgatcttgaggcttgatggtcactagaaaagtaacattatatagtacagtaaaaaaacttagagatactgtggtttatagaatcgtatcttttgtctgataacaaaattagtcaattgaataataaaatcatcgtgagatgtcagcagtcaatgatgatggggcatagaattggttctgcattccgaggagggagaaatcgatgcaagcagaagtgattaaacatttcacatcttggagctagatgacctcctaggatggatgggtcttatg

SEQ ID NO: 656193 - DNA, 185 bp, Homo sapiens
attcgcggccgcgtcgaccagctgaatattgaactggaagcagcacatgattaggctttatgactgggtgtgtgttgtgtgtatgtaatacataatgtatattgtacagatgtgtggggtttgggtattatggttcattacgacccacataattagtagttgtagagtcatgctgtccttgcatg

SEQ ID NO: 656194 - DNA, 935 bp, Homo sapiens
  misc_feature (311)..(311): n is a, c, g, or t
  misc_feature (422)..(423): n is a, c, g, or t
  misc_feature (570)..(570): n is a, c, g, or t
  misc_feature (638)..(638): n is a, c, g, or t
  misc_feature (781)..(781): n is a, c, g, or t
cggcacgagcacatcttatgccaagcactctgctaggagctgcgtatacagagaagaaaggcattcctgctctcatgatgttcatggtcttctgcggaagagaccagaaaaaaagtattacaatgtagaatgaaataagaatgacagggtattttggcagcaaggaggagggcactttaactcaaactgggcagtggaagaagtaaaaaaaaacattgaaagaaatcctgaaggataagcaggagttaagaagagtggatgaagcccttcaagggtaaaagcatggcttattcagagcactgcaagtgttntagtatggcccacatgtaaagcttacagaggaacacagagagaaaggcaagagccaggaagtgaagggtcctgtgtatactggcttacttcgtgacgtggagaactattgnncgattcctctgctaagctcagggtgcattcgtggaaaacctactgcaactggcccaatgtgcatacaaagctggaactgagatgtgaacagacttgcattgccttgatcactttccgtggaaatatagctggcgccactaattgtangagctactgacactgtaaactaggttaactggatggaagcaacgtgcctttggatcatgctgactgantccatacatgtctaccatgatacaggctgaggtattcccttgaacaccgactatttgagttaatgcccatgtgatggctaagtcctggactggcttaatggtaagattgtaactaccagtaagtttttggcttggtctcatanggcaataaatgggtgactttaaccctttgcatgacactataatcatggttttaagctcaggagggcctgcgtaaaccaatgtggtacactagttggcccgaacttggtataaaccgccttaaaaagtggtaactttaactgcttaatgtttcaa

SEQ ID NO: 656195 - DNA, 727 bp, Homo sapiens
  misc_feature (444)..(444): n is a, c, g, or t
  misc_feature (470)..(470): n is a, c, g, or t
  misc_feature (496)..(496): n is a, c, g, or t
  misc_feature (536)..(536): n is a, c, g, or t
  misc_feature (589)..(589): n is a, c, g, or t
  misc_feature (599)..(599): n is a, c, g, or t
  misc_feature (614)..(614): n is a, c, g, or t
  misc_feature (619)..(619): n is a, c, g, or t
  misc_feature (628)..(628): n is a, c, g, or t
  misc_feature (642)..(642): n is a, c, g, or t
cacagtgactcacgcctgtaatcccagcacttgggaggctgaggcgggcagatcacctgaagtcaggagttcgagactagcctgaccaacatggcaaaacccagtctctactaaaaacagaaaaattagccaggtgtggtggcgcagcacctgtaatcccagctacttgggaggctgagacaggagaattgcttgaacccttagggcggagggtgcagtgagccaagatcctgctgctgcattccagcctgggtgacagagcaagactctgcctctaaaaaaaaaataaaaaaaagaaaagaaaagaggaaaaaacacaacaaaaaaagagaattcaatcaaattttagatatctgaaagcaaacgagcaattaagatgtcacaggtgactagggaaatctaagtgtgcagtgacggaggacaagataagatgcaatcttattngtgtcaaagaaccacagaaagaatanaaagaatgagaatcagcaattcaaanactagattcctctgaagctataaacagaagaactgattanaagtaagaagcaattagtctgcttagacaccatccctaaaataaccaaattanccttctagcngaagactagaggttnctatnggatatgtngaatgaagaccctnaagtagcactatcaagaagctgaggaaaagggttcaaaacagacagatcaaggcaaagcctatattgagtagtggaactctcacc

SEQ ID NO: 656196 - DNA, 113 bp, Homo sapiens
gggcccagaaattttctgtttgtcctgggaaagtaaaagtgggatatttaaacccttccgtttagttttgtaatgtccgggatttttccaaaaaatttaaaaatgggctggga

SEQ ID NO: 656197 - DNA, 389 bp, Homo sapiens
gggttctaccccaaggggttgggccccgccaccaaaactccttcccttttggttccagcctccagtgggggcccccccccttttttttccagggtgggcccccctttttgccccccctttttgggggggttttttgggggcccccccccgggggggtttggcccccctttttttcccccccgggggttccctttttttttttttttttcccccccggccccggttggggcccccccggggccctttgggggccccggggcccgcttgggggggggggggcccccccttttttttttttttttttggcccggggaagggggttttttttccccccccctcccgggggggggtccggggtcccttaacgttttttttttggggttttttta

SEQ ID NO: 656198 - DNA, 224 bp, Homo sapiens
agtctctaccgtggctcgaggagtagcatcctctaggagtagtgtagcgagcaaattctggacagtagtcctcactcttcgctgtcccagcaaggactttctcagcgagcagatcttgcttgttgcggaacaggatcacagagatggtgcgcagccatctgttgtaccagatgctcttgaagaggttcagagcctcctgcacgaattcccttagcacccgcacg

SEQ ID NO: 656199 - DNA, 361 bp, Homo sapiens
tttttcccttttttcccccggggtccgggcagttcagggggtttaaaaaacccaagggtcccgcaaaaatgcccggacattttttttgggcccccgggggttttttttttccgaaaacttaaacaaaaaaagacttcctaagaaatttggaccgcccccccctttttccggccctttgtttgggaacctttttgcccttggttttcccccggggcccccgcccccgcaagagggggttctttttttttttttttaaaaaccaaaaaaaaccttttaaattttttaaaaaattttccaagcctgggggaaaagctttcttccttaggcaaggggttttggtttgggtttaaaatttcttata

SEQ ID NO: 656200 - DNA, 183 bp, Homo sapiens
ttgactctgaggatccccaggccgcaccgcggtcaaattacagtcctgagccatatgacctgaaagtactatatatacaaaggtggtccagaagattataatcctgtattgtttcctgtaccttttgtacgcttagacgtgtacatgatcacacaacctattttcccattggcgttaacaact

SEQ ID NO: 656201 - DNA, 138 bp, Homo sapiens
caaaaaaaaaaaaaaaaaaaaaaaaccctttggaacccccccttgatttcccccttttcctccctacccctttttttttgggaaaaaccgtccccccccccccccaaacccccataaaaaaaaggttttgggttttta

SEQ ID NO: 656202 - DNA, 130 bp, Homo sapiens
gttagccgtcagaggcagcgtcgtgggagctgctcagctaggagtttcaaccggtaaaccccgagtttaaagccaccgaaaaagctgttagcaatcacaggttttcaccccagagcacgatgggatcgag

SEQ ID NO: 656203 - DNA, 758 bp, Homo sapiens
ggaagatggccttagatatgtgagatgcagaactcctcaagtcaagatatgccagtctctctagcgtttcgggtggaggcgatattgaagttaggtctgtagacgtgatctgtgtaagtttgagcttctcatactgactcatggtgtgacttttgattagtcaccttgagcattagttggggttgtggcagagtgggtttcagactgcttcaggggtgctctaagcagctcattgtggtaagtagcttgtaaataagcacaagtcagtttccatctagcttattgagcaagtgtccatgggatgaaaaacaagcttcagtttaatttgctccctcaagcaatcacctgtaagttgtcctttggagcaaagctttatgcacgcctgatgactagattgaaactgcatgggtattatggtcaagttagagtatatacaaatatagagtatatgcaaatgttttcaactaaacaaaaggttgcttgtcggtgacctcagaatatcactgtgtcgataacgacctttagtgctaaaagagcaatgacttctgtctcacctgtgcctttgtgacaattagacgttgatcacaaaggtatagaaaagctgcagggcactgacctgacaaattactttgctctggtaatagagagaaactaacgtttcctcgtcatttttgggcccagacgttcagggattttcttacagctatcattgtcatgatggctggaattattttgaaccagttatattaaacacctgg

SEQ ID NO: 656204 - DNA, 423 bp, Homo sapiens
  misc_feature (19)..(19): n is a, c, g, or t
  misc_feature (38)..(38): n is a, c, g, or t
  misc_feature (185)..(185): n is a, c, g, or t
  misc_feature (201)..(201): n is a, c, g, or t
  misc_feature (239)..(239): n is a, c, g, or t
  misc_feature (356)..(356): n is a, c, g, or t
  misc_feature (391)..(391): n is a, c, g, or t
  misc_feature (403)..(403): n is a, c, g, or t
aataattaggatggaatanatcaagcaatttgtttacnatctcatgtcttaaaataaattaaaaattctatggaaacagcagaattgagcgttttcactgggaaagacttcaagaagaaaagacaatgattaaggtaatgtttttaaagttaaatattttcattcgaagatttttatagtataanaagatgatctaatccntgaataaatcagattccaagttacagttttttcactantttatcacaattcagaaagcacaattatgagcatgggccacacttggcagtatatcatagcaaaagttatagtgttccaagcgttcctgagagtgagctaagacttcctaatgtagntccacatccatttattccagggggttgacagagcntgggggtccccntgcctttaacccactccctt

SEQ ID NO: 656205 - DNA, 666 bp, Homo sapiens
tgccctccgtgaacctgcattgacttgagactcggtagcactctgtcttattgagatcgcaaccgtagcagtcgacaacactccatcgttcccccatgcacgcgccctcgatgcgcaccccaagactccgacccactgccgccacaccagcgagtaccatgacaccgcccagcacatccacgcaggagccaagcagcgaagaaacaaaacacaaatagcaaaagaaccagaaccgatactcagccacacacacacaccccagaccacacacacaccaaacacaaccaacaccatcacccattccacactcacacctactgcaccatcctctctaacaccccgtacacacaccacgacaccccctcctaaacagactccaccacatacatcacagcgcaccccggacgcgctacgcccacgaccgccgcgccaccacaacaacaacacgcgacacgaccacacgacccgcccccaccaccgagccccacacaccccccccacctctcgtgctacacccccacggcagcctcctacacacacgcaacctcgcacgcctccacacgcatccacaagcccactgcaccaccacacacgcaccaccgaacgacacccgacaagacacgccaacccccaacaccaccaaacgagctccaatcatcccacaca

SEQ ID NO: 656206 - DNA, 302 bp, Homo sapiens
gtctcgatctcctgacctcatgatccacccgccttgcccaaagtgctgggattacaggcgtgaaccatcgtgcccggccacatgccagtcatttttaaaagtcaactctgtgtgctgagctaggtgcctgagacatagaaatagattaaaccagtctgtgatgtcacatagctcacataagtttcctgtctctgtgagccctaccatacgcgagtgcctacaaagtgtgtctttgtgtctctgctcatttggccatatacctagtaggtagaaggtaagccactccaacctggttgctagca

SEQ ID NO: 656207 - DNA, 1556 bp, Homo sapiens
ttcgcaagcacgcgtgtcccccttctcccacacggctgcggagcctgggctggtgcgcgggggaggcggggttggcatcgtggaggtcgatccgccccctcccctcggccgctcgtgtgcccccacaccgcacgtgagcgcaggccggaccgcatccctcccgcaacataggtcgctgtccctggcatccagcctgccgtgtgcctccacgagctcctggtccccagacgcctggtgctgcacaagtccctgcgtcgtggtcccctgcaggccccgggccgggcgctatcgccgaggctccggcatccctgcattcccgggcggcagcgcgccaggcccgaagagcgcaagaagcaaggcacaggacccaccgaacaagactccgcgaaccagccccgaagataagacccaatagaagcaagcgcaattgggcaaaacacggacctaggaaaccctatcggcgcgacagaaaccaggacacacgcccgcgcattgaggcccgagagcatggaacctaggactagacaagcaggacatagccaacggcaacaacagacaccataggcaacgcgagagaaacgaaggccaacgatggcagcacaaacggaacgacaccatagagatccgatgcgacacaacacgaaatagaaccacactaccgtaaagcccaactagcttgacttatgcagacatattaccattgccagacccggaaataacggcccaaaataccaactgccttggccttgaaccaggtaccaaagcaagccccgcatggtaactcaaactatagaggcaaggatcaaacgcacaatgggaccacttttatggccccacatttgcacgaccccccaaataaatacaggcacttccaagcctattaacaccaggaccaacgcaagttccaaccgactataacgattataccatcacatattatataccacatagacgaacgtaagcgcaaatttccatcggaactgcacaagagcgaagactcagcctcgccgcaagcaaactttgcacagttggcacattacgattacacaaacaccatacgtaccacgtatgttacaataacaccaaacagcacataggaatacaagcacgaggcaaactacgcagaaaagtacccacatagagacgaacacaaacacacacggacccacacaacgcgagagcacgacgaactagcggacagaacaaagcaagagaaaccagcacaacgacagatacccataaacaagaatgagaaaggaaacacaaacacacaatccaatacccgcaacagaacccataacaaagacaccaaacagaacaaccaaacaaagaagagaacccaaccgcacaactccagaattaccagaagtccacacccagaagccacacaagcggcgaacaacaacacagtcgcacaggcagagctaggacaagaccgcaccagcaaaccgccgcccaagcaagaaaaagaaagaaaccgaaccaaccacgcaacaagagcaacacgaaagcccgacacaatacagagaccacaactggagaaacaaacagacaaa

SEQ ID NO: 656208 - DNA, 474 bp, Homo sapiens
  misc_feature (26)..(26): n is a, c, g, or t
  misc_feature (202)..(202): n is a, c, g, or t
  misc_feature (230)..(231): n is a, c, g, or t
  misc_feature (251)..(251): n is a, c, g, or t
  misc_feature (259)..(260): n is a, c, g, or t
  misc_feature (279)..(279): n is a, c, g, or t
  misc_feature (281)..(281): n is a, c, g, or t
  misc_feature (283)..(283): n is a, c, g, or t
  misc_feature (315)..(315): n is a, c, g, or t
  misc_feature (363)..(363): n is a, c, g, or t
  misc_feature (460)..(460): n is a, c, g, or t
agactcagagagaacccaccatggtnctgtctcctgccgacaagaccaacgtcaaggccgcctggggtaaggtcggcgcgcacgtggcgagtatggtgcggaggcctggagaggatgttcctgtccttccccaccaccaagacctacttcccgcacttcgacctgagccacggctctgccaggttaagggcacgggaagaangtggccgacgcgctgacaacgccgtggnnacgtggacgacatgcccaangcgctgtnngccctgagcgacctgaagngnanaagcttcgggtggaccggtcaacttcaagctnctaagcactgcctgctggtgaccctggcgccactccccgccgagttanccctgcggtgacgctccctgacaagttctggcttctgtgacaccgtgctacctcaaataccgtaagctgaagctcggtggcatgcttcttgcccttngggtcccccagccc

SEQ ID NO: 656209 - DNA, 188 bp, Homo sapiens
ctcctcttacgccccaaactcatatttattatatacgtaaatattaatgtttactttcgtactggctatactgttccaaaataaatgtgaaagctagctgtaaaatctgatttagaaacctgataaaacaacacctctggacacaatacaggctgtgaagacacacacacacacacacacacacacac

SEQ ID NO: 656210 - DNA, 534 bp, Homo sapiens
gcgtcgacagacgtcggcggtacgaatcgaacacatatagcacactcgcttccacgaatcggaggggaacaagaaagcgtccaccccactagagggtggaccgacagatcatgaggggcggttaggagcgggcgttgagcagctgctccatcacctcgtcgccgggcgtggtgcccgcgtagtcggtggtgcaggtggcgcgcacgatctcgtaaatctcgtaccaatacacattcgcctgcttcccgaaactctgggacatggcgacaaacgggctggcgatggcggcaccggtggtggggtgcttgccgagcaggccgaacttggagatcgcctgctcgcactgcacataccgggcaaacgcctgcgcatacgcctcaatcaggcgaggcgcacgaattgggaaccgccacgttgatcgagccactgccacgtctcccgatagacgaggtcagcgccaagcggtttgtcgtcaagctgaatctcgcgcaaataattccgatggtttgggaaatcttccccgaagaaacgaac

SEQ ID NO: 656211 - DNA, 209 bp, Homo sapiens
  misc_feature (193)..(193): n is a, c, g, or t
tccatccgggccaacccttccttcccatcctaaaaaagggccattttatgaggcatggccccccctttggggaaattgttctttaaattttgagccagtataaggaaaattgggtgggggttttccaagggagctgccccccttttttattctggggattaagaaggaagtcttgaaaaaaactttataaagncatctttaatcattcc

SEQ ID NO: 656212 - DNA, 147 bp, Homo sapiens
  misc_feature (101)..(101): n is a, c, g, or t
atcggtggtacccgtctgttttcttgtgcaaactgtgatactgatcctgaccaaccgctcagaactcatctcaactcgtttcacaggcgccactggcaganaattccttttaaacaaggtagttaacctgcagtacagtgaagttca

SEQ ID NO: 656213 - DNA, 405 bp, Homo sapiens
  misc_feature (179)..(179): n is a, c, g, or t
  misc_feature (286)..(286): n is a, c, g, or t
  misc_feature (307)..(307): n is a, c, g, or t
  misc_feature (360)..(360): n is a, c, g, or t
  misc_feature (386)..(386): n is a, c, g, or t
gacggctggctgcttttctcagcgccgaagccgcgccatgctcgtcctcagaagcgccctgactcgggcgctggcctcacggacgctggcgcctcagatgtgctcatcttttgctacgggacccagacaatacgatggaatatctatgaatttcgttcttatacttaagccctcaaagntgaatgattcctggaaaatttgagacgctcatcttcggacagcttcactctgaatggttggatacggatgtagatttggaagcagatgatacatgtttcaaattggnataagataatttgctcatcgnactgaagttcgaaagcttgccgataaggaatggcagaacaattcctcattccnaattcggctctcatgataaccagagntgagattactcggtaccgg

SEQ ID NO: 656214 - DNA, 349 bp, Homo sapiens
actcacacaggaagggagacagacagagagagagagagagagagagagaggcagagacagagacagagagaaagagagagacagacatagaaagacagagatggacatgagacgacagagagaaacacccagaaagagagagagagacagagaacgagaaagggagggagagagcgagagagagagagagagaaagagaagtaaacccacccaccacctccttgatgtgagtcagggggtctctggccttgaggagagaacgtacagcgacaatgcagtatgtgggcccgttctttttttcttcttcttcttttcttactataattggggagtgagtctgtataaagtg

SEQ ID NO: 656215 - DNA, 565 bp, Homo sapiens
gacccagagagccctgagcagcccacgacgccgccggcctagttaccatcacaccccgtggaggagccgcagcatgccgcagcctggacccagtcaccatcacctgcaaccatgagcagcgaggccgagacccagcagccggaagacgaaccaaccaggaagaaagaacagagaaacaagcgaaaggagaaaacacaagacaaaggaaagaaacgggaccagcggaacaagtgaaacacgcaggaccggagcacgacccacacacactatcacaccgacgacacgcccccaccacagcgaaacaacaacaagaaaaccgcaacacaagcacgtaccagagagaacaaacgacaagaacgagacccacacccacccgggagcagacagcgagcgagacgcgcccaacagcagacagcagcggacacgaaacaccccgcagagaagagacagagcacatacagagagaaagacccaacccagggcaccactagacacacagagactaaaaaaggcaggagaagccggacaaccagagggacaaagaccaaacgcagaaagcagaaca

SEQ ID NO: 656216 - DNA, 301 bp, Homo sapiens
  misc_feature (58)..(58): n is a, c, g, or t
aattctcaagaggctgggtgtggtggctcatgcctgtaatcccagcactttgggaggncaaggcgggaggatggcttgagccagcagttcaagaccaacctgggcaacatagtgaaaccccatctctacaaataattacaaaattagctgagtgtggtggcacacgcctgtggtcccagctacttggctggctgaagcaggaggatcgcttgaacccaggaggtggaggttgtagtgggctgagattgcataactacattccatccagggcaacagaatgagagcgagaccctgtctaaaa

SEQ ID NO: 656217 - DNA, 484 bp, Homo sapiens
  misc_feature (91)..(91): n is a, c, g, or t
  misc_feature (384)..(385): n is a, c, g, or t
cctacatctcagtggaggaaagttcatgacgatgggacgccaacgtcaaaaactttttgagcatgtgactagcgagattggagcagaggangcggaggaagtcggagtggagcacttactaagagacatcaaggacactacagtggggactctctcccagcggatcacaaaccaggtccatggcttgaagggacttgaacttccaagcttcctggatatcaggagcttacctggagaaggtaccagcgcaagctgcccatcaaccaccagatcatataccagctgcaggacgtcttcaacctgctgccggacgccagcctgcaggagtttgtcaaggccttctacctgaagaccaatgaccagatggtggtggtgtacctggcnntcgctgatccgctctgtggtcgccttgcataacctcatcaacaacaagattgccaaccgggatgccgagaagaaggagggacaggaaaaggaggagagc

SEQ ID NO: 656218 - DNA, 643 bp, Homo sapiens
cctcggaagatgttccggcacacggacagccctctttcccatcctactgcagacgttatctggatgaatcggatgaggtgatcctgaacgacctggaggtgctgttgcgagcataatcgcttcctcccccgcaggccagatctggatcgacccaggccccctcgatggccctgacctccaggccagccactcagagctccaggtgcccacccctggctagagccggtcctactgatacacctctggtaccaaaggctcagaatgttctccttcaactcccaccatgaattcttacgttcaataagttcatgatccacaccttctccaagagattcacgcagcgcgaactggcaagctcctgcgaggtcacgatggccctttcatcatcaggcagctgtgcctcctgctgactgcggagaacatcttccactcacatggcatgacatcctgctgcgcggaggaggcacctcatagttcgcctcgatccatggtccactgccctcagacatccatcctgctgacctccacgagagctcttccagctgaggaaccaggctgaaggacctgcagacctggagagccgaacctgtctgctgcctgtcccgctcctggtgcccaagccagtccccaccggtgtccctcg

SEQ ID NO: 656219 - DNA, 974 bp, Homo sapiens
ggctgggtaggcaagctagtgagctggtgataaataaactatagcatggactctaaatgcagtcattaatttaggtctttagcaggagggagaggactttacctgggtcttccaaaatgaggaaggggagagattttggtaagtagagcagaatgagggcatttcagaaaaggaaaaacatttgtctacctgctgtaaggggacatgaaatggtagatgcctgggacaatatggtcacctgcccaaggagcaggggagtaataaaccagcatgagataccatcatctgaagcaatttgtggcagcatctctgcggttaccacaccatcacctcattacttcaccaagctgtaattttccatattactaatggggttgcaaagaatctagtgtttcctattcagtgagggctgcacagtgggaaacatacagaaatcttcttgattcattctttcccctttggaaacttaggggacacaacatggactgatgtcatggctttacggtggattcagaagaggaccgaggaggcaggcacggaaggaggcaaggaagatgctgcagataaggggaaacaggagggagcacggagagagcagaaggagtagccaaaacgaactacctaacgcaggaaccacattccacacgaagtgacccgccatgggcggaaatgggtggacacattagggacacaagaatggcgacaaccgcggatacaccagagggaatccgaacaacaactggaaccagcaagcggaggcagcaagaggtgaaacaatacagtaaccaaacgaacagaaaagaaacaaggggaccagggaccgcggaaacgagaaggaggggaaaggggggaccaacgggactggtgcactgcagcacagcacaaagggcctgggcacgacggcacacaactagacagaaggagcagcaacaacaaaacacaaggcgtcagcagcaacaacacccaggaacacc

SEQ ID NO: 656220 - DNA, 430 bp, Homo sapiens
tctttacattcttgccagcattcattattgcctgtctgttgggtgaaagtcattttaactgggatgagataatatctcattgtagttttgatctgcatttctctgatgattgattaatgatgctgggcattttttcatatacctgttggccatttttatgtcttcttttgagaaatgtctattcagatcttttgcccattttaaaatcagattttttctcttgagttttttgagctccttatacattctgggtattaatccttgtcagataggtagtttgccaatattttctcccattctgtgggttgtctctttatttatttatttattttctttgagatagagtctcgctgtctcgcccaggctggagtgcagtagcatgatctcggctcactccagcctgagcaaaaagagcaaaactcccatctcc

SEQ ID NO: 656221 - DNA, 134 bp, Homo sapiens
cacgagcaggagccaagcatgcatgcatggctgaaggtcgacgtgtatcaccactgcggtgcttgcctccctgtacaagtccgacgacacgtgagcaccgtgctgaccatccaaatatcgttaagctggagcct

SEQ ID NO: 656222 - DNA, 1132 bp, Homo sapiens
  misc_feature (443)..(443): n is a, c, g, or t
  misc_feature (492)..(492): n is a, c, g, or t
  misc_feature (542)..(542): n is a, c, g, or t
  misc_feature (562)..(562): n is a, c, g, or t
  misc_feature (667)..(667): n is a, c, g, or t
  misc_feature (688)..(689): n is a, c, g, or t
  misc_feature (823)..(823): n is a, c, g, or t
gctccggacgactgttacagaggtctccagagccttgctctctcctgttgcaagagatggcatagtctgtaaggcgaagaaactcgattcgcatccagtttgcggaagcaagaggcaactagttccaatgcaataggatcactgtagtgtggtgtgggacaagttggtatggcgtgtgctatcatctattctgggacaagtcatctggcttagaatgaaccttgcatctctgtgagatagtctgtgtgaatgagtgaagcttaataggacgaaatgatcggatcatgcaagcattgggaggtgttatttatcgttctaggagtagcacttagataatttggtggcagtactaataggatctagtatcgtagatggatcccgaccgacattactgaaaagatgtgttaaggatggttgttaaccttgccagggcatgttccagntgcgatgactagatgcacagtgggaaccgtatgtcagaggccttcgaantccatgggttggcgaggatgacgactggtggaactgggtcatatctaganatttacacatataacttccntgcgaaagagtgccgatctaataggtgacgaaagtgcccgtgggacttgtgccagttcaactaaagtttggtagagttattccaaatcccgcaagattggaacanttgctttgacggttactgttnnacctggtaacactaaggctggacttaaacccagaacagccggcggtgactctggacacgtggactgtaactctggggattcgtgctagaatttgcgcgtaccttcatggcttgaaacaactttggcattcatcnccagcagcatgccatggcatggattttcgggggaacatggcgactcaagtgtggctgtgtggagtggtgtgactgtggcagggtgtactctccaggaattgaatccaaaaatgggaactgacaatgatagtgaacaatggaagggaagtgctaagatggtgggtgacaagtgcctatgaagtccacaggctaaagggttacaacagggctatgggatcacgtgtggggactcattgatcccgttgaaactatacggatctccgtgcaccaggtaggatctggctcaataactacaacccagttccagcg

SEQ ID NO: 656223 - DNA, 121 bp, Homo sapiens
gaagcacgatggcgcgtcccaggaagtcttaccccctcttctatttattaatttgcagacgccagcccctcccctacttttagggtcagctacgtctcttgaatagggtaccgatgctcga

SEQ ID NO: 656224 - DNA, 768 bp, Homo sapiens
aggacaaatccaggacagcctggctcctggccccgagcctcaggacgaagaccagaaggacgcacttccgaggtggaggagctggttcatctctgagccaggtgaccctgacgcagccatctggttgggagattcgcctggcgtatctgatgtactctacggaaatatgcgaccgtgtcctccctcatctgggatccctggagtcgttgtctcacggcatcctagctctctagtagacacagtaggtcgagcaggacagcgaccgatcttatgatctcgcgtgatagggatcctgatctcgcgtgagaagccaaagtcagcgccgggccaagtaaagccaaggccagtctcgtgcgctggtggtctagtggagggcagggccaccgccgggtgcacaggaaggcccgggagccccaccaggaagagctggtgccgaccgtcatggtctggcagatccctctgctgaatatataagcaggacggcgccttctgctgtcagaatttgcaatcaagggtgacttctcagctaatcctacagcctgagtggttaagctggtgtctacactggttgggactgaattaacaacagtatttgggggagaaacgtgcaatagcgtaatggtggtgtccctgccaaattccttccttctcttctgtacagcacgaagttattacaagcacttctcacgaaggcagaagactgatgcgatttgcgagtacttgagtgccggtctgggaaactaccacattctttttgactgctgatca

SEQ ID NO: 656225 - DNA, 181 bp, Homo sapiens
gggtcggccggacctaatcacaaggtcgtgggaatcatgcatataagggaagtagaagggggaaaaaatatcttaggatgcactctatggatcaaaaacccttacattccaagtgttaagccttggttaataccaatcgttggtgggcatatgggggggtacagttacgacatggtgatta

SEQ ID NO: 656226 - DNA, 229 bp, Homo sapiens
caccagacatagcatgtgcttgtgacttgctgagcattatggcatgcttgaattctgcgaccactgctccaagaagttccctgtgccatggacactttctttacaagaagagagtaatgcaactggtgccaaatgatgaatattctaagacccaagatgattctttatgagactgtcttctacttggatcagaacatgaacagctgtgaaattagcgcagtgagatcag

SEQ ID NO: 656227 - DNA, 1111 bp, Homo sapiens
taaataccaatatagttctctctaaaatcccggtgtttcccaggacaaagtgcgggggcaggctttgggcaaaaaagagttaaaaggggaaatgtggtggaaaaaaagtggaatgtggatgtggcccaggcccagggttccctgtgccttggggcaaatagggacttggggttgcctctcggggatgtgggggaggtgaacaagcaagctctcccctctggtgtctccaagttttatgtgcgaagagagcgcggctctgggggcctcccctctcccctcccccagaggccgtgaaaacatatttcttcagaggaatatatacttctcgtgcacctttcacagcccccaagacagagtggcccgaggcgcccgtggcgccctcctctctggggctcctagagaggagtggcgccccttgtggcgccaaaaaagagggcgccgtgcgcacgcaaagaggccggtggtgggggtgggcgctgggtgagcaccccgctggggcacgagcgccccgggcgtgtctctctttagcagagggtgcctctgtggggggccccgggcgagaggttgtgtcagagagggtttgccgtggtgcccctcctgtgggctttgctcgagggggggacatatgcttcctccccagggacagtgaagtggtcctctgtggtggcgccccccaaagcaacctgcgggaaaaatcccgtgggtgaaccacccgtgtggaactccccgtggggccaaccatccaggtggatactcccgagggcatcacggggcccgtggacaccccacaagtggcctcaccaaaagggggcgcaaagccacagcgtggtcccgtgcaagggacaaccaacccaaaaaggccctcccacgggcggcagaaaactcaaagcggggtcaagcacacgagggttggcccatagtttttgctcccgttgtgagcactcgcccgactaattggttcgcacaactcgctctaacagacgaagggctcccacagcacttgacaaacgacaatgggtgcccccctgtgacaccaacggggggacaccacctgtcatataggccagcaaccgttgtgaacacccccctacgggtgtcgcaaccacagaat

SEQ ID NO: 656228 - DNA, 139 bp, Homo sapiens
ggaacgaattccagccgttaccgttgagatttaggtaatcgataagaagttcagaatgaaatggtcttagaaattcaggtggtgggctcttgtgtttccacgtacgtggtacgtgtcgagacacaccgggttctcagag

SEQ ID NO: 656229 - DNA, 336 bp, Homo sapiens
gagagagacagagacagagtctcactctgtcacccaggctagagtacagtggtgcaatcttggctcactgcaacctctacctcccaagctcaaccgattctcctgcctcagcctcctgagtagctgggattacaggtgtatgccaccatgcctggcccattttttgtatttttagtagagatggggtctcaccatgttggccatgctggctctgaactcttgacctcaagtaatccgcctgcctcggcctcccaacgtgctgggattacaggcatgagccacctacctgcccagcctaattgttcttatgttctaatctctgtcgacgcggccgca

SEQ ID NO: 656230 - DNA, 423 bp, Homo sapiens
cattataggaagcaaaatgttaattggaacaatgtcttcttctgaaggaaagtgctgggattacaggcgtgaaccacagcacctggcccatctgtggaactcttatcttactgtcacttcacaatcattggaacaggaaagactgtatttataattactgatttcagtttgctcacctaaatcctagatgctattttttagtgtgtgtgtgcgtgtgtgtgcgtgcgtgtgtgcccgctcgctctcgcgtgctgtggtgaatgattcctgaattcacattgtctgcattaggcctctggcaatctgtcttttgactttactactcaatttaaccatcctatcttgacatctttaatgcgtctttactataattaccctccgtgctacgcctgataatttttcatttttcttcttatgatgtct

SEQ ID NO: 656231 - DNA, 736 bp, Homo sapiens
  misc_feature (59)..(59): n is a, c, g, or t
  misc_feature (66)..(66): n is a, c, g, or t
  misc_feature (111)..(111): n is a, c, g, or t
  misc_feature (136)..(136): n is a, c, g, or t
  misc_feature (221)..(221): n is a, c, g, or t
  misc_feature (230)..(230): n is a, c, g, or t
  misc_feature (238)..(238): n is a, c, g, or t
  misc_feature (250)..(250): n is a, c, g, or t
  misc_feature (252)..(252): n is a, c, g, or t
  misc_feature (259)..(259): n is a, c, g, or t
  misc_feature (293)..(293): n is a, c, g, or t
  misc_feature (313)..(313): n is a, c, g, or t
  misc_feature (341)..(341): n is a, c, g, or t
  misc_feature (352)..(352): n is a, c, g, or t
  misc_feature (413)..(413): n is a, c, g, or t
  misc_feature (416)..(416): n is a, c, g, or t
  misc_feature (438)..(439): n is a, c, g, or t
  misc_feature (441)..(441): n is a, c, g, or t
  misc_feature (453)..(453): n is a, c, g, or t
  misc_feature (469)..(469): n is a, c, g, or t
  misc_feature (488)..(488): n is a, c, g, or t
  misc_feature (490)..(490): n is a, c, g, or t
  misc_feature (495)..(495): n is a, c, g, or t
  misc_feature (499)..(499): n is a, c, g, or t
  misc_feature (548)..(548): n is a, c, g, or t
  misc_feature (558)..(558): n is a, c, g, or t
  misc_feature (568)..(569): n is a, c, g, or t
  misc_feature (591)..(591): n is a, c, g, or t
  misc_feature (593)..(595): n is a, c, g, or t
  misc_feature (609)..(609): n is a, c, g, or t
  misc_feature (617)..(617): n is a, c, g, or t
  misc_feature (670)..(670): n is a, c, g, or t
  misc_feature (672)..(672): n is a, c, g, or t
  misc_feature (675)..(675): n is a, c, g, or t
  misc_feature (687)..(687): n is a, c, g, or t
gggtcctgacagagttcacagcatatatggtggattcttgtccatagtgcatctgcttnaagaatnaacgaaagcagtgtcaagacagtaaggattcaaaccatttgccanaaatgagtctaagtgcatttactcncttcctggcattgattggtggtaccagtggccagtactatgattatgattttcccctatcaatttatgggcaatcatcaccaaantgtgcaccnagaatgtnactgccctgaangntacccangtgccagtgtactgtgatgagctgaaattgagangtgtaccaatggtgcctccnggaatcaagtatctttaccttaggaatnaccagattgancatattgatgaaagaggcctttgagaatgtaactgatctgcagtggctcattctagatcanaancttctagaaaactccaagatannangggagagttttnctctaaattgaaacanctgaagaagctgcatatanancacancaanctgacagagtctgtgggcccacttcccaaatctctggaggatctgcagnttactcatancaagatcacnnaagctgggctctttgaaggatngnnnaacctgaccttcantccatctnccaggacaaatcgggtgaaagaggatgctgtttcagctgcttttacaaggtcntnaantcactcgaatanccttgattgagcttcaatcaagatagccagaatgcttcttggtcttccg

SEQ ID NO: 656232 - DNA, 191 bp, Homo sapiens
cgagtatgcaggcgatctagtatatatcaggatgggtctcacgtagagttaaaataataaaaacgacaaagagaatataaaaaaatcatccaacggactggacatggcaaatggtgaattccatattcagacgaacacaagtccattatgatagtgcacagcaaagtcagtcattcagtgcctcaggttgt

SEQ ID NO: 656233 - DNA, 159 bp, Homo sapiens
  misc_feature (156)..(156): n is a, c, g, or t
agatgcactacgcgctgctgaggagaggtgccactgactcagtacagacagacggtgacaccgtcagtggtacattgtgaaaggtcaggatgcgagtcatctctcccgcgagcaggtcaccatgacacccgctgaggactcagctaccccggccgngca

SEQ ID NO: 656234 - DNA, 197 bp, Homo sapiens
agtttccagagtaggcaactagcgggacggagcgtcatgcatgtactcccagcagttggggaggcaagacaggcggatcacctgaggtcaggagttcacgaccaacctggccaacatgtgaaagcccgtctctacaaacacacaaaaattagccgggcatgattgcgggcgcatgtaatcccggctactctggaaag

SEQ ID NO: 656235 - DNA, 1188 bp, Homo sapiens
tgggtctgaaaacactttattacacaaattactttcagattctgaaaatagtgttctaacagggtaaccatctaaaaataaaacatcccaaaaacacaccaagcgtggaagaaaaatttaaaaaagaaattataaatagagaacttttttatttccttcagtgtggcaatataagtgtcgaggtgattttaaaaaaatgaggaaatttagcagccttgggtcgctcagtgttagcacaaagagttttcctcttttatgtgccacgaggcttaaagaaagtgcgtgaacgaggaagaggccaccaagagaaagagaccacgtggccaatgtgacagaggtgctagggtgggacaacaattacgtggtgttctcagagcaaaagaatgtggggtatattttacattccacccaaagaagttcttcaaagaggtgtcagatgtggggcaaaatttcttccatgtgtggtatagcatttagaaatttatgtgagtggacaaaaggaggagcggcgttctctcatagctctagtgtgtctcataataagagaccaagtggccacgggggttagtgaaacttttatgaggaaaaactctcctctcaacttagaaaaacgagaaacgccaacttttaaccaaacagcgaagttaacataagaggggggttacagttccccaaacgagactaagtacagtttcacacattaatatacacaggaactttaaaacgtgctaaaggggaaagggaatcgtgacattcgggggtaaatttactcaatctaaaacaaaaagctgggtttaccaggagggaggaaggtgcgaacgcaggcaaaagggtgcgtgaaaataaccctcttgtgagttaacttccaatatcgccctttcctgggcacgcgcccctagtgtaaacgcggtaaacctttttgagtgtggcctatagggttgaaaagattccacgagtataccccacaatcctccttaaatcccgaatccgaacacccgcatgttggccacacacggtagactaggacaaagacacgctaatgaggcaggcacccacaaggacaccaccgccagagctccaacacaccacccacgaggagggaaagacccccagaatcacgaaccacacatctacgcatagagctctacgctctctccttctttccagatcctacagacggggggggga

SEQ ID NO: 656236 - DNA, 409 bp, Homo sapiens
tttttggccggggatccatttggggagagagtccgttttaaaggtaggaccctttatgaatggttgggggttgaaaaagtgtggggttaaatgggaacctggccggacccacttaatggcaaggattttccgggaaatggtggcccccttcaacttttggccattggggccattacttaattccggtggcaagattttgttcaagtttaataagttgagtcccattgccggaactggattaaactggggggtaccaggcgattaccttgtaaaatgggccatgggcaagacccaccaaatggcttacatccgggggtaatttcccgggaaattttggcaggggattcagttgaattggggggtaaccgggattttggcttttaataaggttttaacacatggcgaccaa

SEQ ID NO: 656237 - DNA, 241 bp, Homo sapiens
cggcacgaggttttcactgagtatattttcaaggtgcatcccagctgtggcatgaatcagcatctcattcctttttattgccaaataatattctatcatatggatatgtcgcattttatgtatccattcatcagctgatggacatttgggttgtttgtactttttggctaccatgaataatgctactatgaacttttgtgtacaaatcttatgtggacttgtacacaaaagttggcggccg

SEQ ID NO: 656238 - DNA, 188 bp, Homo sapiens
gatggctcatctctctgtaatgtctttcacccctagcaagggagtggggcttggttcagaggacccttgttggaagggccagatttagactcagagctgtctagtttttacacgcggcacttgtattagccagcctaggtttaggtagtttctaggatagctgagccaaacaagccactcacacccta

SEQ ID NO: 656239 - DNA, 966 bp, Homo sapiens
  misc_feature (965)..(965): n is a, c, g, or t
cactataattcagatggtgaatcctaacaaggccaccattggtgtggggctgggcctgccatcattcaaaccagggtttgcagagcagtctctgatgaagaatgccataaaaacatcggcaggagtcatggacttgaacacgcagatgctagcaagactcccgtaaacgggccacagactgggaggccaccaatgaagccatcggaggagcaggtggtcgtcgggaatcctacctgcgagtggttgcgggatcaggagaagacaggctcggcaggtccgagggcccaggcaggcccggaaagccagtcgccacatgcagttcggcagagcagaagctccagtggtctggaggagtggactagacggtccccgtgggagcggagttcagtactcgtcactctgagtcaccctgtagctgcatgctgagatgtggcgcatgaacgcccccttccccaggctctgtgttagctcttggcaaactccttcgcctgtgcgccaggtacaagcagtcagttctcggcaggggccgaccgggcaacttccccccttgtgtccctctacctgctttggagtgccgggcctcattcagcagatgtccccctctgctttggtctgaatgactgggatgatgatgagatcctagcttcggtgtggcagtgtcccaacaggaatatctagacagtatgaagacaaacaagtgcacagagaaccgccccagacaagagttggtgggacccgggattgaaacattccaacccagtatcctgctctcggggccactaactattggtcttcctttgctcctcgtcttctgttcccttttctctctatcctttgtagcacctggtttttcttgcggcctatccgttttccgtgtgcgggcccctcaacacttcaggcgcggggaaaaacaaaatgccgccagaaaagatgcccaaccagaggggaccatttatttgtgtggng

SEQ ID NO: 656240 - DNA, 1188 bp, Homo sapiens
gtgtgttggccgcacatttgttgctccggcgtagatgctgtgttgacttcttttactcgctctttgttcctatgctcctccctctcctagtgtcccgccatttttcccccccctttgggtaaggtggtggaactacccccttgtgtggggtccgtctctgtcctctagcctctagataatgtggcgggagttttgtgggcgtccttgtgggtcggttccccacgagatggcggactacccactgcgattgggttgtgttatctcctctcgctctcctccctgtcgccgctcccctgttgtgtgatgtggctctcgctatggtctcaacacgattcggcagaagtcctggattgtatttgtcgcgccccctggtgtgctaagaccacgactcttgggtggagatttctgatttctcccctcgtgtgaaccccgctgttgtcccgctggggggccccccccctgtgagggccttttttttgtgtgttctgtggtgcaaaagcccacaccccgccctgctcaccagtggtggatagggggccacttttggctggggtcacagagagtggccgcactcacacacacagggcgcctccccgcttccccttgtcccccccctctcgggttttgtgtctttctgggcgtgtggcccccctgggcctctctttcttgagaggagatctccccgtcttattatgggggcaaagagttccccttgtagaaataggatagtccgtctcaactgtttgtggggccggtccccttgtataggaatagcgcccccataacactttgtggggtcttctcagacaagatgggtgaacacccccccgtttgtgtaaccagagggcttttgtgttgtgggcgtgttccagagaacatccccacatcttacaagcctctctgatagtcaagagaccaagcggacagaggcgtggcgctccccccagtctccccagccccccatgtgccctgttgtttgcttgggggcccataagcatggcgacatgcgccccccgttaaggccccctgccaccatatttctccccctctcctgtaaacactcggggccaacatacctcaccttttttaactggcccattgtgggtaatccccgctgcccggtcctttccctttccgcggggtattttgtggccctgaataaaagtatcattttttttttttttccta

SEQ ID NO: 656241 - DNA, 891 bp, Homo sapiens
agtaggtatagccaaaccaccatggtagcatggtatacctatgtaacaagacctgcagcaatctgcacctgtatctcgtggttttattttattttttagaggaaaaagaaaaggtacgttccattggtatccattattgggtgcaacgtagactacgcttacgatagaggataaatcgcatagtttgtgtaaagtatggcccccgaatacatgtgacaaaaagaatacatgtcccatttgcaagagatttcctctaaagaaaagatgtattccactttttgtaaggcggccagtggagacgacatattgtgacaaaatttctgcatgttcattgtgcaaaatctttcacatttgcgctcctcttgtcccgaaattttgaccaggagtatacatccacgaagaatatctctgacatagagtattcgcaacatccacttggggggacacatgggttgctgctgtgaatgttactcaaagggtcaacggtatttgccatcgcgcgaaaaagctcaacacttatttacgattgcactttggggttttttgctcaccgaagcgctactaaccaactattagcgtaatgcagcgaatgaatggctgggcagaaatgattttccgcaagaatgttcgtgaccctgttttacatcacctgggacaggatacctttctgataagaaccgcgctgttctctagccaggaattgccataaagacgcatgctgtcttgtgaccaggtacggaccagttcgtggaaacccagcctacgttgcgggcatggaattctcacaacggaaatgtcgcagcaacaaggagggggcgacccaaagtaatcataccttgatttgtactcacatgtcccaccctctgacccacacccactttggggttgggc

SEQ ID NO: 656242 - DNA, 353 bp, Homo sapiens
  misc_feature (353)..(353): n is a, c, g, or t
ggcacgagggaggctgaggcaggagaattgcttgaacctgggaggcagaggttgcagtgagccgagatcacaccattgcactccagtctgggtgataagtatgaaacgccatctccaaaacaaaagaaaagcctaattccccaagaactgtcagtctttcacctgtctgctagctcccagggagaccccacttgccagggctgtctacatttgtcctgagatctcttctggtgggaacagcactttcctcaggaaagtttgttggtcatcagatccatgattgtcgaagctgcctgtggtgatggatcagctggggttaggttttttgggtgggggtggggtcttgcttgttn

SEQ ID NO: 656243 - DNA, 200 bp, Homo sapiens
cccccccccccccctgtttttagggggccccccaagaaaaccccccccgggcaaaaaaacccccccccctgggttgttttggattatgggggccccccctaaaagttttaaacccaagggaaaccccccttggatttaaaaaaatttgccccccttttttttttttccaaaagaccccctaataaaaattttaaagggga

SEQ ID NO: 656244 - DNA, 201 bp, Homo sapiens
gcaaagcgctgagggagctcggtacgccgccgcctcgcaacccgcagacctcggcccgccgccgccccgttccccagagaacccatggagtctggcagtaccgccgccagttaaggaggcacgagcctttcgagaatgtaagctcttacgtccagaggcataacaatcaagcgctgctcaaagattctatttgtgccagtt

SEQ ID NO: 656245 - DNA, 440 bp, Homo sapiens
  misc_feature (90)..(90): n is a, c, g, or t
  misc_feature (237)..(237): n is a, c, g, or t
gctcacacctgtagtaccaacactttgggaggctgaggcaggtagattacctgagcccaggagtttgagaccagcctaggcaacatgganaaacccatctttacaaaaaataccccccccaaaaattagccgggcatggtggcacatgcctatggtcccagctacttgggaggctgaggtgggaggatcacctgagcccagggaggtcaaaattgcagtgagccgtgactgcgccantgcactccagtgacacagtgtgagaccctgtctaaaataaattaatttaatttaaaaataaaaataaatttaaaaagaaaagaggctgggtgtggtggctcacatccataatcccagcactttgggaggctgagataggtgtatcactggagcccaggacctcaagaccagcctgggcagcatagtgagaccttgtctctact

SEQ ID NO: 656246 - DNA, 463 bp, Homo sapiens
attcgcggccgcgtcgactgattgctagaaactgaatccaggaaggtggatctaagctgacgcaagagcttttgtaaactgattacctttgccttagaaggcagagcacataccaggaaggggagctgggggcgggtcattcatgtctggattgaaagcggagtacgctggggcgggagggagaactggatccgagaccagggaggcaggagactaaggctcctacagaagaaactggttaaaagattccagccagtccatgctactctgcctcagtttcctctctaggaagtttggaagtggtccacgacccttaggaaacctaaaagaaatctccccaaggcagatgggtggtcatcatcagattgctccctgccctctactctctttcaggatatcagcagtatattcagcttgagaaatacctccaggatcatgcagccacagactgcagaaagacagc

SEQ ID NO: 656247 - DNA, 481 bp, Homo sapiens
agcttacctgtgtacaaacccctgtcagcttgccggcctgccttggaaacccctcgatgtatgatatgggtcttttgggtgataaaaatgtctagaataataatgatgatggttgacaaccctgtgaatgtattttttaaagcacgaattatcacataaaatgattttatatggtatatggattatgtgtgtgtgtgtgtgtgtgtgtgtgtgtgtagtgtgtgtgtgtgtaagagagaatctgtgcgcctcagactcccagagtgatgggattacaggtgtgagccagtgcgcctggccctgtgtgtgtctttaaaattagtcgttatcaattgtggctaactctaatcatttgaataaccctgcataagtatttaagaacttatagctaaaacaaacctaaaaatttcttaaatctagtgtactgtgacacaaatgatgaattagaggcacaaaaaagctcagtgattgagcacctatt

SEQ ID NO: 656248 - DNA, 193 bp, Homo sapiens
  misc_feature (101)..(101): n is a, c, g, or t
atgttcgatcttacaggatgcaggagattaagtgtgtggggctgtactaacagatggagaaatccttcatgtcgaagaacgagtcccgatcctgtgcattnatgtactgtggctgtggataatttaacgagaagggatcataaggaggctgtgtgagaagattggggctgctgaggaaaaacggctggtgtat

SEQ ID NO: 656249 - DNA, 373 bp, Homo sapiens
agattgaccagctgatccatgagctgggtgtagcaggagagctggagtgacgggcacaagccgggagccgatctcctccggggcaaggattttgtcttctccttgcttggtctagtacaccgtcgtgactctcgctttcctcccgaggcagagctcttgctgcttcgtggtgggattctgcgaggtgctccctggatctggggcatgcacccctgggtccctacgcccggggacctcactacgatgccggcttcacactcctagtgcccatgttttcactggacggtactgaactgcaactggacctggaatcctgttacgcacaggtctgcctcccagagatggtgtgcggaacccccatccgtgacgatgt

SEQ ID NO: 656250 - DNA, 140 bp, Homo sapiens
gtcactctgaggatcccggcacatgtgcggcaaaagagtgagcggagatggatcacagccgaaggagtaacggtgctgcaatgatgttagctgtggccacggtggatttttcgcaagaacattaataaactaaaaacttt

SEQ ID NO: 656251 - DNA, 1071 bp, Homo sapiens
ggactgccgcgtccacctgtggtccatctacaagcccaattgcatcatgagcctgacggtggcacactatccccagtgtagagcgtccgtctcaacacgccccgaaggagctcatcttgtggccggctctcagtcgggctccatccgtgtctggcgacctggaatctgccatagaattctgtgcgcgacactcatggtgactagcatagagtccgcatacatcttgcattctcttggatttgccagccgtactggccgagtttgtccgcctctggttcccaggatcacaagcttcaagctctgggacatcaggcggaacggctgtgtcttccgatacagggggcacatgccaggccgtgtcggttgtctccggttcagtgccctgatgtggccatgtggttgcgctgtcgtgccggcccatgaccacatccgtgcagatgctctgtggatctcactgccggcagaagatgatgctctgagttccctggttcacactggggtcctggtcgacgtggtcgagctatcactgccttacgagggtacctcctggacctccggcagctctgacaggacacatccgcttctggtgacctggaagtaagttcccagggtgcgtgagctggcgtcgtaagtggggacccttgggtcccgtcaggagacgttcctcttcaagccagacggtctgctgtcctgtgcagtcgggttgcccaggactcactgtggtgctctcacggctgggaaccctgagcggttgctttgactgtggtcctcgtcacctgggtgccaaggtgtgcggacttggccatctgcaattgaccacgtgataggttgctggcttgtcccagagcaactgtgtcctgcttacatagtcggctctgaacggcgctgttaccaagggactggcactggggtgtgccccgtggcatccttttctaggaccatcctggggcacctgggctaggcttactggccttgccccagggcgcccggtccggtgccatctttgaagcggccccgggaccctgcggcacagcctcggcggtcgaccgcaattcaaatgtggcacctccc

SEQ ID NO: 656252 - DNA, 327 bp, Homo sapiens
gacggggggagccagtttctcacggtggagtggagtaataagcaaagggaagaggctataatggtcaatgtgggaacagattaaaatcagagacatcattatgaactcatgtttagcttaatgtatttacagatggttaaatatgcataaatatgtgtatatacataggttagtacatacacatatatgtccattctatgtcagctgagaaagcgcagacttcagcacatcccagaaacaacaagcgggccagcagcctgaccttggtttctaataccatactccaataaatggaacctgagcttcttggagaaatgactgatttta

SEQ ID NO: 656253 - DNA, 315 bp, Homo sapiens
atagcgcgacagtccccgataagcccgacagtccccgatagcccgacagccccgatagccggacagccccgcatagcccgacagccccgactagcccgcacagcctgtacccactcacgtggcttctcagcgggctgcatggaatgtactaggtagctcaccacacttctaggctaccatattgtacttcactacattttcagggtaggggaagtggtgctggacaaccacaggagagagcgtagagtacccagtatatataacctaggctgccctatggctaaaggtcacagcccctgtacgggctaaaagagg

SEQ ID NO: 656254 - DNA, 281 bp, Homo sapiens
ggagaaggaaagcaaaggagacatcaggaaagcccgggagacagagcctgggtcttctagctaagccaccctcatcggtgtgaaagctgatctcaagacagggtacaccatacaatgtggctgtttcaacaacagcatcttagggagccttctattcaaaccggatctaagttgtactttgggtttgagatgattttgcactgtcacccaggctggggtgctgcggtacaatcacaaactcactgcagcctcgacctcccaagcccgggtggatccttcgc

SEQ ID NO: 656255 - DNA, 127 bp, Homo sapiens
aacatgcgaacggactgatcggaaaagaaaaaagaaaaggaaacgaaaggaagggaaaaggaaagaagaaggagagaggtgcgaagttttccttgaaaaggtgttgggatcagtccgttcgcatgtt

SEQ ID NO: 656256 - DNA, 619 bp, Homo sapiens
gggtcaacataaaaaaaaggtaaggggggaaaaaaaaaaagaaaagaaaattcgaggattatatagctaaaaataaattattaaaaataaaaaaatttggtaaggaagcaagttacaaagtttatctaaaatcgtgtttcttttcacaagaaataatcagtttgaaaatatttttgagggggaattcacatttacagaagaaaccaaaatgtaaaaacttaggtggtaatttatggaaacattatagataacttatagaacaattttttttaaactttactgggatcaaaagattcaatcttgtaaatatccaataccaattcaaatatatcaaaataaacatctgagaatagcaaggaaacttctgataaagaagaaaaatggggactctcactcttgtcagatattaaaatgtatcctgaatagcacaataattataattaaatacattttaaattagggaagaaatggaaaaatcagtggaatagagagcattgagtccataaatgggcccaaataaaactggggatttcatttatggtaaaagtgatattttatgccaatgcgaaaaagaaggattattgtgttccacagtttgatgtcaaaacagctgtttcgg

SEQ ID NO: 656257 - DNA, 596 bp, Homo sapiens
  misc_feature (573)..(573): n is a, c, g, or t
atgttacatagactattagttgacttgggttggtcatagtcaggtcgagctctatttcctgtaaatagaaacacacctccctttctacactgaggtgatttgttattcttggctgctaagcagatttctagacacgccaccctcctatgggaggaacaacaccctacactgttaagttctttagatcttaagggaaaatatccttgtctaactgaaccctgggtctggctggtgtctgaggccaaccacacacacttcagcttgtggcaaaccacaaagtcattacctccactgctctgtccaaaatcgggagactggcagggggtccgactggacaaacaccaccctagtggcctcaaaactgtcatactctagggatgtttccaatgtcttatagccgcaaacttgggctgggcacccagccgcaaacctctgagataagagccccaggaaataagtgtcatgtgttaggcttagtcaatccttgatatcagcaaggtttctaaaagaattcttggcttgaccagctctgcccatctacccaatttccaagtaaactatcttctctagaanaagagtgcacctggaagggacgt

SEQ ID NO: 656258 - DNA, 144 bp, Homo sapiens
tcaagactgctgatgcagaggacatcgtgaacacggccctggccctgacgagaaggccataatgacctatgtgtccatgcttctaccatgccttttcagtgagctgcagaagtgctgaaactggccgccaacctggatctgtaa

SEQ ID NO: 656259 - DNA, 379 bp, Homo sapiens
ctggtgctgtgcgtcgccgcgagacggctgatcgtcctgaccgtgctgcttattatcggctcgcgtggcgctgttccgctttgtgccccagcagttctttccggcgtccgggcgactggagctgatggtcgacttgaaactggcggaaggcgcgtccttgagcaacacggcggaccaggtcaaacgcctggaggccctgctcaaggaacatgccggcatcgagaactacgtggcgtacgtggggacgggctcgccacgtttctacctgccgctggaccagcaactgccggccgccagcttcgcccagtttgtggtattggccaaaaccatcgaggagcgcgaaagcctgcgcacctggctgatcgagaccctcaacgaa

SEQ ID NO: 656260 - DNA, 621 bp, Homo sapiens
ggccctgccccaattgttcagcctccagacgcgccatgtgggccctgctgggccgccgtactgccctgtgtggctgctgtgctctccctgctgtgtggcctgcggactggtcgtgctcctgcgtgagcagcctgctgccgtccatgccacctgcgctgctgctgctcagcctgtctgtcgcgccgcaggatgccccgtgtgacatcttgtgacggtgcgcctgctgtgtctgcccgtgaccgggcagtgcgtggccctcgctgcgtgacgtgcaaccaggcatgtggccctgacatcgcactgacaaccggcgaacgaccgcaacgcagcgcacggacgcccctgatgacagcacttgcacgggacccggacgacaccgaccccgcacgcgaacgcggacgacgattggcatagcctagcgtcggcacgcacggccacttccattgccatggccattgagaccgagcgagtacccacccagagaccgacacgattgagtagttcataggggatatacgaacaccacttgcaaacaggtgtccaaacgatggggtgagcaacacagacgtgcgacacaccgtttcatgacaacagaaatgacaccatacagaagcgcgccag

SEQ ID NO: 656261 - DNA, 194 bp, Homo sapiens
cccctcctatcatgcattttttttttttggagaaggagtctcgctcttgtcggcccaggctggagtgcaggggcgcaatctcggctcagctgcaagatttggcctccggggttcaggaattctaatggctcaagatcctgagtaagtgggattacagggcgtgcgaccaggtccagtacattatttttggtggg

SEQ ID NO: 656262 - DNA, 244 bp, Homo sapiens
cgttccgtcgccgctggtccaccgaatttcacctctatgccggcgcacttacgatatgccccccggccgtccctctataatcttgagcctcggttccgtataaacctagtcaaaatagaaccgcggtcctattccattattcctatgctgcgtgtatccagtgcggctcgggcctgtctttgaacacgtctaacttattctcaagagtaaacagcttcgaggccccgccggggacactctagcg

SEQ ID NO: 656263 - DNA, 743 bp, Homo sapiens
agcggggcgaccagaactagggagctggtggagaaggtggcggccgctggaaggaggcccgggaggtggctgaggggtccaggcggcgggacgactctggccttttgaagaccggggtgggtgctctctaggaaactctacagagaagaatgtcagatgcagcagaagctccccgagaagcaacaggagaccatggagaaacagaaatgaccagaagaggaggaacctaatccaaattatacagaagtagaagatccacaacaggaatcacaaagatgacacaatagcatggagagagtctcaggaggaggagacggaaaacgggcgaggcggcaccggggcacggaggagggcgcacagcaggaggcaggggcacaggaggacaaaaagattgtcatggaagaaactgaggaacaaggctggagaagtccaagagacaggcggcttcaggaactacaggaacgaaagcacagtagagccccaagaagtcacagcgtccatgatccgtctggagacaaccagattactgattccagtcaatcacatcaggaattttcccaaaaagccaaagaggtagcaaagtcaaagctttccttacaattggagcgatgcagaaaacagatgagctttcacagacacctgagcacacaaacttgacttcctgacttcggatcaaatccagtctgaggaacacgcagatttaggccccgaaacagcagcctcaggagaggttgaggagaaaa

SEQ ID NO: 656264 - DNA, 102 bp, Homo sapiens
ggatttgctggtgcagtacaactaggcttaatagggacatgaaagagccatgatcgcgccacctcactccaggctgggtgacagagtgagaccctgtctcca

SEQ ID NO: 656265 - DNA, 2880 bp, Homo sapiens
  misc_feature (831)..(831): n is a, c, g, or t
  misc_feature (2874)..(2874): n is a, c, g, or t
agcggtcttttttttcccttttttaaataaatgtcaatttgatatcaagtaaaactattgtcattattgatcagaaaccatacattctgaaaatgaatccagttttcccaagctggcagaagtcagagatcatttttcaccttgatctgtgttgcgtttgtacttagtgaatggcagtgtggttgattggaagagcttgacactgatgtttggaaaaattctttattctagtggtcattttcaaacttgtcttctgtagagaggggaaaaattatgtatttgcagctaaagcgaagagactggcacaataattattaattgtgttagttcatttctatattaaatgaagcatcttcacaaatcaggtttgaagccattaaaagcaaaattttccctagtttaattaatttaaaattctaaattgcctgactacttagaatcttagaaacgccctgctagactgattttattatagaaatgttaacatgttcctcaacattttctcaagaaaattttcagacatatatcaaagttgaaaaaactttgcagtataaccactgctagattctgccatcaacatttgactatacttgtattgccatgtatctgttcatattctctatccctcttttcatccatcgatccatcagattttttttttaaagaacattccaaagtaaattttaggcaatacactgccctaaattcttagcatgggtgtcattaattaaggtttagtattcgtttaaatatctattttgaaagtggtgtatgaagttgataatctgagccaattaacatacttttttttttttcctcctgtggactttngtcttccagtttctctttttgtgtgtacttagggtgagggaggacaattcctttcaaacacaagtttattttagaattggtcatttttaagtgcttgtcataaattttaaagtttcaatataatttttcttttccccacttctgataatgtatttttgccaaactatgcagcttcttcaaaaaactgtaaattactgattggggtttatgaaatcagcgaatacctcatttcaatctgttgctgcttttctccctcttgtcacttctcctttcactactttcagctgctctaccagaaggtagaggggagtaaagggtcaaacccctatataattagctgttttaaacaactctaggagagcagattaagtagcttagtaagttgaaactattaatttttctaaagaatttgatttgaattccttgagaattgtaattatccacacttcctccagctataattagcagaattaaaaatgattgtactgtacaatgagttgttgaaattgtaagccttagtaaccatctttagctttattgtagtcatgtttagaaaaaattatttttacatatgcctttatttttatgcccactttttgtggataagattctttagataaaatctaaagaattttaagtgactttctccaggtcatgaagattcaatgggtagaattgaatcagaattgaaatgttccagattcatattcttgtgtgtgtttgataaaattcatggcttccaaagtaactgaacacttcctttgggcccttggagggaaaatccatatttttactaattacacttttttttttagacatctggcagttctttgaacttaaacatattctcatggccatagttccaaattaagcccgacgcagttgctaaaaatcttgctgcactgttgaatactaataatgcaacatttattggatgtttttgcattttgatgaccttcatgattcatttataagtctttgtaagtgcttaagtgaccccctcactagtgaaaataataaatgttctatatcatttattattatttgtgtattctctacatgatatatttttttaaggaagagtaactccacatgtcagaatgagtgatattatcctagggcaaagcgcaaatagggcagtttgtttctactctgcaaatatggcatgtataggaacaaaactcttttggagtggctggtcattgttttgccctcttttggtacctgagtacctttctggggttttgtaaatcgtgtgtcatttgtaagaatttcacgttaactctgcgttacttggtgttcacctgtggtatccttgactgaccataatgatttagtttgggtatgatgtgtctgctttgaaatgccttactggagtatgtcagatcctgctttaaagcattccatatatctgctgggacaataagttgcttctccttggaaatatgctctagattcagaagcaaaaccgattttgctttcaccattaaggttgcattttaatgcagttattgttttaaattagagaataaaatgtaaaaccaagggaggctttagaaccctttattgaatggcatggcaaacttttaaaactgcttttgctatttcactagaactatctttgataaaggatatagctaaaaaatgtcagcccaaactgtgtgtaattagggttgtttattaaaattttctctaaatgtcatacagaggcttaagatctgtgtatgctgttgggtcggagtgccagtcactgctttggaagtctgtgttctggggctgcagaatgacaaacgtgtcatgggattaaaaccaatcaactgtgaattgtgaaattgaaactactctttcggttttattttctttagcatattgagtatagaaatctgaaacttatttaaaatttatactgcttttgttgatggctcattttggctgtgtatcctcacttatgtactgatttctgataaaggcttgacattattataacacgcattttgtgttccagtttaataaaacggtttctgagtcttgtctgaaaaaaanaaaaaa

SEQ ID NO: 656266 - DNA, 2786 bp, Homo sapiens
  misc_feature (831)..(831): n is a, c, g, or t
  misc_feature (2769)..(2769): n is a, c, g, or t
  misc_feature (2786)..(2786): n is a, c, g, or t
agcggtcttttttttcccttttttaaataaatgtcaatttgatatcaagtaaaactattgtcattattgatcagaaaccatacattctgaaaatgaatccagttttcccaagctggcagaagtcagagatcatttttcaccttgatctgtgttgcgtttgtacttagtgaatggcagtgtggttgattggaagagcttgacactgatgtttggaaaaattctttattctagtggtcattttcaaacttgtcttctgtagagaggggaaaaattatgtatttgcagctaaagcgaagagactggcacaataattattaattgtgttagttcatttctatattaaatgaagcatcttcacaaatcaggtttgaagccattaaaagcaaaattttccctagtttaattaatttaaaattctaaattgcctgactacttagaatcttagaaacgccctgctagactgattttattatagaaatgttaacatgttcctcaacattttctcaagaaaattttcagacatatatcaaagttgaaaaaactttgcagtataaccactgctagattctgccatcaacatttgactatacttgtattgccatgtatctgttcatattctctatccctcttttcatccatcgatccatcagattttttttttaaagaacattccaaagtaaattttaggcaatacactgccctaaattcttagcatgggtgtcattaattaaggtttagtattcgtttaaatatctattttgaaagtggtgtatgaagttgataatctgagccaattaacatacttttttttttttcctcctgtggactttngtcttccagtttctctttttgtgtgtacttagggtgagggaggacaattcctttcaaacacaagtttattttagaattggtcatttttaagtgcttgtcataaattttaaagtttcaatataatttttcttttccccacttctgataatgtatttttgccaaactatgcagcttcttcaaaaaactgtaaattactgattggggtttatgaaatcagcgaatacctcatttcaatctgttgctgcttttctccctcttgtcacttctcctttcactactttcagctgctctaccagaaggtagaggggagtaaagggtcaaacccctatataattagctgttttaaacaactctaggagagcagattaagtagcttagtaagttgaaactattaatttttctaaagaatttgatttgaattccttgagaattgtaattatccacacttcctccagctataattagcagaattaaaaatgattgtactgtacaatgagttgttgaaattgtaagccttagtaaccatctttagctttattgtagtcatgtttagaaaaaattatttttacatatgcctttatttttatgcccactttttgtggataagattctttagataaaatctaaagaattttaagtgactttctccaggtcatgaagattcaatgggtagaattgaatcagaattgaaatgttccagattcatattcttgtgtgtgtttgataaaattcatggcttccaaagtaactgaacacttcctttgggcccttggagggaaaatccatatttttactaattacacttttttttttagacatctggcagttctttgaacttaaacatattctcatggccatagttccaaattaagcccgacgcagttgctaaaaatcttgctgcactgttgaatactaataatgcaacatttattggatgtttttgcattttgatgaccttcatgattcatttataagtctttgtaagtgcttaagtgaccccctcactagtgaaaataataaatgttctatatcatttattattatttgtgtattctctacatgatatatttttttaaggaagagtaactccacatgtcagaatgagtgatattatcctagggcaaagcgcaaatagggcagtttgtttctactctgcaaatatggcatgtataggaacaaaactcttttggagtggctggtcattgttttgccctcttttggtacctgagtacctttctggggttttgtaaatcgtgtgtcatttgtaagaatttcacgttaactctgcgttacttggtgttcacctgtggtatccttgactgaccataatgatttagtttgggtatgatgtgtctgctttgaaatgccttactggagtatgtcagatcctgctttaaagcattccatatatctgctgggacaataagttgcttctccttggaaatatgctctagattcagaagcaaaaccgattttgctttcaccattaaggttgcattttaatgcagttattgttttaaattagagaataaaatgtaaaaccaagggaggctttagaaccctttattgaatggcatggcaaacttttaaaactgcttttgctatttcactagaactatctttgataaaggatatagctaaaaaatgtcagcccaaactgtgtgtaattagggttgtttattaaaattttctctaaatgtcatacagaggcttaagatctgtgtatgctgttgggtcggagtgccagtcactgctttggaagtctgtgttctggggctgcagaatgacaaacgtgtcatgggattaaaaccaatcaactgtgaattgtgaaattgaaactactctttcggttttattttctttagcatattgagtatagaaatctgaaacttattttaccgattctgataaaggctggcattatatacacgcctttgngttccggttataaaccn

SEQ ID NO: 656267 - DNA, 132 bp, Homo sapiens
tgctgatttttaaacagttgaacttccttgtactacagtttttgtattgacagccaaatttgtctttctgtacatacttggaagagccatgcagcaagcagaggagaggaacagaggagctgtgtggcttga

SEQ ID NO: 656268 - DNA, 322 bp, Homo sapiens
ctagcaggatctcaatacagcagctatccaaggcaatagagatgagaacctcaccgattctaagaatgagggccagcacggcagcacaccatatcatgacagatggtgaagatgcggattacacatcacttgacaaagcatcagattccacacggcataactcaacatcagagtcctctcataagggttatcattacaaacattaggaatctaggaatctgccttgaacatggactcactatcccgaatatcactcgggcgatacacaaagaatactgaccagcgtaacttggtgactcctgtgtccagcgattcctgggga

SEQ ID NO: 656269 - DNA, 1883 bp, Homo sapiens
  misc_feature (831)..(831): n is a, c, g, or t
agcggtcttttttttcccttttttaaataaatgtcaatttgatatcaagtaaaactattgtcattattgatcagaaaccatacattctgaaaatgaatccagttttcccaagctggcagaagtcagagatcatttttcaccttgatctgtgttgcgtttgtacttagtgaatggcagtgtggttgattggaagagcttgacactgatgtttggaaaaattctttattctagtggtcattttcaaacttgtcttctgtagagaggggaaaaattatgtatttgcagctaaagcgaagagactggcacaataattattaattgtgttagttcatttctatattaaatgaagcatcttcacaaatcaggtttgaagccattaaaagcaaaattttccctagtttaattaatttaaaattctaaattgcctgactacttagaatcttagaaacgccctgctagactgattttattatagaaatgttaacatgttcctcaacattttctcaagaaaattttcagacatatatcaaagttgaaaaaactttgcagtataaccactgctagattctgccatcaacatttgactatacttgtattgccatgtatctgttcatattctctatccctcttttcatccatcgatccatcagattttttttttaaagaacattccaaagtaaattttaggcaatacactgccctaaattcttagcatgggtgtcattaattaaggtttagtattcgtttaaatatctattttgaaagtggtgtatgaagttgataatctgagccaattaacatacttttttttttttcctcctgtggactttngtcttccagtttctctttttgtgtgtacttagggtgagggaggacaattcctttcaaacacaagtttattttagaattggtcatttttaagtgcttgtcataaattttaaagtttcaatataatttttcttttccccacttctgataatgtatttttgccaaactatgcagcttcttcaaaaaactgtaaattactgattggggtttatgaaatcagcgaatacctcatttcaatctgttgctgcttttctccctcttgtcacttctcctttcactactttcagctgctctaccagaaggtagaggggagtaaagggtcaaacccctatataattagctgttttaaacaactctaggagagcagattaagtagcttagtaagttgaaactattaatttttctaaagaatttgatttgaattccttgagaattgtaattatccacacttcctccagctataattagcagaattaaaaatgattgtactgtacaatgagttgttgaaattgtaagccttagtaaccatctttagctttattgtagtcatgtttagaaaaaattatttttacatatgcctttatttttatgcccactttttgtggataagattctttagataaaatctaaagaattttaagtgactttctccaggtcatgaagattcaatgggtagaattgaatcagaattgaaatgttccagattcatattcttgtgtgtgtttgataaaattcatggcttccaaagtaactgaacacttcctttgggcccttggagggaaaatccatatttttactaattacacttttttttttagacatctggcagttctttgaacttaaacatattctcatggccatagttccaaattaagccgggcttgttgcaaatcttgtcgcccgtcgacacaccacaacgggccttctggggagtcgggttgcgacacacacgaacactaaactggagaggaaacccccccatgtaaaagtcgtgtcacacacggcgtgcacccacttgagaagaccccacacgtaattctccacgacaaccatcc

SEQ ID NO: 656270 - DNA, 108 bp, Homo sapiens
gtgagtacaggaacaggagaagcccctgggctgtgagcacccaggtgacaggcaggtggacactggtctgccacatgttgccctcctctgtgccctcctctgtgctgt

SEQ ID NO: 656271 - DNA, 211 bp, Homo sapiens
atatggatctgctgcaccactttgtcgcgcgtggtgcggcgatcggcgtgacgatggcgacgtcgtcgccggcagtgcgttcagcaggctggatttgccgacgttgggctggcccgccagcaccacatgcaggccttcgcgcaggatcacgccctggcgcgcctgggcgatgagatgaccgaggtcgccggccagcttttccaacgtcggg

SEQ ID NO: 656272 - DNA, 115 bp, Homo sapiens
agtgttcttccgatctgattgtgtaaaagcgtgtaacacctcttctctctcactctcttcttcctgcttcggacatgtaagatgtgcctgcttccccttccccgtatgaggccaa

SEQ ID NO: 656273 - DNA, 326 bp, Homo sapiens
cctggaaccctctatggaagtcaattgtactacttaatactaaaaaagtaggatcctcatcaatagatagatacgtaaaggaatagtcaaactacatctacaaagtgtcagtatcaggctgcggcttcaaagccgaagtggtggtaaggatatgaagtggcattttagttgtcgtagtaagcatactgctacggaaagtagatccgatgattacgtgcaccccgtgaaaccctgtagccacaaagacacgtggatccttacactccgtcggaggtagtgcatggtgcttcgtaatattctgaggcttggaggagagagggtccagg

SEQ ID NO: 656274 - DNA, 418 bp, Homo sapiens
gagaaatgctgtcgactgtgcgaatccgcagacgatggagaatgccacttactacggacatgaggagtctgtcactgagagaatgttacccatagagcagtcacgactatatgtagagacctgctgttcctatgctagcccacactggatgcttgatgtgagagagcctttatctgagacatgtgtcacgactaaccgctctgtccaatagagagtgctcacattatgctgatgacggggagaataagtcatggctgatgactgtcataaagctagcccccgtgcgtacggctgaactggaggaggcatagctactagctgaaggtatgactatcatcctctgcagatgctgcgagtctgtgtatgcagattgcatggccatagagctgtctgaacacacaggtggactcagtgctct

SEQ ID NO: 656275 - DNA, 121 bp, Homo sapiens
attgctgatggttactctagagtatcccttcacagaagtatgcatctctgactgctggtgcacactgaaacgaagacagctaagagttgagttccagccttcattgggtttccaaggtcac

SEQ ID NO: 656276 - DNA, 156 bp, Homo sapiens
aagtctgtgggtgccggctctcctgggagctgtagctcagtctgttccaccggggttcatttcttcttcctaaagactccaagacgttcccagcggaaaccatccgcttcctccaaggggaccactttggcacctctcccaggacacgaatgttca

SEQ ID NO: 656277 - DNA, 794 bp, Homo sapiens
tcttactagctgctcgtgtgagactatgccagcacctggcttgtggggccaggatggcattcactccagactgggaaatgcctgagaagtttccactggtgaccactatcatgtgcctgtgcacgttatgactgtgtggtgctgtgtgttctgggtgtgcgtgactccagaacaagcactgggtacctacatcgccaatcgagtgactagacaagctgacacctattacacgacctgcatttatacttgctgtcgctacaggctcagctgctgatacccagtgcagtagctgatgctgtcacctaaccagctcggtttccacagcatttgaactgaatagagcctccacgtggtccacacatgcagccagcctctttaatgtgagatgttgttacctgatacctggtgaagacctgatgtgcgtggaatcatcatctgcattgcttgtgaccctcaatgaagtgaggtgcatgtgtgtactcagtgcctatgggtgtggtatagattggtaaatcgcagtcctattgccatttggagtgctccgtggagctcctacatctatggctatgtttgatagctacctaccggtgaaggcatgaccaagggaagagtgtctgcaattcacttgccaagtgctctcgctttggccataggagcgtgatggctccagtgttgggatgatccgcttgtcagccattgcagagtcagggtaagctgcaagtactttggacacaagaaaccaattcgcgttgcccttaacaacgctgaatctggatcaattgcacaaagatccg

SEQ ID NO: 656278 - DNA, 215 bp, Homo sapiens
gttgcatgaccgaggcttctggcggaggtctcagagaaattttcaagtcatgatgtgagtgcaatggcacgatgtcagctcactgcagcctctgcctcctgggttcaagcagttctccaccttagcctcctaagtagctgggattacaggcgtgcaccaccacgcacactaattttgtgtttttttagtagagatagggtttctctatgttggtc

SEQ ID NO: 656279 - DNA, 777 bp, Homo sapiens
ctcggctttgcctggacagctcctgcctcccgcagggccacctgtgtcccccagcgccgctccacccaggcccagcttgtaccccacctccaccagtacctgaagaagtggggctctcaccctacctgcctctgccatatggaatggcctggtttgcacagatgggaaacccgtttgcggggtggtgtgtctgggtgggcacgtggggcgaggacctgcctgcgggacctctgccctggagctgactagtgcaagctcggcgtcctgcccatcttgggctcgaaggctggtttctcccatctacggaagccctcccaggaccttccgtgcaagccctctgtcccacgacgctaggctctgcctgtccctttggtgtccctcccggcgctcaggtcctccatgctgggtacccttctgggcacctcgtttggcttgatgccatgggttcaagcctggctgggcgccctggcagtcacgtccttggcctgtggatgctgtcctggcccgtggatggtgtcccgggctccacgtacccctctcagtccctcctcttggactccagccatgggcctgtgcgtcgagccggaactgctccaggacagagaagcgccgtgtgtggctgcagtccaggccacttctgcatcgtccagtgaccggggaccatcgcgccgtgtgtctgcgcttatgccactccagcccgggccagagggtgcagaagggatgcaccgagagtcaggatcacctgtgtcagaagtgccccccggggaccttctctcc

SEQ ID NO: 656280 - DNA, 838 bp, Homo sapiens
taattttgggggaaaaagggggttaaaattttggggccgggggggttgtcaaacccctgacctccaggtgatccccccgctctgggacccccaaaggggggggataacgggacataagcctttgaactctggccgggaaaagggccctttcaccagaagtgataaccttaaagtgagaacctctgagggggggcccaaatatcacgagtaaggggggctccaaaaagcgagggaggacccatgtggggaggcagagagaccccagcgagttggcggggtcgcacagaaggaaagggccagaagaaggacgagggtccgaagagggacccccgtgcgcgagacgcatgggagagacgcagaccagagcgaagaaagacacaacccggcgcaaacccttccacctggggagttgggacgccccccaagatggcggggagaaaaaataaaaggccggcgcctggggggcacccagccggggcaaatcttttatatggggacgccggaagccaaagaagccctgttccaggggagggcaagctcctttcctagggggcgcccagggtgggcgctaaaaggagaaggtgcgccacaaaggctctcgagaagggcgcgggactggggaacaatcaaaggcccactataaaagcgttcaagtcttacgaacaaatcggttatgcccagggaaatggaaggcggccaggtgggggtgcccaggcggggggggggtggaacaacaggttgcctggaaagccaaaggggcctcaccaaagagaggcgccaggaagaccggtggaagcacgggagtgtgcgggaccccaaagagttgggtgaggaacga

SEQ ID NO: 656281 - DNA, 602 bp, Homo sapiens
ggacgcgtgggcacctgtgatcccagctacttgggaggctgaggcaggagaattgtttgaaccgggaggcggaggttgcagtgagccaagatcacaccactgcacaccaggctaggtaacagcgagagtccgtctcaaaaagaaaaagaaaaaaaaaaaaatatatatatatatatataaaggaaatttccagtctgtgttattgcagctttgaagttttggaatggttttggtaaatgatgtagtaaaaggaaattgggtaacccagaagattcttttagaaaacaggaccctggtgctgggtgtggtggctcaagcctgtaatcctagcacttggggaggccgaagcaggtggattacgaggtcaggagttcaagaccagcctgggccaacttggtgaaccctgtctctactaaacacacacacacaaaaattagcagggcatggtggcatgtgcctgtagtaccagctactcgggaggctgaggcgtgagaatggcgtgaacccgggaggcagaggttgcagtgagccaagatcatgccactgcactacagccttgggcgacagagcaagactccatctgaaaaaaacataaaaaaaaa

SEQ ID NO: 656282 - DNA, 137 bp, Homo sapiens
cggcacgaggagtacccgcactgcgaggagaagatggttatcatcaccaccaagagcgtgtccaggtaccgaggtcaggagcactgcctgcaccccaagctgcgcccctccggtcagcatgaggctcctggcggccg

SEQ ID NO: 656283 - DNA, 819 bp, Homo sapiens
ggcagagtgcgatggaacccagcggaatgcaggcgagctgagttaggtagtcagacgagggccgagaccggaaggcgttgctgtgccagcgattgctgctcacggttgctgcagccaggggaccgatctcttctctcgcctgacagcttcttccttcacctcacatgagcaaagaatgccagctcatgtctgacggctagcaatcgcttgacggcgatctccatccagggaagcgactggcgtggcttgaggacatgttcatttccgatgaatgtggggttcaccaaggacgtgggcacagatcaagtttctggtctgcgcagactgtgaaattgcgaccaaattggctaggcacttgactacgatgacaagaacgagtatctatgtggcctatggtaacgcagtttcccatgagtaactgaggggaggggtactcagctccatctccaaagattaacgctactccccacaacgaactggtctttaatgtggtatacactgttccgctgtccttcttgtctgtgctaatataaatactgagtaccagcatgtccatttgaacatgcagagggttaatcctgcttcctaaagcctcaagtacatgccatcctgcttagttcactttgtatcacatttcctaagctcccttttcccccagttttgggacactgtgcttacctccaaaaatctcatctcttccctggcattctccctaggctctgtattgcccaggggctcccgcttttcttgctctagaggagcagtattcaaccttttagctatgatgacacataacaaaaagatgttaatgtactaata

SEQ ID NO: 656284 - DNA, 932 bp, Homo sapiens
  misc_feature (711)..(711): n is a, c, g, or t
tagagtcaagatcttttatttcctgatttaaaaaatcgtcaccatcatagacctccgggcttctctggtatctagtgttctaattggctcccagcaggtgccttcacacagccccttatattccccttctgggtgccgtgcccagtgagcctgaggtgtgacagatcaattagcttggtccctccaaacgtgtgggagcaggactaaaacttcttctgggcaggcagagagctcctacctcggccagggtatcgagcctgggtccaccactcctacagtttcttctggctcctagggctatttggtgggcctatgggcatccagcgtggctctggggcatgatgtggaggtggcttacacagcatcaaggcacaaggatctccaggacagcaccagccaacagggcattacatggaaagacaaatgtaaaaccagaagtagagagggtggcccagctctccggtgcgggaatccgtcgcggggctcggtcaggaagtagagcacatccccatagatcgggcccacagagaccacaagctgtagaatgaagcggaggggatgctggcgcgagaaaggcgatacaacacccacaggctgagtggtccccaaaggcaagctgtgatggttccatgcacactgtgaagttgtcacccaggatgtactcggatgtatcccttggaataatcttaccagagtgagatagaaggctangactcccagcaggtctagaagtagagaacgaaccagcctgatcacaaggtgatgacccaaaactgcaacgcagcagaggtgaaaaggtagcggcaaggtcccaatgggaaaccggagcagacatgaaaaagacagtgggcacaataaacctggacaagaaggccggcagatggcagaggggacacagaaaggtcattagagagaaaagggacggccagaga

SEQ ID NO: 656285 - DNA, 135 bp, Homo sapiens
ggatcgtggactgcattgtcgcatcccaaggagcagggcgtgctttcttctggaggggcaaccttgccaacgtcattcggtacttcccactcaagcctcaattcggcttcaaggtaaggacaagcagttcttccg

SEQ ID NO: 656286 - DNA, 261 bp, Homo sapiens
agctcgtccatagaagcacttagcgttgtgcctggcacatagtgtatggtggataagtgggacttaagactaaaactcatgccctgatgtgtttttgcagtgatgttttgttctggagtacttcacaagagacaaggtccttggctgggcatggtgctgaagccaataatcccagcactttgagaggccgaaagggggggatcacttgagcccaggagtttaagaccagcctgggcaacatggtgaagcctcatatctacc

SEQ ID NO: 656287 - DNA, 101 bp, Homo sapiens
tagggaaaaattggcgttatatttattggaccatatttggataatcttcattcttgagcaggaggagtttcagtagatttctgggccgtggccatatgcaa

SEQ ID NO: 656288 - DNA, 793 bp, Homo sapiens
  misc_feature (345)..(345): n is a, c, g, or t
ggcccacccaggctgtcggccatgtggctgcagacgggcagggggtcgcgtccctgtatcaaagccctgaaccacagtgctcttctcacggcagccgtgaaagcggaaatgagcttgtggagacttccctgggacttgctgtccttggtccaagggtctggccaggtgtcagggagaggtgtgactgggtgccatcatggaccgtgttcctccggtgaaaccgggttcccgccatggaccgggttccggccatggaaccaactcgtgccctggaccactccgtgccctggaccggtttctgccgttgacgtgttccgtgcgtgaccagttcccgctggtatactngttcctgccctcggacggtgttcccggctgtggacgtggtccctttggggctctaaggtgcggaatgggcccagagctggtcccgtgcccagcgccctgctagggcttggggtccttggcctccaggggccttgggacttggtttcccagatttccctctggggttgtccacaggctgattggacctccttggaatgcggggcaggggccaccatgcggaaagtcgtgtctggactcccggaagcccaggaccaggctcagtgtcctcaagagaccacgtggttgactgacttcccaggactctccgtctgtcccttcagagagcaagcgggtcctcctccagggccttagagatctgccagagagtgttggacactcacggcctagtgatgggggggccggtctgttacaatccgggtcttacaccacgtgggattgccactgtgtc

SEQ ID NO: 656289 - DNA, 164 bp, Homo sapiens
ccgttcgaccttggttactgaggtatccttgctgctgcggtgccctggcgggggtctgccgggaggcggattaccggccgtgctagccccgcccataccgatcgatccacctgccaggtggaccaggccaatcctccaatttggagaaccgcatggccaacccg

SEQ ID NO: 656290 - DNA, 557 bp, Homo sapiens
tgtaataagcacaggcacgtgatgactcgctgctcctcggcggctatttagaccgagtcttgagtatatcgtcacatgtgcggcggtgctgtcgtagcatactgccatgcatgtagagtggtgcactacaaaggaccatgtctcatacattccactggaatggagactctggtcgcagtcaccttgacagggtcctgaaaactgcttgaaaccaaaactcattcaggcttcaagagagggtcattgtgtcatattctatgaaaacggcctcttctgtacattcagtgtgaatggaaaactccaggccacgatggaaacagatgataacataagagccatccagctgagccgagatgggcagtacctgctcacaggaggagacagaggagtggtcgtggtccggcaggtgtcggacctcaagcagctctttgcctatccaggatgtgacgctggaatccgggccatggcgctgtcttacgaccagaggtgcatcatttctggcatggcttcaggaagcattgtgctattttacaacgactttaaccggtggcatcatg

SEQ ID NO: 656291 - DNA, 386 bp, Homo sapiens
  misc_feature (133)..(133): n is a, c, g, or t
  misc_feature (152)..(152): n is a, c, g, or t
  misc_feature (159)..(161): n is a, c, g, or t
  misc_feature (242)..(242): n is a, c, g, or t
  misc_feature (350)..(350): n is a, c, g, or t
gccttcccatcaggagcctgtacctggagaaggtgacaccaagacacagggagccccatgacccctgccatggtgcctctttttgctacaaagtgggtttccagctcagaagcagggctgccgggggtgctangaccgcacaggtggggttngcagggnnnattctacacatgtgcctgggagtctatttcaggcagaacagactgtgtcccttgagagcagcaggtgtgaagtgaaacctncctgcctccagacggcgggctcagggcgaggcacttagcgtggagggcgtgctaggctccagcccacagcggtggccacccagctgacatgcttcggaggagtccatngcgctgactcagcgctttctgtgccgcagggacacc

SEQ ID NO: 656292 - DNA, 340 bp, Homo sapiens
  misc_feature (269)..(269): n is a, c, g, or t
  misc_feature (323)..(323): n is a, c, g, or t
ctttggaaatgtaaattgttacaaacttactttagagcaaatttagtcatccttcaaaaatttaaatgtatacttatttcctaagaattcgtttggctcacacaattgtgaaaagatagatgtacaccagtgttcattacaacaattatgcaacaaatctattatgtgccagacattattcggaactctgggaatacataagtgaacaaagcagattcctgatctcaggacctggggtcaggggtcaggagaagccaaaaaacacgctngagaaatactttatgcagtgtggggggagtgctaccagcagagcaggggatggngatgtgaaatcttgtgt

SEQ ID NO: 656293 - DNA, 908 bp, Homo sapiens
gcttcagtcagtaagagggaggattaccttcaggagaaggcaacggaagaaaactggctgctatctttatagttccactgccctaaccaagtgtccacgattctaaactgtgctacgctgtccatcccttatgtaatagtggtttcccgcccaaagtgagactttccttttaactcggaagcaagggtatagaggtagtccaggtgggaacgccagaagtgctgattgcccagccattgggaccacctgttcttgcccccactagcctctagctgggaggccaaagtaacgcgctggcctggtgcgctgtctgctcggcttgaggactgtgcgcagggcactggtcctcccatctccctctggccaaagatggcgctttcgcccgctgtgtgcctgtcaccacccaccagcagctcatgccctgggcttcccaacatggcagaggtagcaggcaaacgtctcttcaacaaaaaacaacacaaaaactcgaaggcaaccctaactccggatcgcgcgcccaaagcacgccaccggccacagggcccaccatagggccccacacgctcgcacacgcatgaaccccaagcagcatcctgcgctcccacagcgcggccccaacatccagcccgggcaccccaaaataggggaggcccgcaatagaactcccgcgataaacgcccgagggtatcaacccctggcgccgctcaccagggacgcgtcgcggccaacgccccccgcccacagacccaagactcacaggcacaccacgatgcaacgctacaccgactcacgacacacgacgccgacggcccggggaaagacccagaccaacaacacacgacccaagacccagcaggcgagcgacgacgcacgcccggccccacagacgcacaccagcgccaaacata

SEQ ID NO: 656294 - DNA, 944 bp, Homo sapiens
  misc_feature (2)..(2): n is a, c, g, or t
  misc_feature (272)..(272): n is a, c, g, or t
  misc_feature (434)..(434): n is a, c, g, or t
  misc_feature (444)..(444): n is a, c, g, or t
  misc_feature (465)..(465): n is a, c, g, or t
  misc_feature (477)..(477): n is a, c, g, or t
  misc_feature (482)..(482): n is a, c, g, or t
  misc_feature (540)..(540): n is a, c, g, or t
  misc_feature (554)..(554): n is a, c, g, or t
  misc_feature (560)..(560): n is a, c, g, or t
  misc_feature (623)..(623): n is a, c, g, or t
  misc_feature (629)..(629): n is a, c, g, or t
  misc_feature (650)..(650): n is a, c, g, or t
  misc_feature (668)..(669): n is a, c, g, or t
  misc_feature (783)..(783): n is a, c, g, or t
  misc_feature (905)..(905): n is a, c, g, or t
tntttccgggtccgctcgcgttcactactccttctccgccttcattcacgccttccacgctttctcttgtgtctcattatccctgacgcgccacgggccatgtatcacacttgtctcccctccccttccccttccccctgccttaccgattgcccgctgcggtactttcaatccttttcccctgtgccacagccgcaatatgcaatctcacacttacttaaccatgacatcctgctggcccccacacccgcgagacactttaaccggccaanacgcactttaccaactccttcttttgttctcctccttgttatgttttgtatttggcgccatttacttttgttccgcacctacgattccgcgtgttttacggacatcacctttgtccacctaggccacgtattatcctgggtatcacgtgttacgcgcttgcngaaacctganattagtggtttggacactccncacctccccgcnctgcnctatggtttcgccgtccatgtgctttttttttccgccccacacgtaaattaccctgangactgcactttcancatggnccctacaattatgttggacatcactttgattacaaagtgaatttttctaatcaacaacatccncagganacgtcggaagctctcacaggnacatgccccaacctaaanntaccgacccacccccccaatccctctatttccactgaccttttcgtacgttcacttgccacttatcattcgcctcgcgactgaccccccggctggtatgattttccgctttttntatgccgttttcagtggacgaatgcactacacacagacagacacacacctcacctcctcatcgcgacggtccctgcgcccggaagttctcttttctcactcgcttactgtattgtcttgtanatcgtaaactgctcattttggcccttcctgttgccttaa

SEQ ID NO: 656295 - DNA, 1098 bp, Homo sapiens
gaacgctcgtcagctctcggagcccggcccagcttccataaaaatgtctacggtacactaaatccggtgcaagctcagctatggcaaagtgtagatccacctctacatgccaccaagatgcatagtggcgtctgtctagagccctagtatctatacctgggattgctgcacgacgggattgcttcgtataacacagttgattaagcaggacagtgcaagaccgcaaggggtggtggatgaaagtcaccagtggatcgagcatgttgtgatccgcaagtcggagcactggtgacacgagaccggtatattgaccttacgtcctaccagaggaaggtacccagagataggaaattcgttgagcgtcagtgactgaaagttcaggccttatcgtgggccacctggagagccgggtgaatctaggaagcgctattgagagacacctgactcagttgatgaacgacgtatctgagagcgtcatgagagcgttccagtgacacggggcgtggtgaaaccggacgaggcactctcgtcgagttgaggaatcatcctgggtccagcaagccaaggcagggagtctggcaggaaagttacctggagtctactaaggaaaatgtatcaacagacctgactctgtgacgaacgggagagttacttttcgcgagcaacaattctgaggtgaacttcctgtcacacgctgactgagttgggccgctgaggcagagacgggctatgatagcagccacgtagggaatggggcatctgtccagtttgaactttagtgaatgcctgatttgtacgtcgagaggcactagctccggagattcgtacttattgaagcgacttggcatgttgagagtagcgcaaacgggcatacgtgaattgctttcccacataggagggttaatcaagacattcggtgtgacaccagatgccgagaggaccgatgggcccccagactttcccagaataacgtgataaagggaatgggtaaagcaaaaacagttcatagaggagcacttaattcggaggattgttgtggaacaaccgacacttcagggacaacggagggttcaaacagcggagatcctggggaaaatc

SEQ ID NO: 656296 - DNA, 289 bp, Homo sapiens
  misc_feature (27)..(27): n is a, c, g, or t
  misc_feature (51)..(51): n is a, c, g, or t
  misc_feature (108)..(109): n is a, c, g, or t
  misc_feature (204)..(204): n is a, c, g, or t
  misc_feature (213)..(213): n is a, c, g, or t
  misc_feature (221)..(221): n is a, c, g, or t
  misc_feature (228)..(228): n is a, c, g, or t
  misc_feature (256)..(256): n is a, c, g, or t
  misc_feature (269)..(270): n is a, c, g, or t
gcaaatttctcattatttaagtttggntctggaaaggacatgacttctganatagccgctgctgggttttaaaagctgaggtctctcaaagtgtggaggagacgttgnngtcagggggaagccaagtgccgggaagatgtctattttttttttttgtgtattacaaatgtaaaatcatgatgtttgttttgactgctgatgcgnttgtttttnaaattttnttgtggnatatacagtattgtcatacagttgaagngaacaatgtttcnnaatgtaagtgtctgaaatg

SEQ ID NO: 656297 - DNA, 416 bp, Homo sapiens
  misc_feature (17)..(17): n is a, c, g, or t
  misc_feature (20)..(20): n is a, c, g, or t
  misc_feature (31)..(31): n is a, c, g, or t
  misc_feature (33)..(33): n is a, c, g, or t
  misc_feature (43)..(43): n is a, c, g, or t
  misc_feature (55)..(55): n is a, c, g, or t
  misc_feature (67)..(67): n is a, c, g, or t
  misc_feature (273)..(273): n is a, c, g, or t
  misc_feature (324)..(324): n is a, c, g, or t
  misc_feature (350)..(350): n is a, c, g, or t
  misc_feature (393)..(393): n is a, c, g, or t
ctgcttcaaagggatgnccncatataggaananctccagtctngagctcccactngagcaccaaagnagaaggccagtgatttctgcatttccaactgaggtaaccagttcatctcgttgggactggttagacaatgggtacagcccacagagggtgagcagaatcagggaggggtgtcccctcatccaggaagcacaaggggtcggggaactccatcccctagccaagggaagccctgagggactgtgccataagggacagtgcactctggnccaaatactacacttttcccatggtctttgcaacctgcagactgggagatnccctcgggtgcccacgtcaccagggncctaggtttcaagaacaaaactgggaagccgttgggaaagccnctgagttgatgaagaagtttttt

SEQ ID NO: 656298 - DNA, 665 bp, Homo sapiens
agcggaatcgcactcacacccgggcgcaggaggcgggcggcccgggcgccgagcgggcccccatggacgcccgccagcacggggcgctgagaccgcccgatgttcgcatgcccagcccggtccggctgcgccacgccgagggatctctggacaggacaagactccgaagctactcccccagaaacaacaatgccgggacccacaaacccagcttggacaaaaaatactgaaaaagaaaaaagaaaaaaaaacaggaacagcctaagagtgtacgacagtgaggaagcgatagagtagggaagggcgagacgggcgagcaaggtaggagctgaaggggggagccgcgaaagcacggaggagagtgacacgcacatagaggagatgtatataaaagataagagaaagacggacgtgagcagagagcagacaacagacgactgcggtcatacgccacacacaatccgagaataaacatacgcaccataatgactaaacctcgatccaccaaaacaaataaaataaatacatcaaataaacttagtcaaactaaacatataaataatatcacgaacactaatctctgcaggactaatttcaattcaattatacatcaaaacaaaaaactaaagaaagctaacactttaaaactaatcactaaaccgatg

SEQ ID NO: 656299 - DNA, 259 bp, Homo sapiens
gtcctatcataaaattaatgttggaataacttgaagttgttgataatacttcatgacaactaaagtctgacataaattacttgtttatgtccaatagctactacatttgatagaacagtttgaggacattcattcttgacgcagcatcttacatggttctcagcaagttgggatagtaaggattattggcttgtctcgatgagtggagcggcatgtttgtagcatacagttattcaatatcttgtctgatgccctaaaa

SEQ ID NO: 656300 - DNA, 1003 bp, Homo sapiens
tggtgcagcgcggcggatcccgcactcgctgctggtgcccgtggccgcctcctcgggcagccccccgggctcgggctggcggacagtggggatgctggggagacctcttcccggtgggctaggctgtgtgtcctgaacttgatcgcgcagatagatgaggcggatgagcccataaccacttgtgcgcggccggaccgcttcagggcgcaggggtggcggactccagtaaggaccccggtgctgggggcccttcgaaccaaactgttgtggcaaatcttggcggcacgcggggctgggctcattcaacgccccctggtgggaattgggcgcgctgcccaagcggcagcgcctgtttttttacccaccaggaaggtttggtcatgggttgtgccctgaaaccaaaggtgttaggaagacttgatatgtgggacataaggatctttgggaacgagggaccacacataagcggtggctaggaaacccgatgagcacgcaactgatgctgagtagtgttcagcccctcgttagcaccaaggcgtgtagggacacgaaaaagagtgtggacgatgacgcagcgtcgaggaaccagccacctcgacagtggagaacaattatagaggacagcaaccagactccgcgcggcagggtaggaactaaacaatgtggactcccgatgggtggtggcgcccgccattaccaatagagcaggcagggggtgtgaacccaacaggtgtgtgcgcggtgacatgctaagagtatagacaccctccgcgccgccgacagtattgagtggcagctcgccacagaaaaagtggcacgatagacgggcagtctaacatcagacgacgcgcgacagcctcgggtgtgtggcacataacaaaaacaccgggggaccaccagcgttgaggaagccacgccttgcagagggagcagaaggcgaggcaggtgggtggacccacaacagaacgggaataaattcgctcgccaggcgcagcataacaac

SEQ ID NO: 656301 - DNA, 256 bp, Homo sapiens
  misc_feature (69)..(69): n is a, c, g, or t
gccctcagtttttttcccttttttttttgggggtaaggggggagggggaggggggggtaggtccccccncaaaaaaaagggaaaggggccccccaggggggaccaaggggtgggggggccccccccttttttcctccatgggggggggccaaatttttccccaaagcccagggggggcaaaaaggattttgtttctgggtttgtttttgggggttggggggggacagttatggaaaaaaattttccttgcccccca

SEQ ID NO: 656302 - DNA, 449 bp, Homo sapiens
ggtgactctaaggatccccactttgggaggccggggcaggtggatacctgagcttagaagtttgagaccagcctgggcaacatgtgtgaaacccatctctaccaaaaatacaaaaactagctagccatggtggctcacgcctgtagttccagctactcaggaggctgaggtgggagtatcactggagcctgggaaggtggaagctgagatcacacaggttacaccactgcactccagcctgtgcgacagagtgacactccatctcaaaaaaaaaacaaagttttagatctaccgagacattgcaaaaagagtaccagagttccggtatacggcctcacccaactgtatacctatggttagtatcctacattactgcaggatatttgtccacaactaaggaacccaaatttgattacattactattaactaaatccccctaagttcagag

SEQ ID NO: 656303 - DNA, 360 bp, Homo sapiens
tttagacttctatcatgtaatacaaaaacagcactttagggccgagtgcggtggctcacgcctgtaatcccagcactttgggaggccgaggtgggcggatcatgaggtcaggagttcaagaccagcctgaccaacatggtgaaaccccgtctctactaaaaatacaaacattagctgggcatggtggcacatgcctgtaatcccagctactcagttggctgaggcaggaggatcactcgagctcaagaattcaagacctgtgcaagagagagagactttgtctctattaaaaataaaaatgattggccgagcatggtggtgcacaccagtattcccagctactctggaggctgaggcgag

SEQ ID NO: 656304 - DNA, 93 bp, Homo sapiens
tctgaagacaccgctgtctatttctgtgcgagagtgattgggaccactatctttcagggggtaattgggtcctttgactactggggccaggga

SEQ ID NO: 656305 - DNA, 401 bp, Homo sapiens
tctcgtaatcagacccagtaactcgacggaatgtacccatctccactgcatggctacggatcatcacctacctttccccagccggacaaagaaccatggtccccaaccaagtgcaaaggccctttatgaacaaaggaagaacttctgcacggaacagtgtcagcagtgtgtcagatatatctcaataccgtgttgaacaccttgactccctttgtcctggctcggaaagatgctatgatcacagttgatgcatggaatcaggaaattgcagcttgcttgatgccaagggcaaagtgtggactcaagatctgatccttcaagtggatgacgcgctgtgaacctgatagatttcaactccacaaatgcaactggaaaattcacctataaacacaatccaacaa

SEQ ID NO: 656306 - DNA, 273 bp, Homo sapiens
  misc_feature (244)..(244): n is a, c, g, or t
  misc_feature (249)..(249): n is a, c, g, or t
agatttggccgggccctaagacattactggagggaaggtctgctcatctcccagtgaaccaaggtctctggtcctccataggcagaggatcctgcggccggctcgcaatgtatgtgtccctgggtacttgagatcatggagtggtcatcactcttaccgatcaggcatgtctgccagtatctgttcatcaaagcacctcttgcaccgcccggaatccatgtaaccctgatggacactccccatnccccngaaagcacaaggctggggtcaagg

SEQ ID NO: 656307 - DNA, 114 bp, Homo sapiens
ggatcccagttgacggatgactctcaaagatctcccaatataacaaggtgtaggtcatctcacaccactgtcatcacttctggaagactatccacagggatggagggctgcagt

SEQ ID NO: 656308 - DNA, 456 bp, Homo sapiens
ttggtccactaaagaccgaacttatgtgtatggtgagtataaggtaccaatatttttaattttatagcattatttattgaatactctgtagttgttctagaattccaactctgtcacatgcaaagtttccttgtatatattcaattttgcaccaaaggtacactatcctgcttactatctcaatataattagactcaataattcttatttttcttctcaggagtggttttgccaacttgcacctttgttcttttatatcagtttgagaatcagattttaagtttcaacaaaaataagcctgtttcaatctttattggaattgtataataataataatttaatttgaacagaatggacctatttcagtgactgagtcttactattcatgaggatagccttttttgtttatatttaatatctttcaataaagttttgtaagtttgtttaaaaaaaaaa

SEQ ID NO: 656309 - DNA, 852 bp, Homo sapiens
ggcctcccaaagtgctgggattataggcgtgagccatgtgcctggcctgtaacctctaattctgtgtttgctggctgtcctagagatcctgcagaattattttcaataaaatcattttttggctgttattaaaacttaaccttgaatgtgccttaaaacaaagaactcgtgtttgataaaataagcatagttttcaggaacagccatgcagtatataattttttatcaacattttatacataattggggacttatattaaaatgtaatcatttggatggcttatcaaaagggtacatggggcaatgcaaaatcaaattatccaggctataataaactcatcacctcaacttaagaataacattatggagtgctgtgtcattacaatctatgggagctcttctcctatcttgtgcgcgaccccccgcgctctcttttcacaatagatgcgtccgaatgtagaaggactaaaatacattatgttccctaaagtgacttatctcatagtcgcctttcttttgacacttcaaaaaaatgtgtttcatactctatgtagtcaaaggatgggttttccactcaacatgtcttctagaattcccacgcttctagtggtatatagcctgtcacttccatggaaggtatattccagtgggggttctccaccactttgttagggaatcctccctctttctcaccttccttttttcaacagccaacacgcacacacaacgttggggcgccgcccgagaagtttaacacctctgtggcggcgccccagaagagaagtcgtcagttctgaaacacgggcgacggggccccaaacggggcgggcgaacccaatggtcgttagcacg

SEQ ID NO: 656310 - DNA, 211 bp, Homo sapiens
ttacaatgtaatctacaacacattccgatctcatctgtagtaatgtctagtcaaattttctatttcttgagtaatgttggtaactctattctattaggaaattatatgttatctttagatttttcaattttgatgtcatatgtttgtgtgtaaaattataataataataattataatataaataataaattactcatgtgatttaatatca

SEQ ID NO: 656311 - DNA, 264 bp, Homo sapiens
aaaaagcagcacacacgatggaccctcagcatgaggctgctgctggaagtcacctattaagccatcgtggacagatgtgagtcgggcattcgcgaatgctgcgccgagggctcctgctgctcacgtggaataggcagtgttttctcttcttggttctggtagaaccaggtgctggcaccacctaccctccccggctgtgccccttgactggccaacgggctcagggaggtgtgggccacggggtaggccgcagtttcccaactg

SEQ ID NO: 656312 - DNA, 805 bp, Homo sapiens
taaacccccccctaaaaaaggggaaaaaaaaaaaaattaaaacaatttaaaaaaggggaaaaaaggggggggggtccacacaacacgaatgttgttgtggtttatcaggaggaaaactaatcgggcggccgacaacaaccatcatatcgcgaaggaaatatcgtccccccaatagcactagaacgtcggcgaggaaccgtgtggtgtcgccacaaaacattgtcttgcacctcgatgacaatccccccgaaaataggatgagaaggaacgacgaccaaagacacctccgggagggtcgatcaggggtcaaaaaaaccaccccacaaacgaatgagggtaaaaaaacgagaggggtgaaagactaaatgagtgggcgtcgggggcggtgcttactatctaaaacaagtggggcgacgccgcggggagatgaatgatataccccgcgagtagcgggataccaaaaagagacagcgatttagaaaaaacaggggcggcgacaccactgagcggataaattacgcgggcacacctcctatcgagggggggcacgagccacccccaacagaggggggagcaggcagccagcaggcgtgggagatgtgataaagcgagccgaaacacctcgcgacaacaacacacacctccggaggcagccaaaacaagagtaacttcttgccactagaagcgcgcatcaatagcaaacggatgattgttcagctaggagagagatgtgcgggcccccactggacaagaggagaacaccgcggcagcgctatgactacttcccgccacgaagagaagtaga

SEQ ID NO: 656313 - DNA, 700 bp, Homo sapiens
  misc_feature (700)..(700): n is a, c, g, or t
atggaccacttcccctgtcacctcgcccatcctctcctctcacggtctccggtcgcacgcccgatgtccggcgccgtcacacccatctcaccaggcacacctcatacacgaatacgatctcatcccactcacacacgggaacttgcccctcggcgcccacatttcggcaccagtccacactctatatacaaatgttcatggcagctttattcacaatagcaaaaaatggtaaacaactcaaatgtccatcaactattgaatggaaaactaactgtggtatgctcatataatgggatactgttcaacaataaaaaggaacaactgatacagacaatgacatggatggatttctaatgcattatgctaagtgaaagcagccaggcacccaaggctacaaacgaaaattcctgcacttatatggactctccagaaaaggcaaatctataggaacagaaaatcgatcagtgattgccaggaacagcagactgaccatgaaggagatgagacaacttcttgatgtgatggaaatattgtatatcttaattatggtgatggctgtactgcttaaacatttgtcaaaactcatcaaactgttcatttaagaagggtgccttttattgtatataagttatactttcctaaaactgattaaaaaataaaaacaatgggctgggaaagggaagaaaaaaaaaaaattaan

SEQ ID NO: 656314 - DNA, 227 bp, Homo sapiens
ccagaggattccggtcgctcggacgaaccacaggtcctaaactaccaaacctgcattataaatttcggttggggcgacctcggagcagaacccaactccgagcagtacatgctaagacttcaccagtcaaggcgaactactatactcaattgatccaaataacttgaccaacggaaacaagttaccctagggataaacagcgcaatcctattctagagtacatattc

SEQ ID NO: 656315 - DNA, 467 bp, Homo sapiens
agccaacatttctaagtcctttcctttgccctctgctcccttagaacttgccccagaccccaaatcagggaggaagatttgaacctgcctcctgtctccttgctggctggtcttgcaataaagtctttcttttctcaaaggcagtaccatggtattgcttccgtgtacattgagcagtgagcctgaatcaggaaaatagggtcaggaggcagggaacataaggccaattcacacttcggctgtaacaggaaatatccactccatagggcgtatgctgtaagtgactttgtaactttacttcatcctctgcatttacgtagagggtaagtgaagtaaacaatggaatcatctaggggatatttaaacttccaaaaattctgtaacggggcctttgagcccctatgttcgggccgctcccacactgtggaatgtaatttcgttttcaataaatcccttcattccttcaa

SEQ ID NO: 656316 - DNA, 899 bp, Homo sapiens
acatctgccggctcaggacgggtcgtgctcatcccttaactttttaactttatgtgtgtctatttatattttattgtgctatgtcttgaaatgttgttgtagctattactttgatggatattacttagtattcctactttaaataagagtagttggcacaccacacagctatagtgttataatattctgtttgtttgtatcctattagcagtgaggatttttttttacctttaggtgatcatttattactcattaatgtccttttcttcctgattgaagtactccctttagcattcctttaggacaggatttgtccccagtgccttatttagttcacttggtgaggtcatgttttcctggatggtgttgatgctagtagatgttcttcagtgtctggacattaaaatcttgggcatgcagcaccatatgagaagtttaaaacaataaaatttaaacgagagaaaaggcttggtatcaggatgattattgcggcactattcacaatagcaaagactgggaaccaacacaaaatgtccgacaatgatagactggatttacgacacatgtggcacatatacaccatggaatactatgcagccattacaaaatgatggagttcatgtccttgcagggacatgcaggaaggctggaaaacatcattctcagcaaatatcacaaaggaccaagaacccaaaaccggatggtgctcaactaataggtggcactgaccactgagaccccgtggccaccggaaggggacctcaccacacacggcacggtgaggggtggcggagagcgggacaggcagccaccgagagtcaccgatcgcacagacagccagcgccgcgcacccaaggtcgggttcatctgttccaaccgcggggcgtgggctaacaaaa

SEQ ID NO: 656317 - DNA, 501 bp, Homo sapiens
aaaggtcagtgtgccagtaaaagtctgatggacaaactactaacttaaaactgcacacgcaacaacgcaaaaccgcgtggtccacaaaacatactcatttccttctgacggtttcacgatgcatgtacatcattaaccagtcttgtactactaaacttaaatggccaatagaaacaaacagttctgagaccgtgcttccacgcactgattcagagtggggtggcaggtcattagggataatcattcatttagccttctgagctttctgggcagcactggtgcaccttgccagctccagcagacttctagtccactgcttggatgacacccaccgcaactgtctgtctcatatcacgaacagcaaagcgcaccaaaggtggatagtctgcagaagctctcaacacacatgggcttgccaggaaccatatcaacaatggcagcatcaccagacttcaagaatttagggccatcttccagctttataccagaacaccgtcgaag

SEQ ID NO: 656318 - DNA, 439 bp, Homo sapiens
  misc_feature (161)..(161): n is a, c, g, or t
gaatacccactcagtttatcccaaaacctgaaaaacatggcctcaaaggaagaaaactttccctttgtccttatgaatcccatgtcccaatcatctggttttccttccctcttttttaacccaaacagccttaaaatccgaactctgggcccaggcgcggntgtcacgcctgtaatcccagcactttggggggctgaggtgggtggatcaccggaggtcgggagttcgagaccagcctgaccaacacggagaaaccccatctctactaaaaatacaaaattggccgggcgtggtggcacatgcctgtgatcctagctactcgggaggctgaggcaggagaatagcttgaacccgggaggcagaggttgcggtgagctgagatcgcaccattgcactccagcctggacaacaagagcgaaactccatctcaaaaaaaaaa

SEQ ID NO: 656319 - DNA, 232 bp, Homo sapiens
agctgggattacaggcacctgccaccacgccggtctaatttttgtatttttaggtagagtcgtaggtttcaccatgttggtcagcctggtctcgaactcccaacctcaggtgatccacccacctcggcctcccaaagtgccgggattacaggcgtgagccaccatgcccagcctctgtggcatattcttcagcaaagtatatgaaccaaatcacaggtggatgaacaccaca

SEQ ID NO: 656320 - DNA, 345 bp, Homo sapiens
gctcgaccccttttgcctaaagaggcctcagaaagactttaacacagctttagcaggagggtgggagaaggcaactagaagcagagggattaatttgaaaatctcccaatgacacaccaatagtttccccatcccaatgtacatgaagtaattgtcaggcctctgagcccaagctaacccatcatatcccctgtgacctgcacatatagatccagatggcctgaagcaagtgaaggatcacaaaagaagtgaaaatggctggttcctgccttaactgatgacattaccttgtgaaattccttctcctggctcagcagctcccccattgagcaccttgtaacgtcg

SEQ ID NO: 656321 - DNA, 111 bp, Homo sapiens
aaaaagaacagaaagaaaggccaggtgcagtgagctcataccgttattcccaacatttggggaggccgaggcagacagaatttgcttgaaccttgggaaggcggaggtttg

SEQ ID NO: 656322 - DNA, 169 bp, Homo sapiens
aggacagtaagtcacctagtgctagacacatcacggcagatcggaccataggtgaccataggtaaaagattcctacttgcccaagacagggcctgaggtggccataaagatggagaggatgatgtctcaaggagcaaccctatactctgttacatgtctagaggacacc

SEQ ID NO: 656323 - DNA, 820 bp, Homo sapiens
  misc_feature (665)..(665): n is a, c, g, or t
agtgggcggcaccgccaggcgatgccagcacttccctgcgactgctatcccgctgctccgggcggcactggggccatgagacctgtccgtgatgatccgctgtgaatgaccctaaggccccacccctcctgtccagctgggcaagaactggacctgccgcgcaatactagggcagccggcagctcctcgagaccctctcatgtgcccacctccgtacaactggaggggctgcccgagtgacccaccatgcgggatgcaattgcgatgccgtagggaagaggtgaataaggacttcggcgtacgcatgggtagggagtgattgtggggacgaccagtttctccgcagttagggtagcgggtcgtggtgtgtcgctacacgtctacacgtgctcgcagcgcctcatgggcaggaggatccccatgggtatgcccgtgtgatgcggccctccgacgatcgtgcgcgctcgcttgtcctccttctcctcgatggtgcgaagagggttctcttgtgcccgtccccgatgagagcgccttgatagcgacctgttgctcatgtttgtactcgtccatggctgtgtcctctgaagtgtaccccgccttgtggggcccctctgtgggcatgccccccagtcagagctgcagagacgcaccatcagagactcagntgcgacagacggctgggccgataaggtgggggaggaggcatcacgccgagggccctcctttcacaaggcctgcacggggacggacggaagcggggcgcagaggccgcacaaaggcaggccaactcggggaccaaccaaaacgaaagcacgagaat

SEQ ID NO: 656324 - DNA, 957 bp, Homo sapiens
  misc_feature (951)..(951): n is a, c, g, or t
gctttcagctggcaagcatctagtgaagctcagaatgcctccatgggtttaaccagatctaagaatctccaaactatacactgtcaccttcagactgttacctcatactccatttcactgtatgctacaaatattttttatgttcaagacacacagtacagaactgcggtggatctgtcctgttgactggtgcatgggctatacaccacggataacatcaatttcctctgaagttagttactttacctatatagttcgttaattatttcacgtgccccattgccgaagaaatcattacatgcttaaataaatacttctccatatgccgggggatgacatccagtgaattatctccgtggtgtgccactgaaacatcaataatggtacttgaatgaattaaacacatcgcattcgagaatactaacttgtagatatgcttcctttatcgcgaaatctctaagagcttcaggagttgcagctctggagaaaagtggccgcatgtttcattcctttttgcccgtgatttagtattgaatagaaacctaggccatgccatgagacttagggatttaaaatgggttgctaccagctgttgcagtcacccagtgaagagcctatgtgcattggtcgtacgagtcatgtgacattggacctcaaatcgttcattgatatagaatagctgacatttgactaccaacctctaagtcgctgctccccacctctgtatcttaccggcattggggttcggttactggcccggactgggcacgattcagggtgcggatccaaaaatagattccgcaaatccttaatccaggggggtcacaaccgtaaatgggcactctcagacagggtcgcccaattgcatggacaagtggcacgagatcaccaagggatggaacatgattgaggggccaaaccgcaaaccccgtaaaccccgcccacaccctntcagaa

SEQ ID NO: 656325 - DNA, 752 bp, Homo sapiens
  misc_feature (14)..(14): n is a, c, g, or t
  misc_feature (144)..(144): n is a, c, g, or t
  misc_feature (218)..(223): n is a, c, g, or t
  misc_feature (228)..(229): n is a, c, g, or t
  misc_feature (231)..(232): n is a, c, g, or t
  misc_feature (248)..(249): n is a, c, g, or t
  misc_feature (253)..(253): n is a, c, g, or t
  misc_feature (266)..(266): n is a, c, g, or t
  misc_feature (276)..(276): n is a, c, g, or t
  misc_feature (284)..(284): n is a, c, g, or t
  misc_feature (287)..(287): n is a, c, g, or t
  misc_feature (289)..(289): n is a, c, g, or t
  misc_feature (295)..(296): n is a, c, g, or t
  misc_feature (301)..(302): n is a, c, g, or t
  misc_feature (305)..(305): n is a, c, g, or t
  misc_feature (327)..(328): n is a, c, g, or t
  misc_feature (335)..(335): n is a, c, g, or t
  misc_feature (338)..(338): n is a, c, g, or t
  misc_feature (343)..(343): n is a, c, g, or t
  misc_feature (350)..(350): n is a, c, g, or t
  misc_feature (365)..(365): n is a, c, g, or t
  misc_feature (369)..(369): n is a, c, g, or t
  misc_feature (439)..(439): n is a, c, g, or t
  misc_feature (447)..(447): n is a, c, g, or t
  misc_feature (449)..(449): n is a, c, g, or t
  misc_feature (453)..(453): n is a, c, g, or t
  misc_feature (480)..(480): n is a, c, g, or t
  misc_feature (488)..(488): n is a, c, g, or t
  misc_feature (490)..(490): n is a, c, g, or t
  misc_feature (546)..(546): n is a, c, g, or t
  misc_feature (567)..(567): n is a, c, g, or t
  misc_feature (574)..(574): n is a, c, g, or t
  misc_feature (576)..(576): n is a, c, g, or t
  misc_feature (578)..(578): n is a, c, g, or t
  misc_feature (581)..(581): n is a, c, g, or t
  misc_feature (583)..(583): n is a, c, g, or t
  misc_feature (639)..(639): n is a, c, g, or t
  misc_feature (690)..(690): n is a, c, g, or t
  misc_feature (738)..(738): n is a, c, g, or t
acaaaagggaaaangtttcctttacccatgatccaggctagctccaagaatcctaaaaacgatgttttaatttggaatctgggatggggggttttgtgggttaggatgtgttctgtcacaagggctactctacttcctttaganacatgagcgaaaatgctttgctcaacaacctagttatgtatgtacaaatggtgatcatggtccttactgataannnnnnttttnngnnatttttgtttcggggnnggtnttggtaagaggtnttggtgtttnagttaggnttntnattttnnttttnnggngtgagaaatggaggtgcagaannggtaggnttnggggngggattncttttttggggtggngggnagatggggaggtgtgagtgattggggatgtctggtttgtgggtcttgactgctattgtggagtgggagancctatttnanagtntttgtgcgatgggggtagaggggagancttggggncngcgcttgggggttttggtggggggatgtgaccacggttctgtgaatccagattttnagttcgcatccattggctganttgttgntntnagngncatcatcagtcgttccaatacccaccttcaaaatcagaatgtttagagtctaaaanacgctgcctttcagcattttttttgtactgaataaacaagcactattcttnagaataaggggtaagggttttactctcagatttgcttctcttatggantgatatcgtacaag

SEQ ID NO: 656326 - DNA, 696 bp, Homo sapiens
catgctcgacttcttcaccatttactccaagggcgggctggtgctctggtgctaccagggacgttagcgatcatgcaccggacccgtgaacgcgttgattcgttccgtgctgctgcaggaacggggaggtaacaactccttcacccatgaggcacgcacactcaagtataaactggacaccccagtttgagctggtgttgggtggttggttttcacgaagatcctgacactgacatatgtagacaaattgatagatgacgtgcatcggctgttgcgggacaagtaccgcacagagtatccaacagcaaagtgctttaagtttattaaatggcactttggatttccaaaaggagcttcctgcggctccttcgtgaagcagaggagagcagtaagatccgtgctcccactaccatgaagaaattgggaagattctgaaaaggccaagaaacctgtgaggtccatgattgcgacacggggggaaaagccaccggaaaaagcacacagaatagcataacataaccgggggccacgaagggacaggttcttgatggtccttgggctaccagcaaaatcagctccctgcagaacaagtcaggtctgccagtgggttcctgagaacggagtagcaactttccaaagagggagctgatccgccggaaagcgcgaggagtccatgcagaagcatgggagggcgag

SEQ ID NO: 656327 - DNA, 1257 bp, Homo sapiens
gtgcgggcgcatgggtgtcggctggagcgagagggtgctgagactccagaattggaggcgtgatgaatgactcatgctggtagttcggtgggggcctgctggcttggagctcgaggaagaagtgggctgggtgccatgggggaaccaagacaggtctctagaacaaatggaactccacgggagagatgtccgaatcgagggaagttaatggtactgtcaagtgacaggacagcttcgcaaaacatagcgtagtgcaagcaggcgcgctggagagcgcacgatgacacagacgtcatcgatcaggcacacaacacacggaacactgacagcagcagcccaggtacaactgcgtcaacgcaagcctcaggaagcaagccgagaggaaggcaacgcatcaggaggggatgccgcgtcaacattgacgactctagggcagatacaagcaagcatgaaagcgtagaggggcagctcgcctagagacagtggtgccaatttggaggagccatgatgggcccctgcttggcgaacaggaaggtggtaaaggcgcccgtggcccgtgaacacaccagtacacgtggcattgaaaggtttcatacgctcaacggcggttcctggcccagcatagttggagctcagggaccctgcgatatgggcgctgccccacggcctgtggaggggaaagataacgcataggagatcgctagatggcctccgtcgaacgtaatccgtgacgtaaccgatgggggcattgagagtcgggtgggaacctggggaatcgagaagggtccccccgtgggcatgggcgaggaaaaccggaacgcggggcctaggcgaaaggaacggcaacccattggcaatggcacttgggtcagttggccaaacggcaacccaaagctaaccaagggcccgggcgggcaggttcccataggccatgtcaaattaagaaaccgaacggctgtccattacccgaagagggaaacacgtcggttccagatgcaacccccagggggggaaggccccgcaaggggaactttgcgcttgaacccaaagtatacacatgggccaccattttccaagactccgattgggcccgcaaacccgggggaaggggcagtccaaagtttcatatacgtatactccaagaaggtacccgagggaactatcgatcaggggggaagtgattggagatgcacccattttgttgttcccgggtatgacgaaacgtcgccatgggaaacttccccacgggcccatgtg

SEQ ID NO: 656328 - DNA, 244 bp, Homo sapiens
  misc_feature (107)..(107): n is a, c, g, or t
  misc_feature (207)..(207): n is a, c, g, or t
actgggagtttcagagagagatgtgtcactcggcacctatgcagccgggctgcggagccacaggaacaggagtttgggaagagcgcttggatgagggactacagcangtggtggcagctccagagacccttagacgcccaggtacagatatgctttgtgaacgaagacccctgtagctctggagttcagcccacgaggtaagcccangacaacaggatgaaggaactttgagaacgaagattcc

SEQ ID NO: 656329 - DNA, 126 bp, Homo sapiens
  misc_feature (64)..(64): n is a, c, g, or t
ccggagatgtaaggcagtaatggcaatgtccatgctacacccaacctcctctcacagcacaggncagagtgaccaagcagtggagtcctagagaaagtgggattcagttcgctggtgtattcctgt

SEQ ID NO: 656330 - DNA, 397 bp, Homo sapiens
  misc_feature (25)..(25): n is a, c, g, or t
  misc_feature (43)..(43): n is a, c, g, or t
  misc_feature (340)..(340): n is a, c, g, or t
tgccacaggcacacaccctcccacntgttaatataaccctgtntgtgtaagttccatacttggtctgagcccactgttgtctctaaaaggtaattgtcctgctaatgctgtacaggggctcttggggttcggctcagctcaacatggcttgacatggtgggcacactggcgcccagtaagagagagagagagccaaagctgtccgttttgcagatggacaggaaggagccaggacacagctcagccttctcacgcccagagagagaaaaagttaagctgctgaccctgaaggcaagggagagcaggctgcacagctgtgtgtggaaccaccgggctcaangcatccaaaggcagggcaggacaagtgtgagagagctagtgtaagctgttgatgaga

SEQ ID NO: 656331 - DNA, 259 bp, Homo sapiens
cggcgaggacgttgcggaaatcccgggtgtagactcgaacgcatggtagagcacgcctcgataggtcgaaaaccagaccatgcagatgcatacccttgagcaagatcatgctcgtcgtgcgcaactgctcgcagagctgctggcaccatgccgcagcaacacagacatacaactgcacccgcactggtgttgatcattgatgaaccggcgctgtctggccatgtcctgcgaatggacgcccccagaaggtcgcagccgc

SEQ ID NO: 656332 - DNA, 271 bp, Homo sapiens
agtcccgcttggctgcgtgtgtacggcacttgtacattcaaattcgagtggcgccggcacagcgtgctgaagtcaggtaccggccaagcaagcccacacaaatgcagcaccgactcggcaagacccgtggtctgccgcagtgccaagccaaacaggttcttgagcgtcaaacaaaattggattgctgcatcagagaactgtccatgcgtccgcgttccacttgccgtggcaaaccagcacatacccttgtccagccacaccgtcaaagagc

SEQ ID NO: 656333 - DNA, 931 bp, Homo sapiens
atcgagccctcgccgaggctgcgccatgggcccgcgcgccgccgcgcctgtcacccgggcgcgcgggcgtgagcgtcatggccttggccggggcccctgcgggcggccatgcgcgccggcgctggaggccctgctcggggccggcgcgctgcggtgtcgactcctcgcagatcgtcatcatctccgccgcgcaggacgccagcgcccccgcccggttcccacgcggccccggtggcgccctgccgccggccctgcgaccctgagctgctgctcttcgccacaccggaggggcgcccgggcccacacccagtgcgccggggcccggctcggccggcccggcccggtgacaagcggagggttggacctgggaaaagttgaccatcagtaccctggccgagaagcatgtggggccaaggctcggggcaggaggcctgccaatccaagggaacacagggtgtgaaaactcccccggggggagaagttcagcggctaattagagaacctcaactgaatcttgacgcaaccaaaggcgctttccctggggagctggttgaagccaactcgggctgaacgggtgtcagtccgaaacctgaacgtgggctgccggaagggttgcttgaagggtgcagacaaggggggggcattcctaattgacatttcaacccaaaagcgcttcctttgagggggggcattccagggttcattttggccgaaaggaggtccaaaggaagcccacattccagtgggggtgggggccggccacacacccaacaagggggggcggttccggcgggcaggggccttgagcggggttgaccccaaggggaccttccggaccaggcttgcgcgagacgcgcgagcagccacgttgtgccccaccctggttgagtatctcggtcccccgccaggttggggcctagtcccccgaggg

SEQ ID NO: 656334 - DNA, 260 bp, Homo sapiens
ctcagatcgggaagtaggtcttggtggtgaggaaggacaggaacatcctctccagggcctccgaaccatactcgccagcgtgcgcgccgaaccttaccccaggcggccttgccgtaggtcttgtcggcagcacataattggtagcttcaataaacatctgctgaatttaaccagcctgttgtcttgaaggatgagtcagaagaaccagggacaggcagctcagacccagaaggagctcttgcgtcgcaaaggcagggggg

SEQ ID NO: 656335 - DNA, 116 bp, Homo sapiens
ccaatcatcggccctcggggtatttctgatcgttagtctgcctctaagtctagccaacatgggccgtcccgcaccactcgtcgacctaccagcttgctaggccggagctgatcagt

SEQ ID NO: 656336 - DNA, 218 bp, Homo sapiens
gcctcatgagtgttctacttggctcacaaccagaagccttaagtcttgtgtgtttctgtgtcaggactagacccagatcctggctttgtctgtacagtgtcctgagacttcaggcagaacgagtgggttgtacataatctccgtgccccttcaaattcttttcctgtctgtgacatagtctttgtatggcaactttaataaattatgctaacatcaaa

SEQ ID NO: 656337 - DNA, 441 bp, Homo sapiens
ggcaaatctgtccagctcctgaatggttcatgggagtcagggcactgtgtctctagtcttatctcgtgaaagctcatggccagtggcagcaatgtcatgcctcaagatcttgatgatgttcgtcagagcaggcagagtacgtttatccaaatgggtgatccattcatactcgtctttctttcaacgcgaaggtctagtttcaacgtgggtcaggtagtcatcattctcctcagataagcgcgatactgtggccaatgcacgaatttattcgttgagtcagaagatcagtgagatggcaccatcttgattgcagttgtcttcaatatagcttgtgctcctgtgcaaagtcagagagtttcctgcccgagcctggggtttccaggtccgcagtggacatgctggctcgtcgggagtgtcgtctctggctacttaaggcctcag

SEQ ID NO: 656338 - DNA, 171 bp, Homo sapiens
cgtatcatatggatactcctcttaatactttctcttgcctaattgctgtggatgagcttagtattatagttgaatagaagtgatgaaagcacacacccttgccttgtccttgatctgagaggaaaagtttccagtactttcaccattgcattatgcatgttcaccactggg

SEQ ID NO: 656339 - DNA, 142 bp, Homo sapiens
gatgattcggcaggtgaaatagtaaccactctcttaccggatacccgacttccatggtccaccgtacctgctagtactatatacaagccaagcacctatttctaggggtactgactgagcgtacggcatcagagcgccttaa

SEQ ID NO: 656340 - DNA, 670 bp, Homo sapiens
acgaaggctgggttcgtggacagacgtaggctgtcaggcagtgtacacttcgcctccacttctgttcctccctgccctggtgctgctccaggtcacatactcgtacctgagccggcttcagcctgtccggcagaagtctcccggagccatggactagatactcttatgtgaagtctagcaagctcgtgctcaggtgaaccgaggtgaagagctgggtcctgcagctctggtgggagcctcctcagttcttttcggatgcactccaaccccgcgaaatccggtggaagccgtggtgcagagagccggcttatgtggcctcccaggcttcgtctgaccctgtatgggactggacggaggcaggaccgggttcctggagcctgtgcagacgaggggcaggccaacccgtgactgacaaccctggaaaacaggatagacggggggtgaccgtggacccgtaacccacgagtttagggtaccctgtaggcatctctccaggcctctggcctgtattgccgacaactgagcacaagataagaacgagaacccagagacgcatggcagaaacccagttgatacggtggcaatctggtgaccaagtcacaaccttggtgacatttccggaacccataggcatggacctggattagggcactattcctgcacctcaaag

SEQ ID NO: 656341 - DNA, 317 bp, Homo sapiens
cggtcgcaggggtagggctttactgcataagaacaattctgtatattatcaaacacacagcagttccatttctcatctgaggggggggcatttcctattactgactgtgtctcatcatctctaaagtaaagagagtcaataactcactgaacgtctaagattcttttcagctctgaaattccatgactctaaatgagtagccggtgcttatcgtttatacagtggttttcaacacatcacatcacacacactagcaaaggtcggaggggaaaaaaagcaccttgagaacatcccatcccaactgccaagcgccatcg

SEQ ID NO: 656342 - DNA, 151 bp, Homo sapiens
  misc_feature (90)..(90): n is a, c, g, or t
  misc_feature (98)..(98): n is a, c, g, or t
  misc_feature (144)..(144): n is a, c, g, or t
agcctcaaatgcagtatttttgttgtgttctgttgtttttatagccagggttggggtggtttttgagccatgcgtgggtggggagggagntgtttaanggcactgtggccttggtctaacttttgtgtgaaataataaacaacnttgtctg

SEQ ID NO: 656343 - DNA, 157 bp, Homo sapiens
gcaaatgcctaagactttcccaacagccttagctgccagtgctgggtcactaaccaacaaggttggcacccagctacccctactttgcagggttaagggcccccaaacatagccctcgctcagaggaagttaggggaaccatgagtgttcagcttga

SEQ ID NO: 656344 - DNA, 696 bp, Homo sapiens
tgtgtgtgtgtgtgtgtgtatatatatgtatgtatatatgtattatgagagacagagagagagagggagagagagacaaatatacagacatatatatacacacacacacacacacacatacagagagatatataaaatagatataacaatatacaggatactattaaacgattatattataatactatagtcgtctcatgaaacaagtggtagtcgtaattataagccaaagtgtcagttagggcagtgtatgtccaatcttctattccgtgtgtacagggcaaggagcttccagttctataaacgttggtatatcgtgttattctagcagggtagcacagtgtggtgttctcagtagagtgtagtagcgtgggagcagtagactcgctctcatgtcgtgttctgcacccgtggaggggcgagagtagtcgatgaaggtccctcccctcgccgtggcgtgtgcgtaggacagcacgaggtgcatacgcaggacaataatcgtgcacacgcaagaacagtgccgagtacgtagcgtacgccattatgatacacccaaccgaggctaagctgaatgtcatcattacacacttcaaacgaaggcccctctactggcggctgaggagcatcattcagcagtggtcaggagcgacttgaacttcttatacagactaacaacattccgaaacagaactagac

SEQ ID NO: 656345 - DNA, 158 bp, Homo sapiens
attcaatctgaaaagtcttcactgtgaagatcatcaatatttctcaacatagttcgaagactcctgagctttgggaacggtctgggttctcgctgacagctaaaaacaaaataaggccattattttgccataattgtacgacctgtagcagtgtgctt

SEQ ID NO: 656346 - DNA, 908 bp, Homo sapiens
  misc_feature (84)..(84): n is a, c, g, or t
  misc_feature (155)..(155): n is a, c, g, or t
  misc_feature (164)..(164): n is a, c, g, or t
  misc_feature (207)..(208): n is a, c, g, or t
  misc_feature (210)..(211): n is a, c, g, or t
  misc_feature (214)..(214): n is a, c, g, or t
  misc_feature (218)..(218): n is a, c, g, or t
  misc_feature (222)..(223): n is a, c, g, or t
  misc_feature (225)..(226): n is a, c, g, or t
  misc_feature (238)..(238): n is a, c, g, or t
  misc_feature (245)..(245): n is a, c, g, or t
  misc_feature (257)..(257): n is a, c, g, or t
  misc_feature (264)..(264): n is a, c, g, or t
  misc_feature (268)..(268): n is a, c, g, or t
  misc_feature (278)..(278): n is a, c, g, or t
  misc_feature (283)..(283): n is a, c, g, or t
  misc_feature (311)..(311): n is a, c, g, or t
  misc_feature (319)..(319): n is a, c, g, or t
  misc_feature (322)..(322): n is a, c, g, or t
  misc_feature (361)..(361): n is a, c, g, or t
  misc_feature (364)..(364): n is a, c, g, or t
  misc_feature (373)..(373): n is a, c, g, or t
  misc_feature (382)..(382): n is a, c, g, or t
  misc_feature (397)..(397): n is a, c, g, or t
  misc_feature (412)..(412): n is a, c, g, or t
  misc_feature (424)..(424): n is a, c, g, or t
  misc_feature (426)..(427): n is a, c, g, or t
  misc_feature (430)..(430): n is a, c, g, or t
  misc_feature (449)..(449): n is a, c, g, or t
  misc_feature (451)..(451): n is a, c, g, or t
  misc_feature (459)..(459): n is a, c, g, or t
  misc_feature (461)..(461): n is a, c, g, or t
  misc_feature (464)..(464): n is a, c, g, or t
  misc_feature (467)..(467): n is a, c, g, or t
  misc_feature (475)..(475): n is a, c, g, or t
  misc_feature (493)..(493): n is a, c, g, or t
  misc_feature (504)..(504): n is a, c, g, or t
  misc_feature (507)..(507): n is a, c, g, or t
  misc_feature (586)..(586): n is a, c, g, or t
  misc_feature (617)..(617): n is a, c, g, or t
  misc_feature (643)..(643): n is a, c, g, or t
  misc_feature (645)..(645): n is a, c, g, or t
  misc_feature (792)..(792): n is a, c, g, or t
  misc_feature (800)..(800): n is a, c, g, or t
  misc_feature (895)..(895): n is a, c, g, or t
tcctttcttctgtagctcgcgttgaagccgcacgtccggccccgatcccggcaccatgagcttcggctcggagcactacctgtnctcctcctcctcctaccgcaaggtgttcggggatggctctcgcctgtacgcccgcctctctggggccggcngcgcgggcngcttccgctcgcagtcgctgtcccgcagcaatgtggcctcctnngnngcntgcncctnngnntcgtagctcggnctcggcntggactatagcnggcagcnggcntccgaagggntgganctgaacaaggcggcggcgcgcaccaacnagtacaanatnatccgcaccaacgagaaggagcagctgcagggcctcaangancgcttcgcngtgttcatngagaaggtgcatcanctggagaagcagaancgcgcgttggangnnganctggccgcactgcgaaaancnaagctgancngtngcncgtaggcnagctcttccagcgcgaancgcgaactgcngcncagtggaggaggccagctcggctcgctcgcaggcactgctggagcgcgacgggctggcggaggaggtgcagcggctgcnggcgcgctgcgaggaggagagccgcggacgnaaggcgccgagcgcgccctgaaggcnanagcgcgacgtggacggcgcacgctggcccgcctggacctggagaagaaggtggagtcgctgctggacgagctggccttcgtacgccaggtgcacgacgaggaggtagccgagctgctggccacgctgcagggtgcgtcgcaggccgnggccgagngtggacgtgactgtggctaaaccagacctgacctcggctctgagggagatccgcgcccagtatgagtccctggccgctaaaaacctgcagtccgnggaagaatggtaa

SEQ ID NO: 656347 - DNA, 439 bp, Homo sapiens
ccagatcgccctctggtcctgactgtggaacacaaggaaaaagagcttattgtgaagcaaggatcaaaaggaacacctcagtctttgggactgaacctcgtcaaaatacagtgtcataatgaagcagtttatcaatatcatgtgactttcagccccaatgtggagtgcaaaagcatgaggttcggcatgttgaaggaccatcaagctgtcaccggcaacgtcactgcgtttgatggatctattctctatctgcctgttaagcttcaacaagttcttgagttaaaaagtcaaaggaaaacaagacagtgctgaaatcagcattaagattcagatgacaaagatcctggagccctgctcctggacctgtgcattcccttctacaatgttggttttcccgtcgggtaatgaaactttttagatatgaagcttgtgggggaga

SEQ ID NO: 656348 - DNA, 105 bp, Homo sapiens
ctgtttgcttgtcattagagaagagcaagacgagccagggaggtctgttggaaagttgaactgtcccagtctgtttatgggaagccgctctgcaaggaacccacg

SEQ ID NO: 656349 - DNA, 218 bp, Homo sapiens
catttagagataatgaactgttgtcacagaaatctcataaatgcttaggttttcaggaggttttagtcctggaaggtagataatttagaagaggaatttccgttattctgatgttggagcggccgcatattttttttttttttgactgttaaataaattatttttattttgcttcagaaatgtaagaatcattcaaatgtaataaatacatgatgaat

SEQ ID NO: 656350 - DNA, 119 bp, Homo sapiens
accctctttcatctactcctctgggtttgtatctgccagtgaaagcatccagagagagactcaacctcgacttaaacagtgactttttcaatatagaaaattaatctagaatctagttc

SEQ ID NO: 656351 - DNA, 147 bp, Homo sapiens
gattagaggatcccggcacattgacccagagtccagtgccctacggacgctttgtgcatccaggaatttgagatcctaagaaaaccaaagcagcaactgggtttctggaaaggactcaggaggcagggagacctcgtggagctacct

SEQ ID NO: 656352 - DNA, 144 bp, Homo sapiens
gcgcaggatcaaggtgaaaaggagaaccccatgcgtgaacttcgcatccgcatactcacgtctcaacatcatgtgttggggagagtgtgagacagactgacgcgagcagccaaggtgcttgagcagctcacaggtgcagacccc

SEQ ID NO: 656353 - DNA, 133 bp, Homo sapiens
gtctgtatccagcaaaattatcttttttaaagtgagggagaaatacactcataagtgggagttgaacattgagaacacatggacacagagaggggtacagcacacactggggcctcttggggggtccaggtga

SEQ ID NO: 656354 - DNA, 160 bp, Homo sapiens
atagctttagatgattctcagctatgcctcgcttaacctcgcattaccccccactattaacctactgtgagaactctctatagctagtaaccacgtactcctaatcaacatatcactctccgtacttacaggactccacatacctattcacatgccctat

SEQ ID NO: 656355 - DNA, 493 bp, Homo sapiens
cagcaccttgggaggccaaggtgggtggatcatgaggtcaggagttcaagaccagcctgaccaacatagtgaaaccccatctctactaaaaatacaaaaaattagctgggtgtggtggtgggcgcctgtaatcccagctactcaggaggctgaagcaggataattgcttgaacccgggaggcgaaggttgcagtgagccgagatcgtgccactgcactccagcctgggtgacagagcaagactccatctcaaaaaataaaaataaataaaaataaaataaaataaatgctgtaagagataataaatatggtattgatgaatccatgaactattcaggaaaaatatgaacattaattgaaacagaccagtgatccctgaacctgctgcccaacgcagaagtctccaagctacataagatggttgtactttctactctcgaacattgacagaaatggggagaaacagcagcacctactaatctagtcagataata

SEQ ID NO: 656356 - DNA, 1081 bp, Homo sapiens
gatggggtgtagatagggtgctcgtgagaatggctcacagtggagatgcctatggacctggtcgtctgactgcacaggcattgtgctcgaacgagtaataaccatgctctacctgaccacgaggggagatgaaatgctgcggcctggacactagtatacatcatctcaccctagattcacgtgtcatgttgtgtgcttgtccctccctgtttgaaaatctacatctgaccagtgcctgttgccgaactctcttgaccatcatcctcctagcgcactgtggcacctcctcaaggttctcttgaggtctggtgttaactacagggccactccgctacgttgatgggttccacgtggagacacatagagagtgatgcagatgacatcacatgcgactctccctggcttccctaaactttaccaatcttgtgcaccataggtgcaagtcacaaggactaaacagtatctgtccctctggcagtcgtgaaaggtagtgtctcttggggacagtctggcacgcttcatctggtagtacgtactgaaactcataacttgtggagtttgcgcgctaggatggggttagttcaaccgtggttacaacttggaagacgcatcaactactcgttcgccagtgttgactatagcgtgtttcgtccttgatatttccagaacgtacgcgcacgataatcctcgaagattgtgctagaggcacaattgtacaagaacccgccctcgaacattaattaatcatatgtaaattcagcatgcttatgaggcgacgagagcgttgtcaactacccattccttggtggccccgtgtatgtgctccttcagtacactacacctgtatctctacagatgtattcaccactctggtggttcatgttgttcctctacatacgtcgctagaaaaattcccctgtgtcactaggattttcaacatagttccgccggccgcacccgcccatgtacatgctctttggaaaggaagtagagggacaggccaagggtgtggggctcaattttgaaaagcgcaattcaggcaaagcggtcctagagaactgggaggggctcggagatccca

SEQ ID NO: 656357 - DNA, 126 bp, Homo sapiens
gcggccgcctactactactactgctcgaattcaagcttctaacgatgtacggggacatgactgctttactgtatttttaaggtcaatatactgtacatttgataataaaataatattctcccaaaa

SEQ ID NO: 656358 - DNA, 887 bp, Homo sapiens
gcccggaaggaaacgtgcgaggcagaaaggtgaccgggaccgagcatgcagatctgctcggtagaacctggtgcaccaccaccatgttggtgcaaggttggtgtgtctccggaacttaccttctagggtttccacccagcgttttcaccataggcctcccctgtgggtgaagaattcgcatcaggaatcaactcagtggcttgtttaacaaccctaagcagggaattatgcccaacctaaatacaagaatgggggattccggctgtggagaactgggccagagatatctcaagagaggcatgcattgggaaccatcgatggaataggcaattatttaaacaactggatccagacttgggcacaggatggttggttgctggaggggcgtgatggtaggtctgtggaggcatgggtgctagctagtggattgtggggaccttgtcttaatgagaatgggaggctattgaaataggcgtgtaaattgggcctcagtatggtcgaggatgaggaaattcattccagctaatattgtaactttagcagggagttatgggtgtaagcaggtttgtctgccattaggaattcacgaagaaggcctgttctcaatgaacttcatgatgaagaggcctctggggtgacaattggggtgaccgtggcaagcaggggggagctcgcaatggctgtacgatcaataccatattgacagagccaggcaaaggatctgtggttgcacatctggtgtgaggggcacgggcggtctctgcaaataagggccctcaaagaacggtgggaccagggctgggggcccccagggccggtgcgcaggcacgtccgactgggcccgagggcgcccggcccagattccccaccggggcccccggagagaa

SEQ ID NO: 656359 - DNA, 845 bp, Homo sapiens
  misc_feature (93)..(93): n is a, c, g, or t
  misc_feature (97)..(97): n is a, c, g, or t
  misc_feature (105)..(106): n is a, c, g, or t
  misc_feature (113)..(113): n is a, c, g, or t
  misc_feature (123)..(124): n is a, c, g, or t
  misc_feature (137)..(137): n is a, c, g, or t
  misc_feature (155)..(155): n is a, c, g, or t
  misc_feature (157)..(157): n is a, c, g, or t
  misc_feature (217)..(217): n is a, c, g, or t
  misc_feature (227)..(227): n is a, c, g, or t
  misc_feature (229)..(229): n is a, c, g, or t
  misc_feature (231)..(231): n is a, c, g, or t
  misc_feature (234)..(234): n is a, c, g, or t
  misc_feature (268)..(268): n is a, c, g, or t
  misc_feature (271)..(271): n is a, c, g, or t
  misc_feature (275)..(275): n is a, c, g, or t
  misc_feature (282)..(282): n is a, c, g, or t
  misc_feature (294)..(294): n is a, c, g, or t
  misc_feature (299)..(299): n is a, c, g, or t
  misc_feature (301)..(301): n is a, c, g, or t
  misc_feature (303)..(303): n is a, c, g, or t
  misc_feature (312)..(312): n is a, c, g, or t
  misc_feature (314)..(314): n is a, c, g, or t
  misc_feature (326)..(326): n is a, c, g, or t
  misc_feature (330)..(330): n is a, c, g, or t
  misc_feature (333)..(333): n is a, c, g, or t
  misc_feature (335)..(336): n is a, c, g, or t
  misc_feature (342)..(342): n is a, c, g, or t
  misc_feature (344)..(344): n is a, c, g, or t
  misc_feature (348)..(352): n is a, c, g, or t
  misc_feature (359)..(359): n is a, c, g, or t
  misc_feature (367)..(367): n is a, c, g, or t
  misc_feature (373)..(373): n is a, c, g, or t
  misc_feature (398)..(398): n is a, c, g, or t
  misc_feature (408)..(408): n is a, c, g, or t
  misc_feature (413)..(413): n is a, c, g, or t
  misc_feature (438)..(438): n is a, c, g, or t
  misc_feature (459)..(459): n is a, c, g, or t
  misc_feature (473)..(473): n is a, c, g, or t
  misc_feature (484)..(484): n is a, c, g, or t
  misc_feature (498)..(499): n is a, c, g, or t
  misc_feature (519)..(519): n is a, c, g, or t
  misc_feature (695)..(695): n is a, c, g, or t
  misc_feature (702)..(702): n is a, c, g, or t
  misc_feature (708)..(708): n is a, c, g, or t
  misc_feature (739)..(739): n is a, c, g, or t
  misc_feature (809)..(809): n is a, c, g, or t
atttattggtcaggttagccaccactcatgcttttcctgtaataaggatcctttataaaggcatgatggtgttcactattgcagatgctttcngaanaaccctgnngaaaaanaaagcattgnncctcacatcgaanctcctttgttgaaatgancnggtttggattttgtggattccaggtctggagccaagaccctagtccaaagatcccctctncccttctcangnanggngcttcaaagcatacacagtatcaggcatgtcatnccntctnggcagancctatacttggnctatntntnctccaacantncttgcccctgtntgcnctntnngttttntnccannnnngcccaangggcaggngggttnggccccagggaacattaccttttgngatgggaagngttangtgctccccagccaaactataaagnaaaagcgaccttcactaatgnggatatagctcagngatgtgaaagnggagggttgtgggnncagcacaggcaagatttggntgcctggcctgggcttcacggaccccagccagagctggtactttttaactatggccttaggacaaaccaggtgaaacagattaaccacatcctccttctttgggctagcaagtccagggctgcctggagtctgtctctaccatcaggatatagaatcttcctgcttggataaaagnagagganaaactntgtttctcatactttaaaaaccatgtggccnctacctttgtggataaaaacccaggtaggatgctgtttggaatgcagaaagtgctgggcaagaatggaantactggggctgctttctcaactcagccaatttgagg

SEQ ID NO: 656360 - DNA, 1017 bp, Homo sapiens
gcaagatggggctgatgtacccctacatcttccatgtcctgaggatgggtgaaatcaaaatgctgtttctattgaagatgaaatccaacaaggacctgcctccggactcgactcatgctctataggcccagctctcgtcagtgatgtgctacgtgagtgcctgtgttagtttgggagaaagcagaaacgaaaactgagagactggctgttagacaagaacagtacttctcatcagatatattctcatcagtgatcattcaaggacgtagatgggcagattcaactgtaggaacagtctgcctcaaaccccggagactggttgaatagctcttgtcttcagggacggtggacctggcccatagctggaagtaggctgtggtagggtacaggctggtcatgatggaccatagaaccgagaggatgtagggcctgcctgggactgaagtgaggttctggacacacccaaggaatgcataagaccctgtcaacgtgcccactcatacatcagtgagtgctctgctagacgttcttacaggtagttgtgtgcattatgcgacaggcgtagccattgacatccctttcgggtgtgcgggagactcatcagtgccctattcacttgggcatcactggcgatgacccaccataaccttctaccgatgccctgagtcaagaatccaggataactactaggacagagtgatcttagaaatccctcgaggcaatttcaggctattagctctacttgatgagtggcgtagaccatggccataggtcgctaactgactgcatggcggtacgacccttcccttgggaatcactgttgccatggggttgatcagaatggaaaggttcggcccaggttcaaaaagcaacagaagcacgccgggagaaggaaccaccgcaggaccccaggcagggggccagctggacaaatgcgccgcggagaaagggccaaagtacgccggtgcgtttatctaagaagagagacttacacgaataccgcgcccaagaggtggc

SEQ ID NO: 656361 - DNA, 352 bp, Homo sapiens
ggtcatccacaacttcccacagcagcccagtgttcaactgaccacagcactgtcccctggcagtaccacagaactaatcctttggtcaacgaatctacaaccttccagagcagcccaggctccactcacacaaaactcttccctgacagcaccacaagctcaggcatcgttgaggcatctacactgcgtccacagcatgcactggctcaccacgcacaacactgtcccctgccagctccacaagccctggacttcagggagaatctaccgacttccagacccacccagcctcaactcacacgatgccttcacccccaggcagcaatgtgctattgaaacttctaaaactagg

SEQ ID NO: 656362 - DNA, 1262 bp, Homo sapiens
gtcaactgtgcaatacttcctttcggtattagttgctgctctccttatcttgcttatgcgggggcttcctcatcttgtaatcgcgtgctatcaatgtctcgcgcgccctgccatgttgtctcttaattgggttaaggatgcaagttaagctactacttggattttgctcagtgtaagcggctaataggtattttttggacttctttcatggccataacccgcttaccaacttcgtttcttcacgcgtaccaggccattctaggctcttgggaaactgtggcgactttcgaatcttaacaactatcattccaacaatgcgtctcttcctgccatttctgctctaagcctcttcttggttagttcgatcacgacagtccagttacaagcactatcctcagaccggtttgtaacggcaagtgtagccatggaaatcttccttaaggaacccaatatatccctgtgaccaaggggggcactaaatcacttggtttccaccgactgttactactcgcagacgggggagtcaacaaagtcttggccatgcacgagagtcgatgcacaacacgttgggtggcaatgcaaccaccgaattcgcgtacttaagcaccggagaagcatagggactccacaccgtggtcccaaaggtcctcgttggttcctagcctagaattaaaggcatgtgttcctttagctctccgttcttgctctcatactgttttgcatctatatcagtctgcgataggaagagtattcagggatatatgaactagttttacatggatgcctccatttcaacgtgtctaaacgtccctcattgttcccatagtctactctgtggactcccgctctcgatgggatgtcaagaacttctcataagttcatgaggaacagcatgaagggcctatttagccctcaattgaccttttgtgatgggacgttgcaactcatgactatcctgactattggtgaagaataggactttgcttaatgcttgcgtccccgcgatagctcgtgtctgcgtagggtctacaatcatgtacgtctagaatcactacacaattcctcttagtcttcactccaagctccagagccagttggtacaaatgctttatagaaagctaaatacataatacacacaatgagatgaagacaatatagaaggtctggatagtcatcattatcccgttcattggccggttgaggcaggtcagtggctgagcccagttaaagccaacccgcagaaatcactcagcgacttaaga

SEQ ID NO: 656363 - DNA, 145 bp, Homo sapiens
tgcagtcagtttgaaacaccgatgagccagccctggagcctcaggcctctggagtcacggcggtccctcgagacccttggattgcgggactccttcagtgcttcacagagcccagggcatgagcttcgcaccctgcgtgctgtcc

SEQ ID NO: 656364 - DNA, 452 bp, Homo sapiens
  misc_feature (384)..(384): n is a, c, g, or t
  misc_feature (421)..(421): n is a, c, g, or t
cacgagggtgagaatggcgcggccgacggagttcatcctctattggtggagcggttcagcccggtgtcgttcgaccgggacgcgaccctgagtgacgcagaggtcgacgttctgctcgacgccgcccgtctcacaccatcggcgggcaactcccagccgtggatgttcatcgtggggcgccgtgacgaccccgtccactctcggatcgtgaatcacctggcacccagctcagcgcgctgggcgcccgatgccgcactgctgatcgtgaacctggctcacgtcctcgtcgaagacacggactgggagttctccgaattcgcgcgatacgacctcggacaggcggtggcccacatgacgattcaagggctggtcatgggactcggngcacatcagttccgcgcgttcgatcgtgacggtgtcncgcgcgagttcggggtcccgggcgcatggga

SEQ ID NO: 656365 - DNA, 724 bp, Homo sapiens
  misc_feature (115)..(115): n is a, c, g, or t
  misc_feature (136)..(136): n is a, c, g, or t
  misc_feature (142)..(142): n is a, c, g, or t
  misc_feature (188)..(188): n is a, c, g, or t
  misc_feature (203)..(203): n is a, c, g, or t
  misc_feature (205)..(205): n is a, c, g, or t
  misc_feature (212)..(213): n is a, c, g, or t
  misc_feature (218)..(218): n is a, c, g, or t
  misc_feature (228)..(228): n is a, c, g, or t
  misc_feature (257)..(257): n is a, c, g, or t
  misc_feature (276)..(276): n is a, c, g, or t
  misc_feature (303)..(303): n is a, c, g, or t
  misc_feature (314)..(314): n is a, c, g, or t
  misc_feature (323)..(323): n is a, c, g, or t
  misc_feature (342)..(342): n is a, c, g, or t
  misc_feature (344)..(344): n is a, c, g, or t
  misc_feature (349)..(349): n is a, c, g, or t
  misc_feature (353)..(353): n is a, c, g, or t
  misc_feature (357)..(357): n is a, c, g, or t
  misc_feature (363)..(363): n is a, c, g, or t
  misc_feature (365)..(367): n is a, c, g, or t
  misc_feature (399)..(399): n is a, c, g, or t
  misc_feature (404)..(406): n is a, c, g, or t
  misc_feature (410)..(410): n is a, c, g, or t
  misc_feature (412)..(412): n is a, c, g, or t
  misc_feature (416)..(416): n is a, c, g, or t
  misc_feature (418)..(418): n is a, c, g, or t
  misc_feature (424)..(424): n is a, c, g, or t
  misc_feature (435)..(435): n is a, c, g, or t
  misc_feature (440)..(440): n is a, c, g, or t
  misc_feature (442)..(444): n is a, c, g, or t
  misc_feature (447)..(447): n is a, c, g, or t
  misc_feature (462)..(462): n is a, c, g, or t
  misc_feature (475)..(475): n is a, c, g, or t
  misc_feature (477)..(477): n is a, c, g, or t
  misc_feature (483)..(484): n is a, c, g, or t
  misc_feature (487)..(487): n is a, c, g, or t
  misc_feature (490)..(491): n is a, c, g, or t
  misc_feature (503)..(503): n is a, c, g, or t
  misc_feature (506)..(506): n is a, c, g, or t
  misc_feature (515)..(515): n is a, c, g, or t
  misc_feature (551)..(551): n is a, c, g, or t
  misc_feature (581)..(581): n is a, c, g, or t
  misc_feature (601)..(601): n is a, c, g, or t
  misc_feature (626)..(626): n is a, c, g, or t
  misc_feature (653)..(653): n is a, c, g, or t
  misc_feature (713)..(713): n is a, c, g, or t
tgcaggaacccggcgatatggctgccgctgtgccccgcgccgcatttctctccccgctgcttccccttctcctgggcttcctgctcctctccgctccgcatggcggcagcggccntgcacaccaagggcgcccttncccctnggatacggtcactttctacaaggtcattcccaaaagcaagttcgtnttggtgaagttcgananccagtanncttanggtgagaagnaggatgagttcaagcgtcttgctgaaaantcggcttccagcgatgatntcttggtggcagaggtggggatctcanattatggtganaagctgaanatggagctgagtgagaaananaagcngganaaanagagcnannnagtcttctatctcttccgggatggggactttnagaannnagtncnaaanantggggnagttaaggttngagcnannnagngctggctgaaggggnaaggggtctaccnangtatgnntgnttnnctgcctgtatangangccctggcnggggagttaataagggaatatggtgtggaggaccgnaaggaaatattgaagaaggggcaagataanctctcaagtgtgaaggagantcagaagaagtgggccgagcaatanctgaagatcatggggaagatcttagancaaggggaggacttcccagcatcagagatgacacggatcgccaggctgattgagaagaanaagatgagtga

SEQ ID NO: 656366 - DNA, 288 bp, Homo sapiens
atgggaagtggtatagaatatacatcacaggtagaaaatgctaggaacccacaggttaggattcagattttttttggggatattagaaatacttaccgggttgcgcatcacaatcccaaaactcaaatccaaaatgctccaatgagcaagcatttcctttgagcaccatgtcggagctcaaaaaatttcagatcatgggacccatggcagcatttcagcatctcagttttcaggcacggttcactctcactcaggttgccagccgagggtaacgtagaatatataaaa

SEQ ID NO: 656367 - DNA, 862 bp, Homo sapiens
gccgggcggcaacaacacaggttgggtgcggccagggcttgtacggtgcggcgaccagtctgcacgagggagctgtgcctgggatcgtgggtggctgtgcagtggctggggcgatcggcttggcatgcatgctgttcagtgtgtgaccctgagttggctggtatctggtgcccagatgcccctgcagtctccactgtgtcccctgcggggacggtggacaggacgggcaagcgtgctgcagacgctgtctgtgggcaggcctggcacggcgtgcgatgggtccggtgggtgtgcccaggtgcgaacgcggcagtgctggcacggggatggggacgttggcacgtggggctgtggctggctgccgggcgcggtctatgtggctgccgctgtgacgtcacgtgcgcgaaggcataggtctcgtggccgaagcgtatcaggcatctcaatgctggcaccgcgtgtactgcagagtgccggcagcagggactccgcaggccaatcgacgctcggccgctgttcctccgacgacaacaggagggagttaccttgggaacaatccacgcggtaccttcgagccttccattagtagcatccaacgtggacgcaggcgtgacagtccggcttggacacgcgttggtgggagcccgacgagtagcaggagaatcgcgcctgcatatcatccaacgctggcccccgaaaaaccaatgacttggcccaacaaaagacatagataaccaaggcggccaagcaggaccacttagctagaaacaagcagggacaacaaacgggcatagatcgagtagtcaaaccaccttgacccagcgtgtacccccctggcacaacacagacccgacacagtagc

SEQ ID NO: 656368 - DNA, 305 bp, Homo sapiens
ggaaataatacgcactaccgaaaaaattccaaccaggtcccgaggcgttttggaattcctccccactgtaggctgagtgacctgaaggttgggccgactggcggagtcccaaagcttccgcatttccttagtgtcaggatctacttcaataatctcctggatccaaggctgagacctccggaacataattgtctctcctttctcttctctcctcctggaagttggatggagaatacttcttactgggcctctctgtattcgcttcatcagatgcgtgacataacctgctatcttgttgggagctt

SEQ ID NO: 656369 - DNA, 534 bp, Homo sapiens
  misc_feature (6)..(6): n is a, c, g, or t
  misc_feature (36)..(37): n is a, c, g, or t
  misc_feature (107)..(107): n is a, c, g, or t
gccggnggaggcatggccattcggctcatgcgctcnnctcccggagcgttctctgctcgcttcctgactactgggattacggcgcccaccacctgcccgctaatgtntcagtagagatgggtttcacctgttggcctgctggtctctaactcctaacctcaagtgatctgcccacatcggcctccaaaagttctgggattatagtgtgagccatgcgcccgcctggctcctaatcttgatccaattattgttacatccgatgtgatgaatcaaaatctcgagatgggggtccgcaatctgaatttcagtatgccagggcttttctgtatgccaaagtgggtttgaaatagttaatttttcttctagtctgaaatgtatcgggaaaatttggaaatcctgaaggctggaaattgaaataagtttttctaggatttgtgtctcttgctattggaaaactgatggtgaccaattcatgtttacaaataagatcctcatagatctcggtaaattataatttgctacagttttatggtc

SEQ ID NO: 656370 - DNA, 925 bp, Homo sapiens
  misc_feature (11)..(11): n is a, c, g, or t
  misc_feature (75)..(75): n is a, c, g, or t
  misc_feature (282)..(282): n is a, c, g, or t
  misc_feature (334)..(335): n is a, c, g, or t
  misc_feature (343)..(343): n is a, c, g, or t
  misc_feature (358)..(358): n is a, c, g, or t
  misc_feature (362)..(362): n is a, c, g, or t
  misc_feature (372)..(372): n is a, c, g, or t
  misc_feature (402)..(402): n is a, c, g, or t
  misc_feature (408)..(408): n is a, c, g, or t
  misc_feature (448)..(448): n is a, c, g, or t
  misc_feature (485)..(485): n is a, c, g, or t
  misc_feature (495)..(495): n is a, c, g, or t
  misc_feature (498)..(498): n is a, c, g, or t
ggttctagtanttagggtatgaagacatggggtcctctcctgacttccctcaaatatatggtaaacgtaagaccnacacagacgttggccagttaaacatttctgtttataaagtcagaataatacctgttgatcactgaaaggcctgcatgtattgtactctgaattttacagtgaatgagagaatgtaccctaattgttcaacagggctcaaaaggaaagattccattttgatgggtcacattctaaagaggggcagtgtgataggaatgagatggcccnttagcccctaagttccccgccccaggtttttccacgtggccccccccccccnntttttttnttaaacggagtctcncttnccaggctggngtgcagtggcccgccctccgcccactgccncctccnccccccgggttaggcgagtctcctgcctcggctgcctggngggctggggtggcgggcgcccgccgccatgcccggcngggttttgtnttntcagtagagatgggtttcacctgttggcctgctggtctctaactcctaacctcaagtgatctgcccacatcggcctccaaaagttctgggattatagtgtgagccatgcgcccgcctggctcctaatcttgatccaattattgttacatccgatgtgatgaatcaaaatctcgagatgggggtccgcaatctgaatttcagtatgccagggcttttctgtatgccaaagtgggtttgaaatagttaatttttcttctagtctgaaatgtatcgggaaaatttggaaatcctgaaggctggaaattgaaataagtttttctaggatttgtgtctcttgctattggaaaactgatggtgaccaattcatgtttacaaataagatcctcatagatctcggtaaattataatttgctacagttttatggtc

SEQ ID NO: 656371 - DNA, 445 bp, Homo sapiens
gggcgggggggggcgattcacaggctccgggtttgagacgtggggcgcggggggggaataccaattttctgcgaggaggacggctgtggccgtaggggcgattgggggggccctgaaggacgagggtgggtcaaaaaagggggggggggccggtgggggatttgcgggggatggtgggcccgggggtcgggggggactttctgggaagggagccagggtttcctggtcgaatggcacctctccgggggcggggactcggcatacaggggcgggccctatgcgcccttggcgtttttgccgcagcacaatgggggtcactcccgcccccccatttacaacataaaaccctcattcccccgggaaaaccccccccagggtcatacccctattcccccattttcctcctatccctcaaccccgacatcattaccggggtttcctttta

SEQ ID NO: 656372 - DNA, 1894 bp, Homo sapiens
  misc_feature (247)..(247): n is a, c, g, or t
  misc_feature (1396)..(1396): n is a, c, g, or t
  misc_feature (1894)..(1894): n is a, c, g, or t
ggaaaaagtaggacggcgatgtcgtgtgcagagaatgtgatagttggagctcgactatcatcgatggatggtgctcgttcgagttttgtgtctggcaggaagagatggaacgatgcatgtggatcaccagggtaaccttgcgtccctgggcgcaagtcagatgtgtatgcgagagtaagcattagctcttcgaagtaacgagcaaggcatgagtgcactagaaagttgcacgcttacctgtgaaagncctttgtggaaatgcgcacatctacgcagtcgtgcgcagatggacataagacgaaggcgaaggcgaacctgctcgtgagggggtagcgcttggttgagaacacatgagtactcaaccagttcagaaagcccagccggtggcattagaagggcttcattcataactccgtcggccccgtactgtaacgactgggcgaggaaagccaaacgcggcgtcttaccacaaattgcttcttcgttggacactaactcggaggtaggtgtttacccggtgtcaattgagattacccttcagaggtcaataatgtgctaggttcagagcagtttctccatcacactaacccggattctttgtgagctcagattgggaaccgtgccgattataaaacttttgtggactcgaaatgtcactagcatgctgcaagcctacattcgatttccatttattcaaccttgattgtaattctcgcagcgcgcattgtcttggcgtggaaacaagcgacaccaaccaatcttaaaaaattaacccacagggctattagaccatttcggagtttcaggacaagaaattggcgggttagcgcaacttagcttagaaattcggttattattggccctagacacatttgtttaggggcacttcaagtgcctcccaatgtcaacgacaaggggaacccccccggacacattttgttttgacgtgcccgcgatgagaacacgttgacccactaatcacaaatgctgtttataccccattggacgggttaagacgttggcgggcaatgtgtaagcagacgttactacgtgcgctgtgaacattcttttccacaagtgggtcacaatggggcgccacaagtgtatgtaccgagttttggaactcttcccaaaacaaggggcctatcgagtgcagcctgggatgtgtgccccatcctgctttgttgacaccttcccggtagaggcgttgagctatcatgacgtcacgtggccgagcccagtgggtaagcaacatcccattttgaaagcggtccggtgccaggggaatacaccatgggtgttgtgagccccgtatttgaaagtgccaagatgattgggcaaaattgataaagaaagccatttgtagcagagtggggaacagcaatgtgaggccgangttgtgtttcccacggtcgccgatacctccacgcgcgagtaggtgttgtgcaacgacaagcctttgtgctaacaatacacacgagcctgcgtacaggggaaatgtgttccgagcacacatgagtgttgtacgtcgacacacactcggttggagcgccacggcgtgttgttttcctcctataacacagaagcagagctctacatccccatgggcgcagaagcaagaagaagcacgaacacagcaacaaagaacataagacagaacgaaagaagcgaacaccacaagcacgacaacaccacaacaagtagcgcggcgcaaggacacaaagactgccagagagacgagcacagaacgcacacgacgtcttgagaacgctctaacgagtcacgaaaaaaaaagcacgcgagcgcggagacgatcagcaggaagcaagagagacgagaacatgaaagaccaacgcatagagcatagagcggcagagcacagcacacgcctagn

SEQ ID NO: 656373 - DNA, 1221 bp, Homo sapiens
  misc_feature (590)..(590): n is a, c, g, or t
ggtggtgcttctctccgcaggcgcccccattgggctccctctaggggggtccccttttttcttctgccgccagccccccctggcgtgggttggtgaggcaccgcccttgtgcttccatcgggaggaattgtgtcctcgtttgcgagaatagcggctgatggtgggtgccccacctggctggaccctcggcggatgtgttgctctcccccctcctccactttattgttgcaccagcgtcagccgcttccgctggcggtagaaacaaattgtggttgtggtgtcccctcagcggggagtaggagtcttcttcgctcgtttggggccaacttctgctgcggctgtggtgaaattgtatggggtgagacgacgacacccccccccttctcacaggcccctctccatctcaccaccatctttgttgagacctcatacctcctcataatgtgtgacgactcatgacctctctataccccccctctctggccctctattagagagtcacacctctcgtctccacagcagagagagagccctataatgtctctcaccagcgtgttcttccacacacacataagtcgcccccgcgtgtnccgcacacgcacacattttgtgtctttgtatataggcctcgcacccccacgcggctttatcacagcgagcacttgttcgtgtgcccacacatatgtgtgtgcaatagtagatatatatacctgctgcaccctacaccacacatatatgtcccgcccatcttcgtgcgtatagagtgtacacacatcatatgtagatgtgtttcgtctctgtgtgtccacacacatggtatatatctgtgccacgcgtgagatttgtgctccacgcggcgccgcgcgtgtggctcacacacgccctcgtgaaattcccacgccacactcgggagaggcccgagaggggggccgcgagttcgctggagaagtccacgcgaagagttcgagagacccacaccctcgggctaaacactggtggagaaacccctcgtttttatccttaaaaatatccacaaaaaaattatccccgcccatggtggcgggcccccgtataatcccacgctaacttgggagaggctgaaggccacaggagagaatatgcgcacatgaacacctcgggagaggcacgagacttgccgatgagactgagattgcgcccctgcactcccccctgggccaccgagcgagactccctttccta

SEQ ID NO: 656374 - DNA, 182 bp, Homo sapiens
gcgtcgactttttttggatttttcaaaatttattgtattcatatgatagatacaacacagcaaaattaatgttacacacaatagcataaaaacaaatcttacagtcataatgttaagagacaagccagaacataagagcataccttttaaatctatgaccatatttcttagacattcaagaa

SEQ ID NO: 656375 - DNA, 299 bp, Homo sapiens
ggcccagattggttcttgcattgtcaccccagctgcagtgcagatggcacaagtctcggctcactgcagccttgacctcctgagctcaggatcctcccatctcagcgtcgtgagtagctgggacaacaggtgtgtgccatcgacacccagctaatttttttattttttgtagagataggggtctcactacgtagcccaagctggtcttgaactcctggcttcaagcgatgctcccacctaggtgtcccaaagtgctgggattacaggtgtgagccacattcctagctgaataatctcaa

SEQ ID NO: 656376 - DNA, 782 bp, Homo sapiens
gctgggcctggagcagccaagaatgacgggctgtatgactttctgtgagcccccagcgaggggaggcccagctccgagagaccaggaaccctgcttcagccaggccctcagggcttcccaaggatgtccagccgccacaccacacgttaccataatgagtcactaggcttctggggagggccgaacttcacccatgcatgagagactctcctcctttccagagagaatcggatctggcaccacgtgtggcagccatgaggcgggcgggagcgggggcctcgtttagctctctttatcttggctctctcactcatgtatgcatacatgcacagagatgcatacacaggtgcctatgcaacgttcagtttaatgccctcagggcttggtccctgcccaaaggggctgggaccctcctaatcctctcctaggtatgtggggcttggtcccctgacaccgcttctccccttccttggtagaccttaaactcgcagcacatgtccccagcattttctccacctggatagaagcccataagctgggtctcaaggctggggctcaagaaacaggacttcgccttgctaatccgagaggccatttcccaacccccccagagaaaagctcccctgttttcactattcaccatgggattcccagagcaccggacacatggagccccacaggccaggttgacggtgggcacgggggacttccgggattcccgacagagactcaggtcatttaccttatctctattaaaaaatctaattctcttagctctgaaa

SEQ ID NO: 656377 - DNA, 149 bp, Homo sapiens
gtgacgtggcctggccttatcccaggcagctgtatgggtgtgaagcagcacaggcctgacactgacatggcattggctctcaaaaatgccacttgagtacgagtgagtggctggctgacacagtcagagttcccaccctgacttccatg

SEQ ID NO: 656378 - DNA, 114 bp, Homo sapiens
ccccccttttcacctcctcattttttttgggtctttctgttttccttttttcaccctcctccctccccttagccatcacttttgggaagtaaagaacttggcttagggccggga

SEQ ID NO: 656379 - DNA, 397 bp, Homo sapiens
gagctcggtacccataatacaaaggttaaaacaggctttaggacacacctggctgaatatgtgatcacagaggagttaaattctgagtgattttttaaaaaaaacgtatgaaataggatggacctagagggcattacgctaagtgaaataagtcagagaaagacaaataccatatgatttcacttacatgtggaatctaaaaagcaaaacaaatgaacaaacaaaaagcagaaacagacccataaatacagagaacaaactgatggctgccagaggagacaggtagggaggatggggaaaatgggtaaaagggaatgggagatgcagacttccagttctggaatgggtaagtcacagggatgaaaagtaaagcacagagaatgtagtcaatggtacg

SEQ ID NO: 656380 - DNA, 910 bp, Homo sapiens
  misc_feature (784)..(784): n is a, c, g, or t
cgccggatccaggtttattactagcaaaccctgcggagggggaaaacagcttattgtcagtgcccactgccgctcacaggcgggggtggtcatagcgctgggagggagggctctggacagtatagcttgctgctcagtagaagatgataaggatgttcctgaagtcaggctgttgggcctttgcccagcaggatgtgataaggatgtttctgcagtcaggtggttaggacatttctcacaggggggggttcccatggaatgttttactccaaccaggatctgggcgtccttcatgcttccttcctcaggggggcccaaacagaaacatggggcaattccacgcaggggccatggagggaacaaaaaacaaccccaatgaaaacccacggggggggataaatcttgccccaacatgaaactaaaaccgggtgcttcttaccacttaccaaaaaacagggttatgaagcttacccagccccctgaagggacgttcagggggccaaccaagtggggtgggggtgtcagcttgcttggtgggaatcccaaaagataaagataggcctggggggggtggtaatttaggggaattccttcaggcttaagtgtggaaactggtgggttaaaaaccgttggtgggggagccacattaagcgtgtaaaggcgcctctgggccaaataaaatttttgaatatgcgagcgggggagtattccgattggtgatggagaagaagattgggaggttgtgaatgtgtggggtgatggttgttttaagggggcgtgaacngtgttttggcggcttttgtaaagacccgaaagaatagggtccgctttttccgctgcttatgtagagttttggcccgcgtttaatttgagtgcggtatccgctggggaacgaaagccggggcggcgg

SEQ ID NO: 656381 - DNA, 307 bp, Homo sapiens
ggagttcgaaaccagcctgagcaacatagtgagacttcctccctatttaaaaaataataataaaaaccaggcgtggtggtgcgcacctgtaatctcagctacttgagaggctgaaggaggaacactgcttgaattcagggaggtcaaggctgcagtgagctgtgatgacgccactgaactccagcctggacaacagacccagtctccaaaaaaaaaaaggaaaggtaaaaaggtagggcctaatcagggaggtgccggcccatttctctggccaagattgaggagatagaagggggtgatgaagcat

SEQ ID NO: 656382 - DNA, 281 bp, Homo sapiens
  misc_feature (89)..(89): n is a, c, g, or t
actcttacggtttcggcggcaaatactgtttcaacaatgacttattggaggggagcgccgccccctttgattatcaaggcaaaacgganaatcacgagtcccacaaagactatgtgagagggttcggaggattatgtggtgtgcagacagacaaacactacaaatgtgaccttggcagcgatcacgacgacatgttgtaaccgcatcactcccaaaaatattatatgactggtgtgggacgccaattcggtgttcactcggagaggcaggactccgatgct

SEQ ID NO: 656383 - DNA, 205 bp, Homo sapiens
gaatgagcagtcacacgagttagcccaaatctgtagtagaaaaggccacctctggcatgtctaaaacatctgtagagtctgtaaaacttgcacatgttggaggagaatgcaacatattcctcagtatatatggaggcagaagcaacagctctgcactctgacacatctatgaaaggtcatgcctgaggtacctgcacaactcctg

SEQ ID NO: 656384 - DNA, 869 bp, Homo sapiens
  misc_feature (38)..(39): n is a, c, g, or t
  misc_feature (41)..(41): n is a, c, g, or t
  misc_feature (64)..(64): n is a, c, g, or t
  misc_feature (178)..(178): n is a, c, g, or t
  misc_feature (189)..(189): n is a, c, g, or t
  misc_feature (201)..(201): n is a, c, g, or t
  misc_feature (204)..(205): n is a, c, g, or t
  misc_feature (215)..(216): n is a, c, g, or t
  misc_feature (555)..(555): n is a, c, g, or t
  misc_feature (564)..(564): n is a, c, g, or t
  misc_feature (566)..(566): n is a, c, g, or t
  misc_feature (568)..(568): n is a, c, g, or t
  misc_feature (579)..(580): n is a, c, g, or t
  misc_feature (592)..(592): n is a, c, g, or t
  misc_feature (605)..(605): n is a, c, g, or t
  misc_feature (609)..(609): n is a, c, g, or t
  misc_feature (620)..(620): n is a, c, g, or t
  misc_feature (623)..(623): n is a, c, g, or t
  misc_feature (625)..(625): n is a, c, g, or t
  misc_feature (633)..(633): n is a, c, g, or t
  misc_feature (645)..(645): n is a, c, g, or t
  misc_feature (658)..(659): n is a, c, g, or t
  misc_feature (666)..(666): n is a, c, g, or t
  misc_feature (672)..(672): n is a, c, g, or t
  misc_feature (680)..(680): n is a, c, g, or t
  misc_feature (684)..(684): n is a, c, g, or t
  misc_feature (699)..(699): n is a, c, g, or t
  misc_feature (707)..(707): n is a, c, g, or t
  misc_feature (711)..(711): n is a, c, g, or t
  misc_feature (723)..(723): n is a, c, g, or t
  misc_feature (725)..(726): n is a, c, g, or t
  misc_feature (731)..(731): n is a, c, g, or t
  misc_feature (737)..(738): n is a, c, g, or t
gagcctgcgagtgttctgagggaagcaaggaggcgggnngnccgaggagtgcgagtagtgaaangtgcttctgaggggagcccaagatgaccggttctaacgagttcaagctgaaccagccacccgaggatggcatctcctccgtgaagttcagccccaaacacctcccagttcctgnttgtctcctcntgggacacgtcngtnncgtctctacnnatgtgccggccaactccatgcggctcaagtaccagcacaccggcgccgtcctggactgcgcttctacgatccaacgcatgccctggagtggaggactagatcatcaattgaacattgcttgattggaacactgatcacgaaaaatcttgtgggcgacccattgatgcccctatcagatgtgttgaatactgtcccaagaacgtgacatgtgatggtcacctgaaaagtgggggatcagaccagttacaactgtgggatccaagaactccttgtaagtgctggggaccttctctacagctcgaaaagggtatatacccctctcagtgtctggagaccggntgattgtgngnancagcaggcccnnaagtgtgggggnggacttacggacnatgngttacgtgagnagngnagggagtncagcctgaatancagattggtgatnnaggggtnccaacnagcaggtngtantaagccatgaggcgngggagtgnattnggcccagcctgngnngaganaaagtnnttcatgtgcgcaagaggagaatatgggcgattccgacagcgttttaatcaaatttgcgggtgtgggtgaaatggacacaagagggcctgacagcgagtaataggagagattatagggaacggattgggaaa

SEQ ID NO: 656385 - DNA, 255 bp, Homo sapiens
ggcacgaggggattacaggtgcacaccgccaagcctagctaatttgggggtatttgagtagaaaccccatctctactaaaaatacaaaaattagccaggcatggtagcatgggcctgtaatcccagctgcttgggagactgaggcatcagactcatcactgattctcatcaagcgatgagaacgtttgaacccctggaggcagaggttacaaagagctgagatcgtgccacctcatttcagcctgggcaacagag

SEQ ID NO: 656386 - DNA, 1209 bp, Homo sapiens
  misc_feature (515)..(515): n is a, c, g, or t
  misc_feature (1209)..(1209): n is a, c, g, or t
ggcgggcgcggtggctcacgcctgtaatcccagctctcagggaggctaagaggcgggaggatagcttgagcccaggagttcgagacctgcctgggcaatatagcgagaccccgttctccagaaaacggaacaaacaaaaacccaaaggacaagcacaaaaaaacaaagacaaacaaaaaaaaaaatgtgtgggggcggccgtggcccctaagaaaaaggtttcctaaacccattcggtgggggcgcggcggccccagtttggttaacgtgcacacgggcccacaaggcggtgttcccaagaggaacaaccgggccacacacacagggggcgggggtttccccccccaaataaaaaaacccggggagcggacccaccgagggggtgcttgggaaacaaccgccaaagagggagggtcgaggcggcgacgtcagcgggagtcctatcaacaagaggcgggtccaagagggagcggcagaatataaatattctacggccgccgacggagagtgagtantacaacactacgagaactctaacaacacgcacgacgaccacacgagcgcatagcgatactcagcacaagcacagacgcgatgacgaatcagaagagaacgatcactaaggacagcaatctcacgcagacgcagcgacgacaggtacagtacacgaaactacgccaccagcacactaccatccacagcgagaagagagagagaagaaagagagaaagacagaacagacaacaagcagaggacggagcaacacacacataagagcagcgagacagcgcgagcgagcgaaggcgacgcaagagaacacgaacagcagcgcagaacagaaagcaacagagaacaacgacgcaggaggacaaacaccacgagaacgaagaacagcaacaagcacacgcacagagacacaacgaccaacaaagaccaggacaatagcaagacaggagagagaggcacgaaacgcacacgagaaagaagagagagcactacacgcagagcagacagagagatagcagcagactacaagcagaagaacgaggagacgcacagaaccagacaagagagactaacggagaggcaaggagacagaggaagcagcgaaaccagagctaacgactcagacgcaagcacacaagaagaacggaacagagcaaaagcgcaaggcgcagccagacatctaggagctatcaaggtgtgcan

SEQ ID NO: 656387 - DNA, 867 bp, Homo sapiens
  misc_feature (867)..(867): n is a, c, g, or t
gctctttcccatcttgcaagatggcgggtgaaaaagttgagaatccagatgctacagagaagaaacccgcaagaccaagcaaggttgatgctgtgctgtgcatggtgacatacacgggtcaaccatcaaacagcttaaaaagcactccgaagaagggggaagcccctatttgcagcgcaaccctgtccttgtcagaggacatatgcgtcagggtattcctcgatctgcctatgtattccataaaggcctatgttcccagaggaagtacatcatgacctgcatatatccaatagtgttgcaatacagaaaacacagcaaggtagtaaggttctccgtgcaattgtttacaaaacccagtatggtaggctgagcacagaacggcccggtaaaccccgggggtggctattaaaatcttctgataacatatgacctcataattaattgattccttatctgcaccagtatgtgactctgcgaacataagctgtatgacgtccaccggcaacctaaggccttccatatcacgactcgtagagacatccttgcgtagccggcacattagacccttcgtggaaaccatttcttggagtcatcctcatctgggtactgcacctcagggtgggccaaacgagggggtgtgttttatcacgttgaaaaggcaatgcctgggcttatgatgggattttactttaccttttgtttgaacttggggatcccattcggttgggatcccgttcaaattacgggacgttcacttcgtatcggagatcgaaactacgatcccatgagaccacttcttgtcaatttgcccgacattcctaagcccaggggattcctgagttattcaaggtcaacggtggttacaan

SEQ ID NO: 656388 - DNA, 852 bp, Homo sapiens
  misc_feature (27)..(27): n is a, c, g, or t
  misc_feature (34)..(34): n is a, c, g, or t
  misc_feature (63)..(63): n is a, c, g, or t
  misc_feature (115)..(115): n is a, c, g, or t
  misc_feature (122)..(122): n is a, c, g, or t
  misc_feature (126)..(126): n is a, c, g, or t
  misc_feature (156)..(157): n is a, c, g, or t
  misc_feature (174)..(175): n is a, c, g, or t
  misc_feature (204)..(204): n is a, c, g, or t
  misc_feature (263)..(264): n is a, c, g, or t
  misc_feature (279)..(279): n is a, c, g, or t
  misc_feature (282)..(283): n is a, c, g, or t
  misc_feature (286)..(286): n is a, c, g, or t
  misc_feature (291)..(291): n is a, c, g, or t
  misc_feature (322)..(322): n is a, c, g, or t
  misc_feature (366)..(366): n is a, c, g, or t
  misc_feature (372)..(372): n is a, c, g, or t
  misc_feature (400)..(400): n is a, c, g, or t
  misc_feature (417)..(417): n is a, c, g, or t
  misc_feature (470)..(470): n is a, c, g, or t
  misc_feature (477)..(478): n is a, c, g, or t
  misc_feature (490)..(490): n is a, c, g, or t
  misc_feature (493)..(493): n is a, c, g, or t
  misc_feature (768)..(768): n is a, c, g, or t
  misc_feature (775)..(775): n is a, c, g, or t
  misc_feature (816)..(816): n is a, c, g, or t
taagtactgtttttaaaaactaataanttaaaantgccacacgcaaaaaagaaaattaaagtngtccacaaaacattctcctttccttctgaaggttttacgatggattgttatnattaacnagtnttttactactaaacttaaatggccatttgnnacaaacagttctgaganngttcttccaccattgattaagagtggggnggcaggtattagggataatattcatttagccttctgggctttctgggcggggttggtgnncttgccagctccagnggnnttnttgtncactgctttgatgagacccaccggaactgtntgtgtcatatcacgaacagcaaagcgacccaaaggtggatagtntgagangctctcaatacacatggggttgccaggnaccatatcaacaatggnagcatcaccagatttcaagaatttagggccatcttccagctttttaccagaangggggtnnatcttttccttnagntcaggaaacttgcatgcaatgtgagcggtgtggcgatccaatacaggggcatagccggcgcttatttggcctggatggttcaggataatcacctgaacagtgaagccagctgcttccattggtgggtcatttttgctgtcaccagcaacgttgccacgacgaacatccttgacagacacattcttgacattgaagcccacattgtccccaggaagagcttcactcaaagcttcatggtgcatttcgacagaatttacttccgttgtaacgttgantggagcnaaggtgaccaccataccgggtttgaaaacaccagtatccantcggccaacaggaacagtaccaataccaccaatttt

SEQ ID NO: 656389 - DNA, 115 bp, Homo sapiens
ggatcttgagtcctactcacccaagcggaggtgaagagactgtccttccccaggagccgactggccaatcacaggcaggaacgatgaaggttctagagaggctgcgtatgctggt

SEQ ID NO: 656390 - DNA, 363 bp, Homo sapiens
ctcttttagttgttttgaaacaacaatccattattaaccttggaatttagacctttgggtctcattgtataactttccctggcttacactgctagctgtaagccagtgattctctaatattttaaaactattcaagaaagccatgtttaatgcaatctaatttgaaaatacagatatgcaataaaaaatgcatctgtagtaccactgaccagagaccaatgtaacattttgctctatgttcttctaagcttttgtccacacatatatattcttagaaatgaaaatacatggaattgtgctctatataatttttgtaacttgatgtttcatatcataaaactatgatgattgtttttgtaaaaa

SEQ ID NO: 656391 - DNA, 185 bp, Homo sapiens
ggttactactcacgatgcacgcacgacacctaccgtcaccgttcactgaccacaaccttacggacgacaaaacctacaccacgactgacacgacacgtacgacatgacaactgacgtcacgacgacacgcacgactactaagactgagacgacacggaccaacggtcacacctactgacacgaca

SEQ ID NO: 656392 - DNA, 997 bp, Homo sapiens
gggcggcggtgggaagatgctgctctttggcgtacatcgcaatcgattagggatcgttgctcagaatcaagttagaagtgagagttcagatgagtgaggccgccattggtgctttgaacacctcagaaggggagaatggatttgatcaggagtgacaaatgaagagcattgctaggagctctaagagaaacataataccaaagtccagcactagggctccttcatcctaccaaacgcgaaagacgcgtgtcagatgagaagtccgaaggatcgctcaaaagataaaggggccaccaaggagtcggagatgagaaggatcgcggccgggacagaaagcccgaaacgaggcgccagcgctgccagctcggctagcagcagtaccaggtctcggtccaggctcggacgttccagctcaggctccagcacccagacgagggtggctcaaagcagtggctccatgctcttcctcagcatccaggcgattcagtgaagctccaggagctcccaggagctccagctctagcaagctcttctgggtctccaagtccttctcggggcagacacgacaagaggaggcgctcccggctccaaaatcgaaaatcacctaaaaacagactgagaacggagaggaaagaggacggaagcgccatctcactaagacccgacgcaaaagtgcacattcggggagaactgagcgcggaaatgtgacgaagaggatcaccatacgatggaagataatctgccaactatgggggaacacatccaaagagggacgtggagcaatgcgagctggaacaatgggaacgggaaaacccgagaatcaggtcacaaaagggataagccgatacgggagcagccagagaaataccagaatgaaagaccggagaaagggggacggaccacactagaaatgaacgaccaaaagagatgggccaggagaacacggagcacaacgaggatgacgccacagggccacgagacagcacggcaggggcga

SEQ ID NO: 656393 - DNA, 501 bp, Homo sapiens
  misc_feature (132)..(132): n is a, c, g, or t
  misc_feature (145)..(148): n is a, c, g, or t
  misc_feature (151)..(151): n is a, c, g, or t
  misc_feature (155)..(156): n is a, c, g, or t
  misc_feature (165)..(165): n is a, c, g, or t
  misc_feature (170)..(170): n is a, c, g, or t
  misc_feature (175)..(176): n is a, c, g, or t
  misc_feature (178)..(180): n is a, c, g, or t
  misc_feature (188)..(188): n is a, c, g, or t
  misc_feature (191)..(192): n is a, c, g, or t
  misc_feature (206)..(206): n is a, c, g, or t
  misc_feature (209)..(211): n is a, c, g, or t
  misc_feature (226)..(226): n is a, c, g, or t
  misc_feature (234)..(234): n is a, c, g, or t
  misc_feature (236)..(236): n is a, c, g, or t
  misc_feature (252)..(252): n is a, c, g, or t
  misc_feature (269)..(269): n is a, c, g, or t
  misc_feature (271)..(271): n is a, c, g, or t
  misc_feature (276)..(276): n is a, c, g, or t
  misc_feature (305)..(305): n is a, c, g, or t
  misc_feature (315)..(315): n is a, c, g, or t
  misc_feature (319)..(319): n is a, c, g, or t
  misc_feature (328)..(328): n is a, c, g, or t
  misc_feature (336)..(336): n is a, c, g, or t
  misc_feature (353)..(353): n is a, c, g, or t
  misc_feature (381)..(381): n is a, c, g, or t
  misc_feature (499)..(499): n is a, c, g, or t
tactctgattttcttgtcagcctgcttcaaggaaatccatgtgttcaaaatgcttgctcgcagtttgctccataccaaatggttgcttaacccaaatatctggagcagcaaattgagctgatccttctgggnaatgtacggttgnnnnggnaagnncactgggtngtcgnggggnngnnnacacatcntgnnctccccagtctggnggnnnggggggggggggggngggtgggngnggggtgttgcgggggntgagtggtccgaaaggntnggttntgggtgcgactgccacaaatacagtaggnatgcgatcgncttnatactcagntttaatcntcagggtttcatgtggncctttatgggggatgtgagtcggagttnacatgggatgcgagaatttccacaggccttcttgattttttcacagtgaccaagatcagaagtagagcccatcaacactacaaccctgcactgactttctgatttcaaaagcaactcnac

SEQ ID NO: 656394 - DNA, 427 bp, Homo sapiens
ggcttcacaatcactgggggaaggtgaaaggcaaggaggagcaagtcacgtcttacatggatggcagcaggcaaagagagaccttgtgcagggaaactcccatttttaaaaccatcagatcttgtgaaacttattaactgtcaccagaacagcaagggagagacctgctcccatgattcatttatttcccaccgggtccctcctacaacatgtgggaattatgggagctataagatgaaatttgggtggggacacaaaaccaaaccatatcattctgcccctggcccttcccaaatctcatgtcttcacatttcaaaatcaatcatcccttcccaacggtcccccaaagtcaacccatttcagcattaactcagaagtccacagttcacaaagtcttcatcttgaggacaaggcaagtttcctttcg

SEQ ID NO: 656395 - DNA, 896 bp, Homo sapiens
agcggattcggcggcggctcccgagcgcggcggtgcggcttccccgccctctccctccctcctccagcgacgcttccgaccggcttatcatcctccttatgacaaaccagagcggtcgtgttgtgacatcttctggagtgcgagtgatagccactccatgtgtcacacaagaagtagcctcgctaccaggtccgaatgcaggactcggcgaagtcctgtcctcgtatgagggttccgtgggactgtagacgtctgcaaccttctcggaagagcgtcgcgaggaccttctatgtgcatgcatgtgcgatgtgcgtgattcggcatgtccagccggagagacctcgaactgtgtctcaatgctggtgtgcaacaagtaggtttgcatcgatgcagttgttgtgcctccatataacagttctataagtaggacgatgcatatacaaatgcatggatgtataacaatgtaaaaatggtgcgaaatggaacatagattagcaaaggagaatagactataatgaaaatggtaggcctaagagttgaaagagtgtgtgatcggaagtgatgcatcaagctattgtggaatctttactgtgggatatctgatcggtcattattacatgactttatggctgcaatcagatcgtccaccagctgtctgtctagttgctggctctgcagatggtcacagtctaaagcggttctagactacttgtatggccacagagagaaggaaatgtccaggtcgtcttcactcgagaggagaagcctcatccattgcatggtgaatctcgattgaagagttaattttcttcccaaattccttagagtcactctctgttcttgcccatgcatattaacccagatttattgcccaagaggtacccccattttccata

SEQ ID NO: 656396 - DNA, 96 bp, Homo sapiens
aaaacttaaaaaaaaaatttcccttttttactttggccccccccctttaaaaaaaaaaaaaaaaaaaatcctttaaaaaaaactggggcgccgtta

SEQ ID NO: 656397 - DNA, 484 bp, Homo sapiens
gtgaggccactcttaaaggaccccccaaccatgtcggggttacatgtgtcatacgccttccgggttcacacaattgcttatgcgttcactctcttgagtagctaggactaatgggtgtgccaccgcaccaggctgatttttgtatttttagtatagatggggtttctctgtgttgaccaggctggtctcaaactcctggtctcaagcaatccacctgcttcagccttccaaagcgctgggattacaggcatgagccaccgagtctggtgtattctttatattattaatagacacgagggtcttgccatgttgcccagacctgtctcaaactcctggcctcaagtgatcctcctgcttcggcctcccagtgtgctgggatctcaggcgggagccacagtgcctgacccaaaaccaagctttattatcccaagcaccgacctttatcaagtctacctaatcctctgttgtctccttaagtgtccct

SEQ ID NO: 656398 - DNA, 742 bp, Homo sapiens
cgtgacgcgttggcggactgctgtgggctgccggctggcgccggcgagtgaggggacgcggcgcggtgtgggcggcgcggcccgatggaggcggctgtgaggaggggccgcccgtgtgtccccggctcactccgtgcacttccgtggccgctcggcccccatgcctgcccgacctgcgctgccggagccccagtgtgacctagcgccatgtccagccaggtggtgggcattgagcctctctacatcaaggcagagccgtgcagccctgacagtccaaagggttcctcggagacagagacctgagcctcctgtgtgccctggccccttggtccagcttcccactcgctgcctcccaggccacagagggaagcaggaggcatggggagggggctgggcctggcgagcagtggcggtgggaagctggtgctcagctcccttgcccaagcgcctctgcctggtctgtggggacgtggcctccggttaccactatggtgtggcaatcctgtgaggcctgaaaagccttcttcaagaggaccatccaggggacgcatcgaagtacagctgtccagcctccaacgagtgtgacgatcaccaagcggagcacgcaggcctgccaggccttgccgcttcagcaagtgcctgcgagtgggcattgctcaaggagggagtgcgcctggaccggtccggggttgggcggcagaagtacaagcggcggccgaaggtggacccactgcccttcccg

SEQ ID NO: 656399 - DNA, 111 bp, Homo sapiens
tctaccgcttatgtttaagagaatcctttcattaacttaaattgttaacattgttgttatggggagaaagaatattaacctaaacagtcactttacaacaatcatgtaaag

SEQ ID NO: 656400 - DNA, 402 bp, Homo sapiens
  misc_feature (402)..(402): n is a, c, g, or t
ttttctacacagaatcacattgttaatatttttaacacgaaataaaaattcaatctttttcctccccaatttaatcttgtatctccatctactttgctttgactaatagcctcttcctttcgaaaaggattctttaatttctattcaaacatctataaagtcccacaataaattattggacaggatgtattcatttctcatgaaccagacctgctctgaaccaatgctgtgcggcatgggtggttttccctgcagaggcccgtgttacctgataaggtgatgtgataagtacagtaagttactttgtctccatggggacaaattggcaagattgtatcatattcaagtccagtatcagtattaaacttacccttaggagctaaggatagacaccatgcttgn

SEQ ID NO: 656401 - DNA, 863 bp, Homo sapiens
gttcagggagcgtcctcgctgattccgaagaggtctttctccggcgttgactcccttaggaggcgcacttgccctgcacgccccttgtaatctggaagaggcccctttttctgtgacccgccggggggggtgttcccaaggagtattcccctgcctgactggctgcgtgggtggttccccccgcggcccccactagtctcctcatatttccggggcgggatgcgctttattggtagggcggcttctttccgcccacccacgcacgcggtttatattaggtagtgttacccgcggcccgctgggtcctatctctgtggacaaacgccccctgtcactccgtcggcacattgggtactccctctgcgagtagcatctgccccccgcgcccgcggtggcgcccatcttgggcgcagggtctctctcttcctggagagatgtaatttccccgctcgctcccaccggctctcctgtgggtagaatgaactattgtgcacctctcttcttgtctttgtggtggaatctaagacacgcgggcctttccacgcgccgtttcctcttctcgctatctgccaccaacaaatggttcacatagcaagaccattctccctgtgcacgaagacacaacacacacctgcgaggtggcaggcgagacatcccgggggcgagccccgcaggggcgcgatgacaagacgcacttctatttctgcaggggtggcaccaaccaggcgagacaactcttggtaaccggccggacgccaccagtcccgacgcccccctccccattggttccacccaccgccgtccctggcgcgccaagacggtccgaaccctgaggacaacccgaaaaaaagacccacaaaaca

SEQ ID NO: 656402 - DNA, 254 bp, Homo sapiens
acccggttaagcggtctcggtatagcggctcggtgttagcggctccttcattaccaaaagtggtgttcccctaactatgaacttattatgaagtctttctgattaagagatagtggtcaaaagtcagcactaaatatcaataacagcagtcaaaggttttcattaaccgaatactcgctatcctcccatctcgctaagtgactgttcggcatcgcacttactggtgtgtttctggcccagaccgcgcttaccgt

SEQ ID NO: 656403 - DNA, 190 bp, Homo sapiens
tgacagcatctcccactggccttcaaagtgctggaactacaggcgtgaaacatgcgccagcgtataaagtgtttttttttggtttgggggagagagaaaaacaaaatggacttaagacatctgggggtgagcttctgaatgccctgagatagctcaggtcccaagtaggtaatagtggctggttccgctg

SEQ ID NO: 656404 - DNA, 450 bp, Homo sapiens
accgggatacgacctatgaccccgtgcgtgggtcaaagactcaggagtctgtatttcccgtgaggtgttcattctctacccagagataacttgaatcctacagcaataaacgtctgtgagccgacaggtgcctgtcttctgtttgtctagcgcctgggagtttttgctcttgtagcccaggctggagtgcaatggcgggattcccctcattggaacctccacctctggggttcaagtgattctcctgcctcagcctccagagcagctgagactacaggcatgagccagcatgcccagctaataatagtatttttgccgggaagcctccggcaaaatggggtttcaccatgtaggccaggctggtcctgaactcctgacctcatgatacacccaccttggactcccaaagtgctgggattacaggtgtgagccaccacgcctggcctttag

SEQ ID NO: 656405 - DNA, 151 bp, Homo sapiens
ctagtgtaataaggatatcattttacatgcttcgatacttatttctctcggtaataatgagcttgaagatttcttccgtatgctggttagccgttgtgcgttgcactgttttgtgaagatgtgtggtcatatcatcttatttatctctctt

SEQ ID NO: 656406 - DNA, 228 bp, Homo sapiens
tttatatacttatttcacttagaagcaaacagcaatgttactgaaatatttattactatctccattttacagatgaataactttgccaggaggggtttgcacgaagtaggagaagggggatggaagtcgagctgctagaaccccaaagtcaagtgtccgcctcccgctgtgagagctgagccctagcctatgttccatgcttcatccttcctggtgggtgcttttgct

SEQ ID NO: 656407 - DNA, 726 bp, Homo sapiens
gccgacttcccagcggccccgtgcgggccgggtcatgcccagtgcgggcgcagcggcccggccctggaagcgccccggcggagctgggccgcggtgggctaggggcagggacgagtagccgcgttcggcggagctgtgggtttgagaggttattgtgtaccatgggctagctcgtgtttaattacaacagagaatcttcattgccaaagcttaaagtaacataacaacgtctcgaccgtagatccttcatgcatgagagcatttggggacgacttctctctcctgtgtgtagttcgatagtttggtggtgaagagatgggtgacagtgtcaaagccttactaccaggaccttggcggaggaattcgaatgaatctcatctggggtcattgggtcaccatctctaggaatgcttagattgctcggaatccaggcaagagcgatgatgtggcagacatggttcccatagatatgggcaagttagtgtcttgggcgacagcagaagaggcgccagtacgtctagagccggaattcgcaagatgagctgaagtctccatcgatatttggtaatgttatgtaatttcttcctagttgctctgcagtcgttgaggaactgggatggggagctggtttcttggggtttcaagttcatccgtcgtgggtgctcaatccgaagctatgtaattgccctgttgccttccagggtcggtaaccagtcccgaatcact

SEQ ID NO: 656408 - DNA, 155 bp, Homo sapiens
atagccttcgatatggctgtccgcgagtactgcgcatggcgaaaatggcgcgtagtggacaacgatgagcagttcatcgaagcggccgtgcagctggccgcggatgacgcgcagacgcccagacgctgggcagcatgcggccgcgcgatgaagcg

SEQ ID NO: 656409 - DNA, 425 bp, Homo sapiens
gtccctgtacgggagtggtggctcacacctggtagttccgagcagttgggaggctgaggtgggcggatcacttgaggtcaggagtttgagatcagcctggccaacatgatgaaaccccatccctactagaaatacagaaattaaagttagccaggggtggtggcgtgcgcctgtggtcccagctacttgggaggctgaggcaggagaatggcttgagcctgggaggtggaggttgcagtgagccaagatcacacaccactgcactccagcctgggtaaccaagaaagactctgtttcaaaaaaaaaaaaaaaaaaaagggattgtcaaaattcgcaattattttggcattaaaggtcagtttttgaccacagcttaggagcgcgggttatgaccgggcctttgtaaccttcccaaggttccattc

SEQ ID NO: 656410 - DNA, 351 bp, Homo sapiens
aggatcccagagtgtcttagactattttgtgttgctatcacagaatacctgaagctgggtattctatttactaaatttatttcttaaaaaagagatttattagacctaaaacaataaaaaccctagaagacaacctaggcattaccattcaggacatacgcatgggcaaggacttcatgtctaaaacaccaaaagcaggggcaacaaaagccaaaattgacaaatgggatctaattaaactaaggagcttctgcacagcaaaagaaactaccatcagagtgaaaaggcaacctacaacatgggagaaaattttctcaacctactcatcctccatggtggggtaccgagctc

SEQ ID NO: 656411 - DNA, 1885 bp, Homo sapiens
  misc_feature (669)..(669): n is a, c, g, or t
  misc_feature (909)..(909): n is a, c, g, or t
  misc_feature (1247)..(1247): n is a, c, g, or t
  misc_feature (1252)..(1252): n is a, c, g, or t
agggtggtagcgacatgctgtgtgattgggtgtggtttggtgttgaggttgtgcttggtttgtggagtgtttagtatattgtttatttgtatggtctccggcttggaagtcgcggaggtgtgtgtgaggatatgattgtgggtgtgtgaggtatttatgtggaggggtgtgtggtgatgcgctgtggtgtggtggtgcagtgtgtcgtactagagtgaagtgatggtgttggtggttcgtcgctctgtgtttgatattagtcgggacgatgaagtatgtgtttgggcgtgtggtctgggtaggtaagagtgtgtggtggtgtgtgggtagagtgcgtgtgaggtggtggagggtggggtgaagggtggaggtggataatgactcgccttgtgtatgggtgtaggggtggcgtgagtggggtgcgctgagaaggtgggttgtgatttggtttgtggttgttcgcttggttgttggttggtgtggtggttgtgttcgtgtggtgggggggcgtcgtggtggtgtgtgtggtctgctcgccggagtcactggtggatggttgtggtgcgactgctcaccacgtgtttgtatgtcgcgtcagtcccccccccgttgtgtgggttgtggtgcaagagaccacacgcacactgacggcggcggtttttttttggnggggcgacgacaccgcttgatgttatggagagagcgttgctcgtgggggaggtggtgccccccccccccgagagggtttggtgcccccgcagaagatctccccccgggcgcgtttggttttggtataaccgctgcccggccgcctctcccgttggttccattttatttcgcgcggggtgctctctttaaagaggtgttatcgcgggagcgccccctcgtgggggggggcgcgcgaaagtntctgtggcgccccggcgggagagaggatattgtgcgcgcggggcgctattcttctcggagagcagtgtgggacgcggggcgctctatcccccacgagaggcgcgagacgccggacgcactctagtgtttgtgttcgacacacacacagagagagagagaggggtcctccctctctgctgtgggggagagaacactactgtgcgcccacagagagagagtatagagtctcttctcccgcgcgggggtggtctactcacacacagaggaaacacagctactgggggttttggggggggtgttctcacagagacacacaccacacgcagaggagagaggcntgttnttgtgagagagcgcgacactctcacacagctttgtcgccacacagagagatagagtcgcgcccctctcgtctactagctgtgtgttaaagtagtgcgtctcacaactactgctgcgagaggcgcggatgatactactctctctctcgtcgcgcgcgtggggtggggatcaccacgagagagtagagagagagatcgcgcgagagagacgacaccatcatgtgtttcatatcactccccgcgagagacatcatatatgtgtgccacacctacacatatccgcgccgagaggtacacacacacgcgctcttcgcgagagagagagccccccccagcgagacaaacaatagatgtgtggacacacccggtcgtccaccctgggttctagagggacaggtctccacgaagactgggtgacacatctggtctcacacacgtggggggagatgcccggccctctctgtgagcaccaacaccacaggccggggttctacacacgaggcctccaaagtctaccccagaggtgcccgcccccagaaacaccacattccccaaattttggagaggtggaccatctggccccctccccccccatgtaaataaaattattttttctcatttccccaaaaaaaaaa

SEQ ID NO: 656412 - DNA, 366 bp, Homo sapiens
  misc_feature (36)..(36): n is a, c, g, or t
  misc_feature (113)..(113): n is a, c, g, or t
gctcgacggcgctcaagacctgggtcttgccgctgntacggtcgcggtacgtgatgcggctgccttgttcggacgtctggatatcactgacttcggcgttgaagcgcaccggntacttgaggtgttcgtaaaaggcataggggatgcggtccatgccgcccaccggctggaacatggtggatgaaaactccgggatttatcgaacaccaaggcgccccacagcttggggttaagcagggtttgcagctccagtggcgcgcgtgtcacgccagtcatggtcgccagcgccaggcacgcgcgtgtagccggagcgtaccgaacccttgtattgcaggtcgccgttgaggtcgcagtacactttgagga

SEQ ID NO: 656413 - DNA, 261 bp, Homo sapiens
ttaattttagaagattttattagagaaaatatctggtggttgtcttacacaaatatcagtttcccagggacagaacaaaagatatatatatctgtgttccaagtgccaggtcagaagcaagaggctctgtgctcaaaagtacttggagtatgaaaaggccattatgaatacaaaactgttatcttcggtttctactcacagttgacttaatcccgatggaaggccaacagtggtgtgtagtattcctaagtagactccaac

SEQ ID NO: 656414 - DNA, 188 bp, Homo sapiens
cttaatgtgaagtcatcatgtatcctggttgacagttttgagtagctgttgttatggtgtcgaacatgatggtgagtactgagtggctcacatgtcaggtacaaggtgtttgcccgatgaacatttacagtcgatgttgtccacactccatgcttatatgggcttctgtgaacagagtggggtcttgc

SEQ ID NO: 656415 - DNA, 529 bp, Homo sapiens
tggtggttgaattccagctctggtggattccaggaagttgccccggctgtgtggggctacgcgcagaaccagaaccacatgtaatttacgacagagcgtctagagcgggggccttgcgcggtactatctatgtacccagagacatctcattccggcaaggtgtagcgcggcagacaggttcgctctaccaggtttgtgtttctataccttgaggtctgcagcggttgcgtcccactgtaggacttgtgccggcccaagcaagagcgtgtcttgtgtaccttccaacatgccaaaatgttggccctgcgtggctattcaattggcggccccaggggacacctggtctctggaacagcccgggcacacccccaaggtttcccgcggattggccagggcccaggcgggtttggcgacgcaggcagccgggacgagtatccttggggctcgggcctctatttccacctttcaccatccaggtctctgcaggcgcagccaccccgtcatcctcggcctgctgtgggtgctcccc

SEQ ID NO: 656416 - DNA, 621 bp, Homo sapiens
gcgaagggcagaggttgctatgttgatccatgccctgatggtggagtagattaacgtagcttgtacaatcactgtctcacttttcacttagtcgtgcgtttagagcttaagttaaattgtgggggtacccttcttagagcagctcgtactgacgaaggtgcatgcgctgaatgatgtcacggcagtcgtatgaacacacggcggatattctcagtgtccacagagcaggtgaaatgagggtagcagtagtgacgcccatctccactggcagtgctgatcctcagaaactcatctcgaatgaagtacttggcccgggtcacgcgtgggtcctctccgggctcgggagtagcatcctcaggagtagtgtagcgagcaaattctggaaagtagtcctcaatcttcgatttcccagcaaggactttctcagcgagcagatcttgcttgttgaggaacaggatcacagagatggtgcgcagccatctgttgttccagatgctcttgaagaggttcagagcctcctgcaggcggttggtctggttgtcctcccggatgaccatgttgtagctgctggtgcaccacgaagatatggcgccactcgtgacgttagatctctggcgggga

SEQ ID NO: 656417 - DNA, 931 bp, Homo sapiens
atgggacatgcagcgcaagtaggtctacgaagacgctacttcccctatcatagaagagcttatcaacctttcatgatcacgccgctcatgaatcatttttccttatctgcttcctagtcctgtatgcccttttcctaacactcacaacaaagctaactaatactaagcatctcagacgctcaggaaatagaaagccgtctgaactatcctgcccgccatcatcctagtcctcatcgccctcccatccctacgcttccttgtacatagcagacgaggtcaacgatgcctcccttaccagtcaaaatcagttggccgccaagtggtactgagacctacgagtacagccgacgtacggcggactttaatgctacaaagctcctagcatacattaccgcccatatatgccgtagaaccaggcgaccctggacttccttgacgttgacaatcgagtagtactcccgatggaagcccccacattcgtattatagattaacatcacaggacgtcttggcgctcatgagcgtgtccccacatgaggcttaaaaagagatgcgatgtcccggaccgtctgataacaaaacacatatacagcggtagagacgggggtatactacgggtccaaggctccggcaatcagtggagcagaaccacaggtgacaatgcgcagtgcgtccctagcaatgaagcccacttaaggatctctgcaggtagggcccggattgaccctatagaagcgcatctaccactctaagaggcaagaaagaaaaataaggctgaagaatgaagcagaaaacgaaagaggcatagtcggagacagacgcaaaagagacaaaaaggaggagcgacaaagaagagcagagcaacggcacagaccgcgcataggggacacaaacacgggacgagcaaaacagagtcaagacgcaaacgacga

SEQ ID NO: 656418 - DNA, 647 bp, Homo sapiens
gctctgctcttgtctgcagctgatcgggttgcaagcactttggcacctgggtgagagaggtgaggaagctgcagaaagacaagtggaatctagcagagattcattcatgaggtataaggaaagaagctggctccagtaatataaaaactgcgagaagaagcaacaaagtccttatggagaagctgccacgaagttatccagaagatctagactacagatcactgacagaaggtgactacactaaacaatagatttgaaggcggacaaaagtggccttctgtggaagatgatgccatctaggactttcatagactggccaggagaagtcagtgccttggcttctgagaacatgcgtgacgttctctatgttagaagactagatgcagctggtgattttcaattgaagccaatgcttatttatcattcaaaaaatcctatggcccttaggacttatgctaaatctactcttcctgtgccttataaatgggacaacaaagtctagatgacagcacatctgtttacagcacagtttactgaatactttaaatcccactgttgagagctgctgctcaggaaaaaatattcctttcaaatagtttgtcctatgacatgcacctggtcgtccagggtctgatgggacatgtcag

SEQ ID NO: 656419 - DNA, 1021 bp, Homo sapiens
  misc_feature (337)..(337): n is a, c, g, or t
agcgggttgggtgactgaggcttcgggcggagcgtggagcccgtgccgctgccccaggtacacgcgcccgcgcctttgatcctgatcgtacagtccctagcccgctccgtcgacccgtcctgtctcactggagtcgtcgtcctgtgacactatctgcgctcgaggtaccctgcttccgtgtcgtctgtctgcttcgggcggtcgttgtgctgcttgtgcaggctcggcagtggactgcgtgatgtacttcctggaacggtccttgctgatgcgtgaccggacattcgagattggccatgtcatccatgaaggacttgacttcgtcttgtccgaatantgcttagcgtgatatccaacagtaactgcgaaggattggctgcagggagtgcactgcatggcctagctagtcacaatctggggaggagcttgctacttgttgccctcggcgcatcagtgctttgctcatagtagtagccaggactcaggtatgttggccaacaggccccctaactgcgattgtaccgtaaccggctcaatgaccctaggtacgtgactcaccattttttggtagaaaagacgtgtggcttgccaatttggaccttagtcttcgtcgcgtgcgctgaaagtgggcagagttctcagtgcccctatggggactcattagagcttagtctgtagttacaggaccagtcgatgtgagctttgcgactttactccaatgcctggttgggaacaatgcgttcatataccggtgtgaccaaattgctatgtggggatccataggaatgcccccatgggcacggaaccctgggggacgcattttatgcacagttgcttctgggagtagggacccctttccagaaaggtaaatgacgggaaattaacggaatccacttgcgaaagggtccttggcacggggacacgtgtaggcccagacggaagtgggacccccccacctatgtctatggaacagattgcatccctgtctgtggtccgggagtgggcaagaggccggcggggc

SEQ ID NO: 656420 - DNA, 820 bp, Homo sapiens
ggagagagagagaactagtctcgagttgggttttttttattttataaggcacctgtgggacttaattaggtaaaaagaccccagctccagccaaaggtttggaccggccattgaaagtgcggcctaaaacacccccgaaggttccctcctccctcctctctcagggtcaccagtgtttgaaaacatcggggcatgccggccaaaagggggaagcagggttcaaggcatgccccacatgtgggttctggcccttggaaaggcgggccccctaacattgggtctgatgttggagaagccgaagaacaaaagacttcacctgtgcttggatctccctgctgccccgaggggcttcaggcaaggaacccacccttcaaagtgcgccttgtgcaaaggcgctgtggtgtgcaaaagccttcaaccctcccctcttgttgacgccaggaaggggaaaatggcattctctcccaaaagatgttgttctcagaggggcgcaaggaacggagggcaattgcccactacccatgaggccaagtggccttaaaacccgtgggggtgtagcccctttgtgggagcgcaaaacgcggcgctgaccccggcagacccacaaagacaatcctgggggcggacacagacgcccccctgtgaggaacacagcggctacagtgtcccccagattcacagggaggcagattttcccctaagtctgtggcaaggggggcccgacaaaaaggccatagggacgtgtgagacgcgtcgtcccggaggaccagagagaccccgagaacgacctagtggaaatcctccccatggatgaacatca

SEQ ID NO: 656421 - DNA, 114 bp, Homo sapiens
tctggccccagtcagtattctcttggcgacggtatacaggatgtcaacaggcacgtctccccatcaatgacacctgcttccggtagtactcctctatagatggggtcgtattcg

SEQ ID NO: 656422 - DNA, 534 bp, Homo sapiens
  misc_feature (84)..(84): n is a, c, g, or t
  misc_feature (116)..(116): n is a, c, g, or t
  misc_feature (308)..(308): n is a, c, g, or t
  misc_feature (394)..(394): n is a, c, g, or t
  misc_feature (403)..(403): n is a, c, g, or t
  misc_feature (433)..(433): n is a, c, g, or t
  misc_feature (440)..(440): n is a, c, g, or t
  misc_feature (497)..(497): n is a, c, g, or t
gatcagggcaggctatgcgtcgcggtcggagtggggtctggcgtccggcgaccgtcgccatcgtcctcgttagtatagtgtggnacaacgtggagccactacagcccccccgcccnttttttttccctttaaaaggggggggtaaaaccaaaagcccccacccccggttggaacaccgggggaaacccaaaggggcccaaacgggttgggacacggagggaaactttccttttccccccaatgggtaaacggcacgaaactttttttggaaggcaagtggccaccccttgagaattgggtgccacatnttggcccatgcgcacagggcagcacacatggggcgccaggatcaatgctggcattcattattcacctggcattcccattggggccntgtgtgccnagatggggtttggggctggacatgggctcnaggggcnactttgggcaagccaagcccaatgaaacttggggcaaaacaatttctgggtcggacnaaaaaggtttggggcgcaacaagcacgcgttcatcgt

SEQ ID NO: 656423 - DNA, 137 bp, Homo sapiens
ctgttgctgccgtgtgctctgacggctccccgctttctcccttacaatggcgagtttgcttttctttgggctggaggaagagcatcctatggtgtgtcacagcggcaaagtgtgtttggggctgcaggccctcgctg

SEQ ID NO: 656424 - DNA, 720 bp, Homo sapiens
  misc_feature (606)..(606): n is a, c, g, or t
  misc_feature (636)..(636): n is a, c, g, or t
taaaaaaaccacatcatttttattggctttggtttttatacttttatatgtataaccattctaagtagctaaaaaaactgttcatggcttatcagttttgcaaaacaatatgatcaaaaacacaaaaacatccttttcatggttccaacagtttctctataaccacactccttacaaaaaacatgtaattgtacaaagataaaatccataaccacaagctttactaccatttttgtatcctctatgataacacattgagccggtacactctttaatctatgaggctactgaaaggaacaccattactcctgttattctgtcttttggactacacccactcactcacttatttattcatcatgactgtttccacctttcagcctcgtctaaccttgaccacctctcatagcgacaagtatactctctctcatgataatgaacgcttacctataagcaccttttcaccctggaactacacaattatctgataagatattccagagatacctactttagtaaaccctacaccctgaatgactgctgccctctctccactctttcacacccaaactctctcccccctccttcaaccccagtctttcctantatcatttacgaggcaaaaaaaataaaagnataaataactcaatcccaacccattatccgtcgatcctgtgtttcttactacaacataaaaattcttctcctttcttctacccc

SEQ ID NO: 656425 - DNA, 364 bp, Homo sapiens
  misc_feature (47)..(47): n is a, c, g, or t
  misc_feature (91)..(91): n is a, c, g, or t
  misc_feature (209)..(209): n is a, c, g, or t
  misc_feature (225)..(225): n is a, c, g, or t
  misc_feature (237)..(237): n is a, c, g, or t
  misc_feature (273)..(273): n is a, c, g, or t
  misc_feature (278)..(278): n is a, c, g, or t
  misc_feature (286)..(286): n is a, c, g, or t
  misc_feature (290)..(290): n is a, c, g, or t
  misc_feature (301)..(301): n is a, c, g, or t
gtttgtaagggaaaattggggaaaatggcccagtgagatgtattacnaaaatttggaccatagagggaatccccctaaagcctcaaattanacccccctgggctgggcacagtggctcacaccttataatcctcagcactttgggagtcctaaggcaggaggatcacttgagccccaggagttcgagaccagccctgggcaacatagcnaggcccaatctctgtnaaaaaaattgtnaccagctgggcatggtggtgtgcatctatagtcccnccctnctcaggancctnaagcaagaggntctcttgagcccaggagtttgattctgcagtgagttatgattgcaccactgcactctagcctg

SEQ ID NO: 656426 - DNA, 468 bp, Homo sapiens
gcgagcgatcagaacctgattcgctgccgtgtcctgactactggaatctttgagaacaagatccaagtggacaaagtcaacttccacatgtttgacgtgggtgggcaacgcgatgaactccgcaagtggatccagagctacaacgatgtgactgccatcatctacgaggtggccagcatcagctacaaaatggtcatccgggaggacaaccagaccaaacggctgcaggaggctctgaacctcttcaagagcatctggaacaacagatggctgcgcaccatctctgtgatcctgttcctcaacaagcaagatctgctcgctgagaaagtccttgctgggaaatcgaatgatagaggactactatccagaatttgctcgctacactactcctgaggatgctactcccgagcccggcgaggacccaagcgtgacccgggccaaatacttcgttacgcagagtagtacacg

SEQ ID NO: 656427 - DNA, 115 bp, Homo sapiens
  misc_feature (7)..(7): n is a, c, g, or t
gggggangtaatgatcagtactgcggcgggtaggctaagattgtgggggcatgaatgaagcgaacagattttcgttcatttggttctcagggttgtcataattttttattttatg

SEQ ID NO: 656428 - DNA, 729 bp, Homo sapiens
  misc_feature (104)..(104): n is a, c, g, or t
ttctgctgtgttatagaggatccctctactcgcgagtgcgtacagggacgtgggtacatcgtgggtgggagacattaacgagctgtcaggctcatgccctctcnctgcacgcaggggccagcacacctggcagtgccttatgctgcaaagaagagatgccttgggaatggggtcagtcaatgcaagggtccatgggttggccgagccggcatccccttgtgcaatctgcacaggcaaagctgatcaaaggcccaatgtcagtatataggcttgcctctctgcaggagcagctggggcccgggatcaggcctagagttggcggctcagctgtctgccatccagcctggagttgcgcaggagggcggcgttcccagccaaccactccagagagagggggcttccctcatgggggaggcgaaggcacgtggctggcctttggtcagaacccagtgcctggtctggccacagctgacagtgtggttttggtttccctccacatgtgtgcttccacagtgcacccaggcaccatggcagggtcttgcttaccccttcccaggggcagtgtagacagtgcactggacagaactggtttcacagcagaaggttgttacaacctggtctgctaatacaggaggacttcaagagttgtgcaggacaggagtgatgaccggagtaaggacgagtgatcgatatgctagttcgagtttttaaaaaaaaaaatgggagggg

SEQ ID NO: 656429 - DNA, 495 bp, Homo sapiens
  misc_feature (88)..(88): n is a, c, g, or t
ttcagggcaggtttcttttacatagggcgttgggtcaaactttgggaggcccgactgtcagttctttgggaagtgggcagggcatccncaaggggttttcctcctttgttttttggagaaccagggctcttctcaggggctttagggaccccaggctgtttcacccaggaaggcccaaatcaaaagggggatggaaaaagttgtaaaaaaaaaaaagtgggggtggggaaccgggggttctttcccccccattggaagaatgtcaaaagggttttaggagggtccccccttttttcccccccccccttttttttttattaacaaaaaggaaacttcaaagttaatggggggggggggtttcccagggggggaactcgttccccccccagcctttcatgaaaaagggggttttttttaatcaaacaaaccccccccctgggggggaggggttccccaacccttcaaaaaaaaaaggaaaggcttagaaaccgccca

SEQ ID NO: 656430 - DNA, 1024 bp, Homo sapiens
  misc_feature (7)..(7): n is a, c, g, or t
  misc_feature (110)..(110): n is a, c, g, or t
  misc_feature (142)..(142): n is a, c, g, or t
  misc_feature (145)..(145): n is a, c, g, or t
  misc_feature (207)..(207): n is a, c, g, or t
  misc_feature (234)..(234): n is a, c, g, or t
  misc_feature (249)..(249): n is a, c, g, or t
  misc_feature (336)..(336): n is a, c, g, or t
  misc_feature (348)..(348): n is a, c, g, or t
  misc_feature (353)..(353): n is a, c, g, or t
  misc_feature (372)..(372): n is a, c, g, or t
  misc_feature (387)..(387): n is a, c, g, or t
  misc_feature (395)..(395): n is a, c, g, or t
  misc_feature (397)..(398): n is a, c, g, or t
  misc_feature (406)..(406): n is a, c, g, or t
  misc_feature (408)..(408): n is a, c, g, or t
  misc_feature (433)..(433): n is a, c, g, or t
  misc_feature (451)..(451): n is a, c, g, or t
  misc_feature (454)..(454): n is a, c, g, or t
  misc_feature (502)..(502): n is a, c, g, or t
  misc_feature (509)..(509): n is a, c, g, or t
  misc_feature (514)..(514): n is a, c, g, or t
  misc_feature (531)..(531): n is a, c, g, or t
  misc_feature (534)..(534): n is a, c, g, or t
  misc_feature (538)..(538): n is a, c, g, or t
  misc_feature (547)..(547): n is a, c, g, or t
  misc_feature (560)..(560): n is a, c, g, or t
  misc_feature (576)..(576): n is a, c, g, or t
  misc_feature (608)..(608): n is a, c, g, or t
  misc_feature (648)..(648): n is a, c, g, or t
  misc_feature (657)..(657): n is a, c, g, or t
  misc_feature (664)..(664): n is a, c, g, or t
  misc_feature (684)..(684): n is a, c, g, or t
  misc_feature (686)..(686): n is a, c, g, or t
  misc_feature (692)..(692): n is a, c, g, or t
  misc_feature (703)..(703): n is a, c, g, or t
  misc_feature (709)..(709): n is a, c, g, or t
  misc_feature (716)..(716): n is a, c, g, or t
  misc_feature (732)..(732): n is a, c, g, or t
  misc_feature (735)..(735): n is a, c, g, or t
  misc_feature (762)..(762): n is a, c, g, or t
  misc_feature (787)..(787): n is a, c, g, or t
  misc_feature (793)..(793): n is a, c, g, or t
  misc_feature (796)..(796): n is a, c, g, or t
  misc_feature (800)..(800): n is a, c, g, or t
  misc_feature (835)..(835): n is a, c, g, or t
  misc_feature (851)..(851): n is a, c, g, or t
  misc_feature (870)..(870): n is a, c, g, or t
  misc_feature (876)..(876): n is a, c, g, or t
  misc_feature (900)..(900): n is a, c, g, or t
  misc_feature (927)..(927): n is a, c, g, or t
  misc_feature (934)..(934): n is a, c, g, or t
  misc_feature (958)..(958): n is a, c, g, or t
  misc_feature (974)..(974): n is a, c, g, or t
ttaccancaggacaggcaattttcagtgggcttttcagaagctggttgccatgacaaagagcacaatttattcctcagtcccttatcacagctacgatcacagaccatanaaattaacaccgctcttttccatccgatttcnganttcctcatccttacctgaggccttttgttcccccaattcaaatggaatgacatgtcagtcanttcacgacaattcaattaatgctgttncaaaattccggccanaaccagaatctataatcacaacttcctaatcacagcttcagttcatgagaatgaaaacgtaaagcacggaaattgcactaacttaantcaatttatganctaantagctggtattttctacangcacacggcgccttnccgacggntnnacaagccncntgacaaaaagagacgttctggatgntctttcttatcactcttntgntggtggtccaacaagatatgttccacaacacaaaaaggcatggggtanttttttnaaacntgtggccaaataaaatnttngtgntccaaatcntaaacaatgggantgggacctgaaaggcntgggggcaaatgggggcggtcaataaacgtgnaataataacctgaacccaacaaaggtgtaggggcccggcntattgtggntggggcnttcaaagggggggcacaagngnccggtntggtgtggtgngcccanggggtcntttccccaaatgaagnagngcccccctcccctccccccggggttgntgtaaagaacaaccccaaccaatgncaatanccntgtntcctgggcctcccaggggaaaaattattcctaggntaaaggggggaggagngcaatttcaggctggaggntggtancagacctaacctttttccctccanttcttttcaaatttttcaggttgtagnttaacancaggggcaactgagggcttttccnattaacttcaaaaaancagggggccctggcaaataatggctggggggcaggaggaggctccctttg

SEQ ID NO: 656431 - DNA, 2174 bp, Homo sapiens
agcggggtcttggctcgccccgcccttccttgtaagatggcggcgcccaggtggagcgcgtcgggcccctggatccggggaaacggccaaggttgcgggagtctcttcactctcgtctcaaagccattttgtgccgctgccgctgcctctacggccataaatgcccagagattagcggagaagctccgagcccagaaacgggaacaagacacaaagaaggagccggtgtccacaaacgctgttcagcggagagtgcaagaaatagtgcggttcacacggcagctgcagcgagtccaccccaacgtgcttgctaaggcactgacccgaggaattctccaccaggacaagaaccttgtggtcatcaataagccctacggtctccctgtgcatggtggccctggggtccagctctgcatcactgatgtactacctatcctggcaaagatgcttcatggccacaaggcagagcccttgcatctgtgccaccggctggacaaggaaaccacaggtgtaatggtgttggcttgggacaaggacatggcacatcaagtccaagagttgtttagaacccgtcaggtggtgaagaagtactgggccatcactgtgcatgtccccatgccctcagcaggagtcgtggacatccccattgtggagaaggaggcgcaaggccagcagcaacaccacaagatgacattgtccccgagctaccgcatggacgatgggaaaatggtgaaagtgcggcgcagccggaatgcgcaagttgctgtaactcagtaccaggtgctcagcagcactctctcctccgccctcgtggagctccagcccatcactggaataaaacatcagcttcgagttcacttgtcctttggattggattgtccaatccttggtgatcacaagtactcagactggaataggttggccccccagaagctgtctgtgggcaccctgaagaagctggggctagaacagtcgaaggcccgctacatcccccttcacctgcacgcccggcagctgatcctgcctgccctggggtccgggaaggaggaactcaacttggtctgcaaacttcctcgcttctttgtgcattccctgcaccgcctgcgtttagagatgccaaatgaggatcaaaatgagaacaatgaagccaagtgtctgggagcacagtgaagaccatgggagcaccctggcacctgggagcacagtgaagaccctgagagcatcctggcacctgggagcgcaggttggcccctgaactgttctttgtttacaggactctgctaacttctcacttggaacagactgcgtaagagccaggtgggataaggtaaagcaactcagctgctacagggcttttaatggagaacaaagtctatttactgatagtttggctgcactgtggaaaagcctgctggaagtctccctgccgtgggctctcattgccaatatggaacagagcccagggccaggcagactggggcagtgactggaaaaggaaaactaaaggtcagaatccgggatcaggaactgtttttatccagcagtgaagctcttgagctcttaggaaggttcccgtggttggaaagaacataatggttaacaaatatcacagcatccagggattgcccagctatagtgtgggtgccctactgaactctgattagggaacctgtataagggtattgagtgtgaggttgaggtgggacatttgctgagcaaggagaaccgatgtgaatggcaggcagataacatgcacacatgaagctggttgggtgtaaggcagtagcggggagcagcatgctgtctaacagctgttagctccagctggttgttgccatgtgggaatggattttctcatttcttcagagaagctggaaacctagatatttatgtgaaacctcccagtgtattgccaactaaatcaaatttttaaagatgcttaggcacctaagcaaataatacttagaggttgaatttggtctacaggctagcagtttgcagtctatgtttaatgaatggtatagaagtttggggaaaggtgccatcttgaaaattctggatcagtggttggcattttcgctgcgtgtagtatgtatcctttctaggcttggagatggctttggttggtccgtgaatgtagttatgagagtgctgccattaaaaaatcaaaaatc

SEQ ID NO: 656432 - DNA, 712 bp, Homo sapiens
  misc_feature (2)..(2): n is a, c, g, or t
  misc_feature (103)..(103): n is a, c, g, or t
  misc_feature (129)..(129): n is a, c, g, or t
  misc_feature (147)..(147): n is a, c, g, or t
  misc_feature (154)..(154): n is a, c, g, or t
  misc_feature (182)..(182): n is a, c, g, or t
  misc_feature (202)..(202): n is a, c, g, or t
  misc_feature (206)..(206): n is a, c, g, or t
  misc_feature (238)..(238): n is a, c, g, or t
  misc_feature (270)..(270): n is a, c, g, or t
  misc_feature (337)..(337): n is a, c, g, or t
  misc_feature (504)..(504): n is a, c, g, or t
  misc_feature (576)..(576): n is a, c, g, or t
  misc_feature (643)..(643): n is a, c, g, or t
gnggggggccttccgcgccgttgccgcatcacccaggaactgcatggtgcttggtgggcttcagctccttgttcagctcatacacaatggggatccccgtggncaggttcagctccatgatcgcctggnctgacatcccttccaggngcttganaatgccccgcgggctgttcccgtgggcngcaatgagcactcgcttgcnggcnttgatctggggaacaatctcctcgttccagangggcagggcccgggcaatggtgtgcttgaggntctggcaggtggggagttccccgggcttcaggcctgcgtaccgacgctccttgctaatggagtggtngtgggggtgcttttggtccatggggggcggcgggatgtggaaggagcgccttcagagcttcacctgctcctccccgtgcttgggggccgtttctgccttgttgaggcctgttaggccccgtaatgccgctcattgaggcgccaagtgcgcaccacaggcagccacanctggtccgtgccgtccaggatggcccagagggtgcggatggcccgcttcagcactgacgtgtagcagaagtnaaactccatcttggcatccttgaaggccttggctccccgcttggcctcctcggtccccttttcactnagctctgcatcgaaccagccacagaaacggttcttctggttccatgttctctcgccgtgccggaccatc

SEQ ID NO: 656433 - DNA, 345 bp, Homo sapiens
  misc_feature (30)..(30): n is a, c, g, or t
  misc_feature (36)..(36): n is a, c, g, or t
  misc_feature (68)..(68): n is a, c, g, or t
  misc_feature (70)..(70): n is a, c, g, or t
  misc_feature (305)..(305): n is a, c, g, or t
tgacctctgagagacatccattaagggctnttctcncaaggagagttcttggcgagatcttttcctgncngctcaaacctttggctttttccttcttaggtggccctggggtccagctctgcatcactgatgtactacctatcctggcaaagatgcttcatggccacaaggcagagcccttgcatctgtgccaccggctggacaaggaaaccacaggtgtaatggtgttggcttgggacaaggacatggcacatcaagtccaagagttgtttagaacccgtcaggtggtgaagaagtactggtangagcctgctgatgtctttcagagtatggatcctctagatc

SEQ ID NO: 656434 - DNA, 898 bp, Homo sapiens
gagcaggtgccgagctcggcctggaggtggcgagaacattgtgcgctgtgttcttgtgtgaccctccggattcggcgcgcgtgctgcccgccgtcgaggtgagggttgttcgtgtcttcacatcccgcggctcacgtgggattgtgagcagtagcttacgggtgcgcccaggcagcattgttgtggccttgatcgtcgttattgctaacttgaagtgaagccaagcagtttacggggccacgtacgctcgacttcctatagagaccagtgtcatagatgatagaggcaagtagccctgagtggacgtgagtgctgcttgtttgatccacgggctgcggaggcccaagctgtcgtcggaccccggccattgtcttacagacccgcagccgttagcaccgacctggcttggacccgcgcgcagtggcttcccttgtgatcacgctggcttggtagcttgccccgggggccttgggccagcgggacttggtaccgtgtcgcctggtagccttggtcgggccgtactagaccccgtggacacttggtctgaggggacgtcgtggggctcccttcggccgcaatagtcctgccacgggatgaccctgggccacgacgggcgttagcttggtgcggcctaccaaggtagcgactagcttaaactccactttgcaccacgcctagtgagtatggcctctgcgggaaaaatgggttctcgcttccattgaacgatttgccccggagtttggaaaggatgacacctgaaggaaccagggccttcttggagaaagagccttcagtgcgaaagacttttagaactctattcacagttccacccggaaagggctcccttgagagcgtccctatgcaagctgagcctcaggttcgagaatccacaagctcg

SEQ ID NO: 656435 - DNA, 472 bp, Homo sapiens
catttccttagcttcctcattctcactaggaatccttcatcttcatctctgtacagcgtgtagattcgtgtcctgaatgatctgaatccagctgattcgttcccccttgggggctggttggacttctaccatctctggatctgtcatccccatgctgatcaggaataaacctttctcctcatgtgccactgtctctcactatcagcttctttatagagatcactgtagacttctggtccattgatgcgtagatgtacttctggtctttgtcttgaaggagaactacaatgtctgtgagaagaactgcttgaacctctttcaaccttcctgctgcattcttcagaaacacactcccttcacgtacaagcttcttccgtttcatatcttccttggctagcatctgacctctcttcatcctcgtgatgtgacttgctatctcgtctttgtattaatctcattgagacgccctttc

SEQ ID NO: 656436 - DNA, 2143 bp, Homo sapiens
tgctgaggttactctagaggaatccccttggacctcgatacagggcgacacttggcagggtatgcgggagtctcttcactctcgtctcaaagccattttgtgccgctgccgctgcctctacggccataaatgcccagagattagcggagaagctccgagcccagaaacgggaacaagacacaaagaaggagccggtgtccacaaacgctgttcagcggagagtgcaagaaatagtgcggttcacacggcagctgcagcgagtccaccccaacgtgcttgctaaggcactgacccgaggaattctccaccaggacaagaaccttgtggtcatcaataagccctacggtctccctgtgcatggtggccctggggtccagctctgcatcactgatgtactacctatcctggcaaagatgcttcatggccacaaggcagagcccttgcatctgtgccaccggctggacaaggaaaccacaggtgtaatggtgttggcttgggacaaggacatggcacatcaagtccaagagttgtttagaacccgtcaggtggtgaagaagtactgggccatcactgtgcatgtccccatgccctcagcaggagtcgtggacatccccattgtggagaaggaggcgcaaggccagcagcaacaccacaagatgacattgtccccgagctaccgcatggacgatgggaaaatggtgaaagtgcggcgcagccggaatgcgcaagttgctgtaactcagtaccaggtgctcagcagcactctctcctccgccctcgtggagctccagcccatcactggaataaaacatcagcttcgagttcacttgtcctttggattggattgtccaatccttggtgatcacaagtactcagactggaataggttggccccccagaagctgtctgtgggcaccctgaagaagctggggctagaacagtcgaaggcccgctacatcccccttcacctgcacgcccggcagctgatcctgcctgccctggggtccgggaaggaggaactcaacttggtctgcaaacttcctcgcttctttgtgcattccctgcaccgcctgcgtttagagatgccaaatgaggatcaaaatgagaacaatgaagccaagtgtctgggagcacagtgaagaccatgggagcaccctggcacctgggagcacagtgaagaccctgagagcatcctggcacctgggagcgcaggttggcccctgaactgttctttgtttacaggactctgctaacttctcacttggaacagactgcgtaagagccaggtgggataaggtaaagcaactcagctgctacagggcttttaatggagaacaaagtctatttactgatagtttggctgcactgtggaaaagcctgctggaagtctccctgccgtgggctctcattgccaatatggaacagagcccagggccaggcagactggggcagtgactggaaaaggaaaactaaaggtcagaatccgggatcaggaactgtttttatccagcagtgaagctcttgagctcttaggaaggttcccgtggttggaaagaacataatggttaacaaatatcacagcatccagggattgcccagctatagtgtgggtgccctactgaactctgattagggaacctgtataagggtattgagtgtgaggttgaggtgggacatttgctgagcaaggagaaccgatgtgaatggcaggcagataacatgcacacatgaagctggttgggtgtaaggcagtagcggggagcagcatgctgtctaacagctgttagctccagctggttgttgccatgtgggaatggattttctcatttcttcagagaagctggaaacctagatatttatgtgaaacctcccagtgtattgccaactaaatcaaatttttaaagatgcttaggcacctaagcaaataatacttagaggttgaatttggtctacaggctagcagtttgcagtctatgtttaatgaatggtatagaagtttggggaaaggtgccatcttgaaaattctggatcagtggttggcattttcgctgcgtgtagtatgtatcctttctaggcttggagatggctttggttggtccgtgaatgtagttatgagagtgctgccattaaaaaatcaaaaatc

SEQ ID NO: 656437 - DNA, 791 bp, Homo sapiens
tacgggttgagcccaggttacttaatttgatggtacattgacaaggtgcggttccctaggcccctcccctcttcaaggggtctacttggcaactgatgtgtggcatgggactccccagacagtagaggtgtctctctcattcctcattgtgcatctatagctgggggcatgaggtggtccaaggggtctaacatccttgagcggccattgtggcgccatgaggtccaccaccctagtgcgctgtacgccaatattcgtttgtcatacaccgaggacaatatgagcttgcacaaagtggtcgattgcagggccaatgccagccccaagggctcaacaggtgcgcaggcatgtgggtgctcgctagtgtgcaagtacagaagagagaaccaccgtgggtgacctacagaggataaacccacaggaattgcccctatgagagagtgggccccttccgaagcgaccgtagactataacacccacacatttctgtggaatagatacatcacatcattagagggaacaggtctactacccataaaaccgcgagagtgtacaagtgtacccacacacttgagacacctgttctagcgaaatgatggcggggcgaacacacggtgacacacggaggcgcatagctcgcacaaaggagtagaaggctatcacccagagataccactcacacacatgtgggaattagcacccttttggcccaaaaaagcgctttttgcagcaaggagcgccccaagatacaacggcgcacgggggaatcgaatgcgtacctcggagaacac

SEQ ID NO: 656438 - DNA, 1305 bp, Homo sapiens
ggggttcagcggagggtttggctccgtctcttggtgaacttgaacagaggctgaggcaaaacgcaaaacatttctgcgccacggagatgacgcgggcggtatagccctggaatggcatgatgtccttgacgcctgggccatgacggctgcagctgtcgaggagcaactgtggaacagctgggagataagtaatggtgccacttgtgaacacctatctgtgaacatctggggcgatggaatcagtgagatgactccctagtgacttgacgcgacaaggcatggttgccatggagcctaggatgtcaaggagtgactgcctccgtgaggtccttggccctcactcgcccagcctggggaccgcttagaagaggacgaattcccaggggagcttcccaagcgcaatggatccattggattggccacaagtgggcgcttttgcgccaaagacttttgtctctaccaagatgtctcacaagaatgttcatcatcgcggcatgaagcaacgagtataccttgagatcgattcctataccatcagcggcatgaccgtaccgctgattgaaccggggcaagcccagtgcttagctgcatgcacaggtcggggggtcccggcgtggcttctccccagcaatgggtccccccgtggcgaccctcggtagaccaccgtgacagaccctttgccaggtgcgcctgtcgccggttgggctgccatgatgccggctggggcacttgacattgaggaccaaggcgaggaaagcccctttgacaacaggaacacactccggaagtccaagacccccaagaaagcttggcttaggcatttgggtgttgttcgagacaagtgccttggaaagaaggagcacccacgaaggaacacaggggacccgcagagacacacaagggagaccaccagatatggggattccagagacagcagatcaaacttaccgagacgctaggcagttcacagtatagcggttcaggacccggcagtaggattaccaacccaaagcttttcaatttgaaggtgaaacttcccccaaggggaaccctgggccctggaccaccgtggtgtgcaccccggaagggaattgcgcccatggagacgcaggagcaactcacccagcgaactggaccggatagcgaccagcagataacagccttggtagcatttgccgtattcaccgaaacagaaaccacaatgggaccacgcgacatggagaggacactccatgaaacaagagcgaaccctgctggtacatatacaattgaactctatataagataaagtaacattgatcactg

SEQ ID NO: 656439 - DNA, 106 bp, Homo sapiens
gattacacatgtggcccatgtctgcatggttaggcaacaaggtctctttcagaccttctggctcagaagctgactttagcatgctagctgagagttaatgtattta

SEQ ID NO: 656440 - DNA, 134 bp, Homo sapiens
agtcgtctcatacaggatccccggggtgcgttgaatggcttgtatcgtagcatgcgccaggtaaggtgggccacgagacttgcagcttgtagttgatgaagagctggggcgctcagtggtgatgaacgccgaag

SEQ ID NO: 656441 - DNA, 181 bp, Homo sapiens
tagaaagggaagcagacctatcattctgttagtagcagctagagttcattgctagatctccatgacagggctatctagctagcccttatggactcagccatcactaatctagcatcctctaaccagagccactcgaagactagagttagcagaaattctaacaacctagacggcattaata

SEQ ID NO: 656442 - DNA, 360 bp, Homo sapiens
tttgggccttttgcccccccccaggggggtggggcttccaaaaaaaaaaggaagtggcaaagggggccccaagtgggggaaacttaagggcttcaggccggggtggattcccttaagggggttcttttgccttgggccccatcccctcctagggcaaggggggccccccttgagtgacatgggggggccccggttccggcccttgtttcccgggcccccctgggccgggccccctggggtggggcccccccccccgggccctccctggggcccccccccccttggggcctttgggccccccttatgggggggggaattttttttttaaatggttccaaataaaacttgggccccctccta

SEQ ID NO: 656443 - DNA, 523 bp, Homo sapiens
tggcacagacagtgtcctggggaagaacgcttgacagagcacatacaagaggaagaagggtcagagcctcccaaaagcagagacccgaggcagggcagcagcccatgtgctaacaaagggccccgctcaaatcctcaggtgtacatggacatcacagattgggaacaacgccggctggccgcatccagattgctcctgcgtctgatgtcgtgcccatgacagcagagaacttccgctgccttgtgcactcatgaaacgggctttgggctataagggacgcagttgcaacggatcatccccagtacaatgtgcagggcggggattcacaaaacaaaatgggccctggtgggcaagtccatctatgggaagaaagtcgatggtggaaccctttaatcctcaagcatacgggaccggagataaaaatcatgggcaaatcggggccaaaacccatggtcccaagcttcctggacgtgacacgacaaccggtgatggacgcttggtagtgaaagccagaagcaataga

SEQ ID NO: 656444 - DNA, 321 bp, Homo sapiens
  misc_feature (62)..(63): n is a, c, g, or t
aaatacggggagcaccacagatgtaaaaatcagcatcagcagtggaacgccacccctggggnnttctgtgaatggggttcatctgcctcatgggagactctgaaagggggcagacgtgatctgtgagagttttttttaaaagaaactgcaaaagatctttccaaagatgatgtgccacagatcttttgtttttctctgtaacaaggactaagtgctgtcttagaaaaggtaattgacttgttcatcttcacaatctttcctttccacaagatcaaactgtagggaaaaaaaaggatatttaataaaaatttagagaaatga

SEQ ID NO: 656445 - DNA, 82 bp, Homo sapiens
  misc_feature (79)..(79): n is a, c, g, or t
ggcacgaggccgggagtcccgcctgccagaggatgatgagaggccccctgaggagtatgaccagccctgggagtggaangaa

SEQ ID NO: 656446 - DNA, 362 bp, Homo sapiens
  misc_feature (167)..(167): n is a, c, g, or t
gattccggcttttacatgggacagacggggacgcacaggccaccttccttttggcagggacttttatttattcccattgctttagggctttcggtttccccttcttccggtaggccgggtaaaggcatgcaccgggtaggtttccccggtgaccccccggcggcctnagggacgctccctgccccatcccggctgttggggtgggccgctttgcctttgcttcgccctgtgctgtgttttccagctttgtagcagcagccttgacaaacccaggggccctgtaccaaggcaatgtaacttttgattttcgggcaatttaagtttttttgtccccaaatattaataaacagttttggcttcca

SEQ ID NO: 656447 - DNA, 534 bp, Homo sapiens
gcgaattcactagtgattgtgagcggagatcgcaccactgcactacagcctcagaaagggagtgagacctgctgggaagcatgtctccagccaagaccagagacaggcacttcaaagaaggaggggttaggataggagcttcatgctcaatggattgaccaaacatacacattcaacaggttacatgaggagctatgaatattcatgaaagtggttctgacacatgcatattgaacaaacatgcatgcaacatacaacccatggtcactttggggtggagacttaacatttaaatgtattataattaggccctatatggcaaaaggtcttttcaggacacaaagacatgcaagtgcaggagctctgtaagccagccagaaccagtccatgatgggtagtcaccttgtcaggaaaaagttactgaaatcagtcacttgtccaatcaaagctgtagttatggctggtggaacagtggttggaggtcagttagtcagcatctgattgaagctgaaaatgtttttaatattgcttatc

SEQ ID NO: 656448 - DNA, 1193 bp, Homo sapiens
gattcctgagcaaattccctcaaagtgacctcttgttcttaacatttgcacattttcatggtgcagcattgtcaccagcatcagcaggccacattgcacaaccattgttaccttcattatcatgcaactagcttgcacagtgcaatcacttcacatttcacagtttgccactttcacatcacccaacacttcaaacacccaacaccactccatttcacacacagtcaggttcaagtgcatccatggcatccattgtatcattccagctatgtgcgctctagtgcaaattctcacacaggcaatccaacatcaattccatccatgcatttcacacattttactcagcagcaatttatgacttataaaatataactgttatcttatcctgtagactcgtgtactaagttatctctctactactactctctctactctctactctctctctcatctactactctctcaaaaaaaaagaagagatacagagacacgcagcaacaacaaacaaaaaacatgcagcactagcaaaaaacaacacagacagacgaaaaacatcaggagagcagagaaaaccaagagaaaaatcgccacgacacaaatacagaaaaagacgcacacaaagagatataagcgacccacaagcagaccgcatgagcgaaaaaaccgaaacaaacaaccacacaacgggacataaatgaacaagacaaatagaagaaactaaaaaaggagaaagacaaaaaaagaaaacagagcacaaaaaaaaaaggagttacaacttagtagagaggatagcaagagaaaaagaaaaaacatatagacgagatgaaatattctaagataaagggtaaaaatgtgtgcagatttactataaattggtagaagagtatttccaataaagtccatgctataattgacaccgatccagcgccagggtggaatttaacagactgccatgagaagacacaacaagaaagagagaggaaaacaaaaagacacgtgaggagcacagaaaaaacaagcacaacgaaaaggtaataaaaaaggggaaataacacaagtataacgaaactatatattataaaaaaaaacacaaaagtactataaataataactaaaactaactataactaacaaaaaccataaatgaataaagatataaataattaataaacaaaaaaaacaaaataatatta

SEQ ID NO: 656449 - DNA, 200 bp, Homo sapiens
aagagacagatacgaatcgagccggtaccgttacaaggcgcacatctggatgatatccttatgcttggaatcacgtcctgtcgtgcacgcgatggaaattctgtgcgaggatttcctgaccttcaggcgcgtagagatagtttagataagcttcggcaatcttgcgggagccgcgcttgtcgacaaccttatcaacgaca

SEQ ID NO: 656450 - DNA, 255 bp, Homo sapiens
ccaaagaagaagaaaaggcatttcaaactttacgaaatccttttattttcctttttatatagagacaggatctcactctgtcacccaggctggaatgcagggcaccatcatagctatctgcagcctcaaactcctggctcaaatgatcctcctgtctcagcgtcctgagtagttgggactacaggtatgctccaccatgcctggctaacctattttagttttacatatacaaatctacctggcaaatctaccgcg

SEQ ID NO: 656451 - DNA, 610 bp, Homo sapiens
gacgacctgtctcgccgagcgcacgccttgcccgccgccccgcagaaatgcttcggttacccacagtctttcgccagacgagaccgccgcccacgctaccggcctcctcactctcactcgcgcgctacgccaccccctgtcccacccggctgcccatgcccgaccctcacgctccaccgcgccaccccccacccgccgcctggcccgcaccacccccccccccccccccgcccccgccccacccgccccaccccccccccccccccccccccccccccccccccccccccccctcccccccccctcccccccccccccccccccccccccccccccccccccccccccccccccccccccccccccccccccccccccccccccctccctccccccccccccccccccccccccccccccccccccccctcctccccccctcccgccccccccccccccccccccccccccccccccccgcccgccccccctcccccctcccctctcccccccccccccccccccccccccccccctccgccccccccccccgccccccccccccgccccccccgccgcgcctcccccccccccgcccccgcgccccccc

SEQ ID NO: 656452 - DNA, 130 bp, Homo sapiens
ccctcgatgacgacgacgacgacgccaccaccccagcccccgtctgtgactgaaggcccggtgtgaaaagaccacgatcctccttgacgagttttggttttcaaaatggtgcaataatttaagtggcatc

SEQ ID NO: 656453 - DNA, 399 bp, Homo sapiens
taaaaaaaaaagagggggggggggggggggggggagagagagagagagggggggaaaaaaaccaaacaaaaaaaaaaaaaaaaaaaaggttttttttaaaaaaaaaaaaaaattttttttggggggggggggggttttatgtgtgtttaaaaaaaaaaaaaaaaaaaataaagagggttttttttaaaaaaacaagtaaaaaaaaaaaaaatctccacaaaagaggggagacataattaaaaaaaaaaaaagggggggggggccaaaaaaactccggcggggggggacaaaaaaggaacacccccaattggtgaaaaaagggggcccaaaaaggagagacaaaaaaaaaaacagaaggggggagaataaaaaaaggggaaaagaaaaaaaaaaacaaag

SEQ ID NO: 656454 - DNA, 312 bp, Homo sapiens
  misc_feature (7)..(7): n is a, c, g, or t
tataagntgagctcatagcaccctttttggtgcctagaatgtaaagaagtgctcaaagaatgatgggagacatgtaagaaggaaaaagaatcagcttgaaaagaatcccactggccaaatcagtgaacagtcaaacgtcaaaatagataatattatctaatagatagcaataaattataatccgttgaataaaatagaagatcatactaatataaataaatgaacaaatggaaagtttgatgaagatcagaaaatttgcatagttccaaagtacctcctcaaaaaatattcattaattacaaagggagaaag

SEQ ID NO: 656455 - DNA, 917 bp, Homo sapiens
  misc_feature (144)..(144): n is a, c, g, or t
  misc_feature (146)..(146): n is a, c, g, or t
  misc_feature (148)..(149): n is a, c, g, or t
  misc_feature (152)..(152): n is a, c, g, or t
  misc_feature (160)..(160): n is a, c, g, or t
  misc_feature (163)..(163): n is a, c, g, or t
  misc_feature (167)..(167): n is a, c, g, or t
  misc_feature (170)..(170): n is a, c, g, or t
  misc_feature (176)..(176): n is a, c, g, or t
  misc_feature (180)..(180): n is a, c, g, or t
  misc_feature (183)..(183): n is a, c, g, or t
  misc_feature (204)..(204): n is a, c, g, or t
  misc_feature (207)..(207): n is a, c, g, or t
  misc_feature (211)..(211): n is a, c, g, or t
  misc_feature (219)..(219): n is a, c, g, or t
  misc_feature (237)..(237): n is a, c, g, or t
  misc_feature (596)..(597): n is a, c, g, or t
  misc_feature (649)..(649): n is a, c, g, or t
ggcacgaggccgcgtccttggctggcgtgaggccaaagcaaaatgaggagcgggaaggcctcctgcaccctggagaccgtgtgggaagacaagcacaagtatgaagaggccgaacggcgcttttaccaacaccaaggcacacangngnncgncttcgccnagnagtngcnagcgangggncanccatgaatgggcccggccagnacnaccntgaggacnctgatgaggcggaacccntgacggcggcacaggcgtgatcccaggaagagccaggacagcaggaagcccctgcagaaaaagaggaagcgctcccccaagagcgggctcggccccgcggacctggccctcctgggcctctcggccgaacgtgtgtggctggacaagtcacttttcgaccaggcagagagctcctaccgccagaagctggcagatgtggctgcccaggcagcctggcctcctgccttggccccttggggtctctgcacccatggaaaccaggtggcctgccaccacgtgacctgggggatctgggtcaacaagtcctccttctgaccagtgctgagcgtggccttctgtggatgtgtgtctcatgtgcnncctgttgctgtgcccccgatggtgcatgcctgcaggctagggtgactcccanacacatggccatgcaggtgtgcctgtcccctgacctgtgcccaccatgcccaagcccacctggtcaatggccatgccccctgctggtgcatgcctgcatggcacttggttcgggaggtgtggctgtgagaagccccgtgtatgatgcagccgagaggggcttctacgaggccctgtttgacggccatcccccagggaaggtgcgcctgcaagagcgagccggctggccgagggtgcccggcggggccgcagagaccgcggggcgcaac

SEQ ID NO: 656456 - DNA, 258 bp, Homo sapiens
ctgtgatgttatcccaacaccatcccaggttccaccaaatgtaagaagtaaagaaagagaaaagaaacatgaaaagtggctcaacagtcaaagacaagtttattttggagaataaacctgagaggggcttctggacaatttttttttttttttgggttaggagtgcttgctcctatggactaagagtttttatgggtttaagggtgagagagttactcacaggcttggaatgttctctgtgtggggcgataacggttc

SEQ ID NO: 656457 - DNA, 688 bp, Homo sapiens
ctactgtcgctgggatatagatgtgagccaccactcctcggctgccaagtaattaatagatttaatgctattcccatcaaactaccattggcattcttcacagaattagaaaaaactactttaaaattcatatggaaacgaaaaagagcctgtatagccaagacaatcctaagcaaaaagaacaaagctgtaggcatcacatacctaacttcaaactatactacaaggctacagtagccaaaacaacgtggtattggtaccaaaacaggcatatagaccaatggaacagaacagagacctcagaaataacaccacacatacacaaccatctcatcattgacaaacccgacaaaagcaatggggaaaggattccctatttaataaatgatgctgggaaaactggctagccatatgcagaaaactgaaactggaccccttccttacaccttatacaaaaattaactcaagatgaattaaagacttaattgtaaaacacaaaatcgtaaaaaccctagaagaaaacctaggcagtaccattcaggacataggcgtgggcaaagacttcatgacaaaaacaccaaaagcaattgcagcaaaagccaacatggattctaattaaactaaagagtttctgctcagcaaaagaaatatcatcagagtgaacaggcaacctatggaattggataaa

SEQ ID NO: 656458 - DNA, 343 bp, Homo sapiens
  misc_feature (81)..(81): n is a, c, g, or t
  misc_feature (175)..(175): n is a, c, g, or t
  misc_feature (191)..(191): n is a, c, g, or t
tttaaggagagacggggcttcaccgtgttatccaggaatgttgtcggtctcctgacctcgtgatcccgcccgcctcagccncccaaagtgctgggattacagcgtgagccactggtcccagcccagaacagggaaattttaaaccgtctaggaactatttggaattagcttgttnacttaggattttgtantttggcatgagataaaggtgggttaattgaaattttttcttttttaacattttttgagacagggtcttgctctgttgcccaagctggaatgcagtggtgtgatcacggctcactgcagcctcaacctcctggggtcaagccagcctgcccgc

SEQ ID NO: 656459 - DNA, 1088 bp, Homo sapiens
  misc_feature (859)..(859): n is a, c, g, or t
acaagctcgtccctctttttgtgttttcaataccaccacttttcgcagtgtttatagggggagccccctcagttgtgtaacttctcggaggggagtcccccccccagcagtgttgggtgcgcccacatgataggcccgcgggctttgtgtttaatgcgtcccgcgcgccccgtgctgatacgtatatagacgcgcgtgtctctctaaatggttatgtttcgagacgtgccccctcgtggtgtttgcgccgcagatattttgtcggcgcgcgctcgacgagagcgcgtcgtgtagtgctctctcttctgtgtgagagagcgccctctgtgtcgtggggagaccacgcgcgagagtgtttctgttataaaagagagatatacatatttgtctctgggagatagcgctctgtgtgggtggcacacaacaggcgccccatactgttttgttcctctgtgcgttcactatattatagcgcgcgcgtgtgtctctctcgcgcgatctccacacagaggagagagacacacacccaacgcgcttctctcttgtgtatacaatcattttgtagagagggtgtgtctttatcagcgcgctcccgcagagagatgtatactacacaccacagagtgctatatatattttgtgcgcacccaagagaaagatgcgcgcgctcgtatcatcgagagatatatataacagcacacacatgtagacacacacacgcctactgctctcacatctctctcgtcgaggcgcggcacacacacacacacacacacgcagaccctacagagtgattcatctctctcgcgcggagaaaagtgataacttcgcggcccccatcgggagaacacacagcggngcacttgatgttcttggcccacacactcttccgcagatacacacttctttctctcgctcaagggcccatctaggagacaccaccaatctccgcgcgtggagatgctgtgaccccctcccaaggagagtttccacgttcacggcaaactccgataaattaattgtgcgcatttgtcgcatctgtgtatttttaagaggggatttaaaaacctttcttccccttctaaaat

SEQ ID NO: 656460 - DNA, 230 bp, Homo sapiens
tgtttgctttctgctgagacatacgcgctggaggcatctccagggaatcccggaaggatgcgtactgcaccttcccacggctgtcgctggttgtgacgttagcctgcggttctccaaactgttatcattcagagagactgagcagagtgtatgaggaaacatctgtgtaatttcttacaactgcaagtaaatctacaattatctcaattgtaaatgatacaatactcaac

SEQ ID NO: 656461 - DNA, 268 bp, Homo sapiens
  misc_feature (20)..(20): n is a, c, g, or t
  misc_feature (35)..(35): n is a, c, g, or t
  misc_feature (53)..(53): n is a, c, g, or t
  misc_feature (63)..(63): n is a, c, g, or t
  misc_feature (131)..(131): n is a, c, g, or t
  misc_feature (229)..(229): n is a, c, g, or t
  misc_feature (243)..(243): n is a, c, g, or t
  misc_feature (260)..(260): n is a, c, g, or t
ctgagcagctgagtcaggtntgtgagccctcaccntgaatagtcatccccagntcacagaacntgtttagagcttgggcaacatagtgagaccctctctgtacaaaaaacaaattaaaaaaattacccagntgtggtggtgcgcaccgatagtcccagctgtttgatgacctgaagcgggaggatcacttgagcccaagagcagaggttgcatgtgaactgagattgtnccctgcactccatnctgggtgacggagcaanccctgtct

SEQ ID NO: 656462 - DNA, 108 bp, Homo sapiens
  misc_feature (37)..(37): n is a, c, g, or t
ggcacgagctgtggtggagaatgtagtgaagctcctnggggacagtactacaaagatgccatggagcagtgccacaattacaatgctcgcctctgtgctgagcgcact

SEQ ID NO: 656463 - DNA, 958 bp, Homo sapiens
  misc_feature (281)..(281): n is a, c, g, or t
  misc_feature (324)..(324): n is a, c, g, or t
tggagccaaagtctcgctttgtcaccggggctggagtgggggggcgcaatctcggctcaggaaaccttggcctcccggggttcaagcggattctcgcgtggcctcagcctcccgagttagcggggactacggggtgcccgctctcacgccgggccaatttgggtattttatactaaaagggggtgtgcaccagtgttgggccaggcgggctctgaaactcctgtgacctttgagggagaaagccagaaagtgaagtgccgggcctcagaactccgtggtgngctcactcgatctgcgggcgggcggcggaaccactcaatgagnggtctccttctccaagggggtcgcctatagacgtgcgtgttccctgtgtccgaggaacctgggggccctcccaagcggggctcactcaagagaaagagtctcttggaaagagaggcgccaacgtggtggctctccggacagagaagtgtgtgctccgtgagaaggtctccactcttgtgcggacacatgtgtctctgtgtggaacagcccgagggcgtgggtgcggacgagaaacactccccgtgcgttagaacaaaacgcccgaggtggtgaggcttgcgagggaaatataccgccgctatgactctgcgtgggtctcccaagcgcagagtgggagaagcacgtgccgcgagagagtgacactccgtggggagaggggacctcagggcgcgcttataaaaaaacggctggggtgcgtgccctcttaggagaaagatgacaaggttacagaaactaggggagacatcgggcgagagaactctcccgccgccaatcgttggcgggggtatcgaccgaggggggggggcacgtggcgaaacacacatttgtggaccgccagaaggggggcctcccccacagcgttgagcggccataacctgttgtgaccaaaccccgggggagcgctacacgagct

SEQ ID NO: 656464 - DNA, 111 bp, Homo sapiens
taagagggggactacctgcgcaacgtaatatccaggagagatggtggtcacggagcatgtcagtgacaggaggcctggggtcttcatctaccactctgcaaggaacccacg

SEQ ID NO: 656465 - DNA, 228 bp, Homo sapiens
  misc_feature (72)..(72): n is a, c, g, or t
  misc_feature (174)..(174): n is a, c, g, or t
tagatgtagaaaacagcttccatgtcgcgctgtgaggcgtagtgactgaatctagggtctctttctccttantattcttgtggctacatcatccctggctgtcgggctagtcggggctgtcgggctagtcggggctgtcgggctagtcggggctgtcgggctagttggggctgncgggctagtcggggctgtcgggctagtcggggctgtcgggctagtcgggggggt

SEQ ID NO: 656466 - DNA, 104 bp, Homo sapiens
tactccacaggtgattataggcatgagtcactacgatccggccagcattattactatagcagtaatataatatagtgctattataattagcactataataaaat

SEQ ID NO: 656467 - DNA, 152 bp, Homo sapiens
ggggggggggaaaaaaaaaaaaaatttgccccggttgttttttttttaaacgggggaaaaaaaaggttttggggggcccccgggcccattttcccctttggtgggttttttaattttttttaaaaaaaagggggacctaaaaaaaaggggga

SEQ ID NO: 656468 - DNA, 1471 bp, Homo sapiens
  misc_feature (117)..(117): n is a, c, g, or t
  misc_feature (433)..(433): n is a, c, g, or t
  misc_feature (749)..(749): n is a, c, g, or t
cggggtggttgttacgaccgccaactgcgggcaggatgtgggtgttcttaatgttggatttggagaccctgtttgtgaggagccaccgcgggtattgttttttggggggaggagaanatagatagcttgctggtttgtttgcccgccccccctctttgagggggtgtgtgcttgagaacctgacgatggttggtggaggcgcctctcttttctcccgggagagagggggtgtttttcctcccaccaccgacactggagttgttgggttgccagaggaagtagtggaggaagagatggaatattcttgggttgggggcgcgacaacggggggggtggtcggaggggaaggacgcccactcggtgtgttttagattaaccccctccccccctgaatgagaatgtctgcggccaacaaatgtgctcttgttgcacngaatatatcgtagagggtgtataatagggaaagagggggtggttgtatggcgccaccccgaagggtagggcactgcttttttctttgcaggagtagacttagtttctgttaaatttcattatatttggggggaccccctttgggggggtacttatataggatatggtggtggaatatttatgggggcccccttctgtttttgtgggaaaaaaatatcccacgaggtgtcaatacaccataaaaagggggggtctcctctgctagcgcgtttctacacacaagagcggtgcttctagtatgattattcttctagagnagattgtgtattgtctcccccacttgggagagagaaatatgatggtgtggaaactatttttgtagcgagagagaaatatagagatgttttttaaagagcgtgtctttgtggaaagacagagggcgttaatatttgtgtgtccccagaagagacattcacacaaaggtggcgcccacaaacatatattgagccccttggtttttccaataagaggagtgtagggaacacaccttggtctcacagtgggggcacaacaattttttcccacgacacaggtgtttttggtgtccacaacaaacaaaaaccgcgtgggtctctgtgttgcgctgaggtaaatacaccggaacttttttctttgtgtgggagatttcttgacacacatatatatttgcgccccaggttattactctctccgagtggggtttattctcgggcgaataacaaaatcttgtaaagcaatggggttctaactatacagagtgtgtggtttgcgtcctgttgaaagcatatgggttcttcccaatctcccaagtgtctctttgcagttaagctcccgtggaataaaattcttttacctcgccctatattaagaaggtgctaattagggggacaacccccggtcttgcgttttcatatcttggaactattatagttggccgttttttttggttttggggtggaaagaaagtaaaaagaaaaattaaagccaaattgtaatgtga

SEQ ID NO: 656469 - DNA, 335 bp, Homo sapiens
atcggaatgggaggtgattcatagggggttgtttgatcgcgtttcgtgcaaatataggaggtggagtgctgctaggtctccaataatgaagggtaatatagagtgaaaggtaaagattggtgtgagggtgggtctgtctattgagtagcctcctcagattcattgaactaggtctgtcccaatgtatggggtggcgaatagtaagtttgtaattactgtggcccctcagaatgatatttgccctcacgggagaacatagcatatgaagtctgttgatatagttgcaagcaggagtataatgccaatgtttcaggtttctgagtagagaaatgatc

SEQ ID NO: 656470 - DNA, 328 bp, Homo sapiens
actctaaatatgttttcctcccccatccaactgccacctgtagtgtgcctggtgaagatgtgcgttattgattctgctgcgtgcgtcattctctgcatgcctgaactcccaagtgtgctgtgtttgtcaagcagtggtgagggaccgtgttcaaaacctgctcatttatgaattcaattttgagctgaaacgcgctgtcactaggaatctccagacgttaacactaacacacaaactggtgtttttaaaaaaaaatctggtttctagcagtgtgtctgctgcaacgagtggctacttatcgaattcatcatagcaagaacgtcgacgc

SEQ ID NO: 656471 - DNA, 128 bp, Homo sapiens
cattggtccgagagaaattaggaccagactcggtgcctgatggatatcaggcgtcacagacatttcatggggctccactaactagttgcaactactggcccttcctcttgcttcttcttggtttgcta

SEQ ID NO: 656472 - DNA, 838 bp, Homo sapiens
  misc_feature (25)..(25): n is a, c, g, or t
  misc_feature (124)..(124): n is a, c, g, or t
  misc_feature (156)..(156): n is a, c, g, or t
  misc_feature (210)..(210): n is a, c, g, or t
  misc_feature (282)..(282): n is a, c, g, or t
  misc_feature (321)..(321): n is a, c, g, or t
  misc_feature (324)..(324): n is a, c, g, or t
  misc_feature (359)..(359): n is a, c, g, or t
  misc_feature (373)..(373): n is a, c, g, or t
  misc_feature (402)..(402): n is a, c, g, or t
  misc_feature (407)..(407): n is a, c, g, or t
  misc_feature (538)..(538): n is a, c, g, or t
  misc_feature (566)..(566): n is a, c, g, or t
  misc_feature (589)..(590): n is a, c, g, or t
cagaagattattttacacaagcaanggaagtgaaagcattcgcggagacccacatcaagggcttcacactgaacgatgctgccaacagccgcctcatcataacgcaagttaggcgggattattngaaagaggctgtgacaacactgaaaacagtantggatcagcagcagaccccttctaggttagcagtgacccgtgtcatccaggcantggccatgaagggtgatgtgtgaaaacatagaagtagttcagaagatgttaaatggactcgaagactccatnggactttcaaaaaatggttttcatcaataacattgcttnggntcaaataaagaataataacatagatgccgcaatangaaaacatgtgaanaatatgcttacttcagagaataaagtcanttganaccccaatacttcggctgtggcatacttattcagaaaagtaatagaggagcagttggaaccagcagttgagaaagataagcatcatggcggagagattggcaatcagttgcaatttataaacctgtcatgnttttttccttcaacttgtggatgcggcnaggtggtgatgcagagtctctanngagatgtgcgtcattgtgaccaaacccgattggtgtggtctcctagaatctaggacaggaggctcacgtgtactgggggaaatggacgaataagaaagggaagagtaaatctgagaagttttaaagagtgctgtggaaccgggaatttggcgcaaacatggggcttaagggcttggaaggggacctctaaccggagttttgcaaaggacttaacagtgtttgtttttaagacctttgtacgtgtgatt

SEQ ID NO: 656473 - DNA, 729 bp, Homo sapiens
  misc_feature (598)..(598): n is a, c, g, or t
  misc_feature (604)..(604): n is a, c, g, or t
  misc_feature (638)..(638): n is a, c, g, or t
  misc_feature (663)..(663): n is a, c, g, or t
  misc_feature (683)..(683): n is a, c, g, or t
  misc_feature (702)..(702): n is a, c, g, or t
  misc_feature (722)..(722): n is a, c, g, or t
  misc_feature (728)..(728): n is a, c, g, or t
aatttcagttcatacgaaagactatcctcataagtgtgagatgtgcgagaaaggctttcacaggccttcagaacttaagaaacatgtggctgtccacaaaggtaaaaaaatgcaccaatgtagacattgtgactttaagattgcagacccatttgttctaagtcgccatattctctcagttcacacaaaggatcttccatttaggtgtaagagatgtagaaagggatttaggcaacaaaatgagcttaaaaagcatatgaagacacacagtggcaggaaagtatatcagtgtgagtactgtgagtatagcactacagatgcctcaggctttaaacggcacgttatttccattcatacaaaagactatcctcatcggtgtgagtactgcaaggaaagggcttcccgaagaccttcagaaaaagaaccagcacataatgagacacccttaaagaaagttgggtctggcctaacagtgtggctaccaagcttggtaaagaaggtggcccttgaagccagaaaatttcattttttaaaggccgtcttggtcacattccttactatccttggaatatgctggggaaaaaatagaaatattggnttctangcccctttttttttcattttatttaaatcgctgncctggatcccctatcagttcttttnatagatgaggaaaatagccnccagccaggtggttataanaaaaaaaaatttggattttntacttng

SEQ ID NO: 656474 - DNA, 214 bp, Homo sapiens
  misc_feature (139)..(139): n is a, c, g, or t
  misc_feature (158)..(158): n is a, c, g, or t
  misc_feature (174)..(174): n is a, c, g, or t
  misc_feature (196)..(196): n is a, c, g, or t
cagggctggtgagccctgtggtgtgggaaagattacgcaggaagtcagggtgccatctctcctcggtgttccaattccaagcctcagttccacacacagaataaccataaacagggaaatccagctctctgcatctgtngtgtatgctgtcatgtatncagagagctgaatttnagagggcagctgcagcacattncgaacaggaggagtttaa

SEQ ID NO: 656475 - DNA, 233 bp, Homo sapiens
ccgagttgattcggatgcgtttagaagtcccattcctaaacacatccgtgttactctcatcacgagtatcaatcacctgagctcaccatagtctggtagatactctattcgaaaccaattaattcaagcactgattataacatggttttctgggtctctgttttactctgctacaggcctcaaattacttcaagtcccccttaaccatttgctacggcatttacggtttaaca

SEQ ID NO: 656476 - DNA, 1403 bp, Homo sapiens
gctaccccgtaaaacgccagaagatgggcaagacggaaaacatgactacgagtaatccagagcgattgggtcgctcgatgtagcgtagcgacgtgagcattcgaggcatagtccaccacgtacctggtcgcatctgcatctatacaatgcgtggtggcatcgacagaagagcaaccatctgaagaaaactatgagaaggaggctgctgaggactgggaagaggtgctcgcttgcaagatatgtccctggggtcttggtatataacagctgagaagctgagacgttggaacgatggctagtcacccatttgtactaatcataccttggtggaaaatgtattgaagaccaagacagagtaacatgagtgatggagccttatcgagtatgagttggcccacgagggaacaaacaggatgacctttaaatccacaagagaccgatggatttacgaaggtggactatcatcaagggcctagactctgtgactgtcacttgaaattgggtcgcattggcgtaggctaggtggttggggatcgaacactctcttgagaggcctagcgctattgcttccgaaagaaaactggggcaggcacccacagaaagagagacaatcggcacgcaataatccgtagggctttgaacagcagctagggggttgttggaaaaacataatttaagaaattgctccgagagtgaaatatcacacgcataagagatgggaattgcccctaccgtgggaggcacaaaaccccgttactgagagacccaagccacgtagacagttactgcaaggggagcaattgtgcgtgctaaggggaagaaagccctaggcgcacctcgaatcaaattttaacgcgtaccaccatatttggggcttaaacataagcgcgccggagccaccaaggttaaagccaacatatgtggtggccccaatctttctcagtgaggttttgggacaacattgggttggaacccaaccactggagcgtcggggaacacccccacgggatggcttaaacccactggccctctggggtgtcccccaggcggacgtgggccacaagtgcaaccccgtctacaggggccgtgcgcacaagagcgcaggtcggcaaaccaacagcaaggcttcaaacgagcacacagcgaacatggagaatgtcctataccaacagaaaaaccgcggcccaaaactgtacaaaaaagccaccatgtatggccaagagcactctcacacggagcgtgtgttacaacacaaccatgggctcgtgcacctagggacaacaggacaccagaatagggctcaacaaggcgtgacacacgcgagagtgtagtcaaaaacacacgagggatggcggtgacaacaccaaggaaccagaataacaggtagtacacacgaccgtaaa

SEQ ID NO: 656477 - DNA, 119 bp, Homo sapiens
gctcggtacctataggcgctatgtgggaggattacctgagcctgggaagatcaaactgtggtgagctgtgatcacgccactgcgctctgagcctgggagacagagtgaaaccctaaatc

SEQ ID NO: 656478 - DNA, 754 bp, Homo sapiens
gccttcggcgtccctgcgtctcttcactgcacatttgctatgcattcgcgattcccatttctctgctaggagccagcctgggttggcgctgctcccagagccgtgggtcccagaccttgcgttccttttgttcctgtccgtttatcaggacactgggcccctacctgtcacgtgcctcgtaggcctacctcttagcccagcctgcggggcgttcccacgtgcctggatgccggcttgagttctgcgcacgcaggattcagtgtggggacggctccctgccaggatagggcctagccctggcccaggtggtgagctggtttgcagtgtccgttctcatcctacctgatgggcccagataaaggctccaccagctgtccagcctcctctggacggccaatcagcggtccctgcagcccaagatgggacatcagaccactgtgccaccagagctcacccatgccagcagaaatggggccccagccaggccccagaccagggtcaaaggagcaactgcatcagcacatgtacaatacatgttgccatagcaccaaccatggttgacacgtgggagcacacacacacacaggatgacagggggcacagcccacatccacactccggcaacgcccccacccatcccagcagtgtttctgcaatgtgacatcaaggactagcgtcctccccaaagaccattaggagggggtcaacaatcagacagcacttaagctgatgtttaaaaagacaccatttgccc

SEQ ID NO: 656479 - DNA, 150 bp, Homo sapiens
cccgtctggttcccctcctcttggtcctcatgcccccgggcgcctcgtctctgggaacccgcggtttctggtccggtcccaccctgctcccccctgggacccctggggagggtgtgtcttatggtcctgttggcggtctgtcggtgttct

SEQ ID NO: 656480 - DNA, 422 bp, Homo sapiens
agtagtcaagtatgtccatcaaataaaccagcgcaaacggcgtggtaaccgtgaccgcacaaaattttggtgacaccaatattgatgacaaatcgattacattaaccccatatgttgcaggaacaggtggaaatactgcacttgatgtgagcgccgccaataaagaccaaggaaaagctattgcggagtggcgctgcggcccagaagccaccaatggaattgcagccaagtacttacccggatcctgcaaaggctaatttaattattcaacacgaagtcagttaattatcgtgaataccagcaacgcatccccgaaaagggatgcgttttttattgccctcacgtcccctgactaatcttaatcgtcggaaacttgctcgaataatccttggccttcggagccacggcaatcgccacctgcc

SEQ ID NO: 656481 - DNA, 647 bp, Homo sapiens
ccggagtctacagacacacctgagagtgctcatgttgcatctcatgtgcctcatgtttcgttggacggtgctcaggagaccggctatatcactacgagaggtgctatcgactactaagatttatcactgcatagcccattcggacctgcaacagcgtgcgtcttacttatgcagagtgcgccgaatcctatactcgcttgtctaatgattgtgcatgacctcttacagtcagacatttgctagctccaacactgccgttatagatagccctaccatttctgcctcggcgggcaccttatcatgtgctcacagacactgttggtgtgctctgcgtcatattgcatctacgcagagatgtcatcatgcataactctaaggtgctcattcctgaatatctgaacttcattacacttcatgcagactcacacgatctccctctcatatctcgggtctttatgcgtcactgcattacttacacagttatgttgcagattgtcggccatccgtgctgcgatgactggtactgatctgcgcgttatatacagagatctactatcaacttctactggcggtgcttctagcaacatatagtgtagtcatacacgaagactcttcagatcttgctggcccttatagcgtgtagcact

SEQ ID NO: 656482 - DNA, 98 bp, Homo sapiens
aaaactctggggacgtttattaaggctctggcaacactggggagctggcctgcgtccccgaaaaaaaaagtcagtcacaggggggtctccatctgatc

SEQ ID NO: 656483 - DNA, 507 bp, Homo sapiens
  misc_feature (488)..(488): n is a, c, g, or t
ccccccactgggttcgagttcagtgaggcacagagttggactattgtatatttagttggagccggggggagggcaggagtattatcagataatggattttataccttagagcaaaatctattagtctctctcagtttatcaatttaaatggctttaggcttatagggggtgtaaactttaagaatataattctcccattcaagtttacagcaaacatctagccaccttcaaaacaaagaagatacagaccatcatttagcaatactaatacatgattttccttggggatggcaggtttgagaatcctttagcaacaggacatacttcccctaaattacagtgaattatttataacgagataaagctttcaggtacaagctgaaggtggggtgtctaacaactaaaaactatcactaaatctcaaagagaaagttcttgcaaaatatgtaaagttcacaaggtgcagacattttccttctttaggcttntatctaaggaagggctatg

SEQ ID NO: 656484 - DNA, 169 bp, Homo sapiens
aaaaaaaaaaaatttgtttttttaaaacttaattttttttttactccccattcagcatttccctgtgttttttgcattttcacaaacactgtttttccatcctccttttcctgttattcccaaaactcaccttcccccgtaaatgatatcttttcccccttggttttta

SEQ ID NO: 656485 - DNA, 1072 bp, Homo sapiens
  misc_feature (526)..(526): n is a, c, g, or t
  misc_feature (782)..(782): n is a, c, g, or t
  misc_feature (785)..(785): n is a, c, g, or t
  misc_feature (794)..(794): n is a, c, g, or t
ccacggggcgaccgagatggcggcctccgggggcctagagggaccctgggcgtgcactcgcccttccggctcggcctttagttagtgaccagctcctcggcgttctgcagagcgtgggtttcagcgagttctacgtgccaggtccgcccggtgccggcttcctcgctgcccctggcggctcgtcagcccccactacccctgaacttggtcccaatggcggcccgcccctccttcacccggaccgtgggcatctgggcctcgccgaagccgtcaaggtggctgctcgggcttctagagcccgtgtccagccctttgccaccgaggcctgatcctcttttctgccctaaagaacttgccctgacagcctctggctcccgctcttgaggatcttgcttgtccaaacccagaagacagtgcatgaagccaggggacatccgccatgctccaaacaacttggcctcaggagtcagtgacctttgaggatgtggctgtttacttcacccagaatcaatgggccagcctcgancctgcgcagagggccctgtacggggaggtgatgctggagaattatgcaaatgtggcttctctggtagcgtttccattccccaaacctgctctgatctcccacctggagagaggggaagcaccatggggcccagatccctgggacaccgagattctgagaggcatcagtcaaggtggtgagtcctggatcaaaaatgaagggctagttataaagcaggaagcctctgaagaaacagagttgcacagaatgcagtagnggncttctcagnacgttctcagcacttgattttaaagggagggactgaagcagactttcaatctaaatccaaatctgatacttcggggtggaatgaagttctatgaatgtaagaatgtgggaaatctccggtatacaaaggtattcggccgatgatcataaggggagacccttgtgaggagggaaatccgctccctgatgtgtgttaaacacaggagggccaataaaagggggggttcaccgcaccaaaccgcaacaacaaggggggtgccacaaccataaaggggccca

SEQ ID NO: 656486 - DNA, 225 bp, Homo sapiens
  misc_feature (118)..(118): n is a, c, g, or t
tgaatcgagctcggtaccgttgctaggctggagtacaggtgtcataatctcgctcattgcaacctctgcctcctgggctcaagctgggtcaagctatcttcccacctcggcccccgcnccgagtagctgggactacaggtgcacgatgccatgctcagccaatttttaatttttttttttttttttttttttttgtgtgtttttttttggttttttatttttttt

SEQ ID NO: 656487 - DNA, 790 bp, Homo sapiens
  misc_feature (500)..(500): n is a, c, g, or t
  misc_feature (503)..(503): n is a, c, g, or t
  misc_feature (512)..(512): n is a, c, g, or t
ccacggggcgaccgagatggcggcctccgggggcctagagggaccctgggcgtgcactcgcccttccggctcggcctttagttagtgaccagctcctcggcgttctgcagagcgtgggtttcagcgagttctacgtgccagctcttgaggatcttgcttgtccaaacccagaagacagtgcatgaagccaggggacatccgccatgctccaaacaacttggcctcagatgttttggggattctagtagcccttgggtttgatgacttcagaggagagttttgcaatcagcagcctccagaaatactggtagcgtttccattccccaaacctgctctgatctcccacctggagagaggggaagcaccatggggcccagatccctgggacaccgagattctgagaggcatcagtcaaggtggtgagtcctggatcaaaaatgaagggctagttataaagcaggaagcctctgaagaaacagagttgcacagaatgcagtagnggncttctcagnacgttctcagcacttgattttaaagggagggactgaagcagactttcaatctaaatccaaatctgatacttcggggtggaatgaagttctatgaatgtaagaatgtgggaaatctccggtatacaaaggtattcggccgatgatcataaggggagacccttgtgaggagggaaatccgctccctgatgtgtgttaaacacaggagggccaataaaagggggggttcaccgcaccaaaccgcaacaacaaggggggtgccacaaccataaaggggccca

SEQ ID NO: 656488 - DNA, 324 bp, Homo sapiens
gaccagatcttctgtaaccttactgattcttttgtctaacccatcacctattaagaaaggtgagtaaagtccccaagtatgattgtggatttgattcctcttttacttccattatcttttgctttatacactttgaaactatattattgggtggctatagatttagaattataatattttcctggtgtacctactcctttatcattacaaaatatctttccatcgattttaacacttcttaccttcaggtaagtgtctgaaacgtgtaccttttctctggttagtatttacatggtataccttttatcattcttttaaactttc

SEQ ID NO: 656489 - DNA, 241 bp, Homo sapiens
caaacagccgcccgcaggaagaagcacagctctgagaggaggagctcagacagctcaagcaagtggccaaaagagaaagggtgaagcagaaagagactgtgataacaagaaactcagactggagaaggaaatcaaatcacagccatcttcatcttcaacctcccacaaagaatcttctaaaacaaagccctccaggccctcctcacagccctcaaagaaggaaatgctccccgggatacag

SEQ ID NO: 656490 - DNA, 362 bp, Homo sapiens
  misc_feature (32)..(33): n is a, c, g, or t
  misc_feature (83)..(83): n is a, c, g, or t
ttacaaatttgataaaaggaaggtccactgtnntagaaaagcaaaaaaaaaaaccctcgtaagtaaaatgtagatatacaggncgggtgcagtggctcgcgcctgtaatcccagcactttgggaggccgaggcgggcagatcaccgaggcagcagattgagaccatcctggctaacacggtgaaaccccgtctctactaaaaatacaaaaattagccgggcgtggtggcgggtgcctgtagtcccagctattcaggaggctgaggcaggagagtggcgtgaacctgggaggcggagcttgcagtgagcggagatcgtgccactgcactccagcctgggcaagagagcgagactgtctcaaaa

SEQ ID NO: 656491 - DNA, 260 bp, Homo sapiens
gggttttttgttttttgggggggtttttttttttaggggttagggccccagggtttgaaggagccccctgtagtctctttgatatgttcagattttccagaaagagatttaagtctaaaaatttattaagggaattttaaactatttcccccaaggggcccttagcctctttaattttatttaggattcatgaattaatttatgggcctcttatttgggggtaataggccccccctctttaccaaataagttccgaaata

SEQ ID NO: 656492 - DNA, 108 bp, Homo sapiens
atccacccgcctcagtctctcagagctggtgcgattacaggcgatgagcaacgattgcctggtcccgacctttgcttaacacttccggacacaccttattcgtacacg

SEQ ID NO: 656493 - DNA, 135 bp, Homo sapiens
tttcaagagaaaggttgtgtttattttctgaaatgagcacaaagacacctttcacaataacactgaaagcaggtgcaaagactggatagggaccttgactaaggagcttcgaaaaagcagccgcatttagattga

SEQ ID NO: 656494 - DNA, 148 bp, Homo sapiens
tgatgacttagtttttaagcccgtgaaaaaaaaaaaaaactctcggtggcaaggttgaagtaaaaatgccgaaaatgaatggaaaaaattggagcaaaaaaaggttgattacaccggccccagggttcaggcaatgcaaataaatgta

SEQ ID NO: 656495 - DNA, 624 bp, Homo sapiens
gggcgagacttgtgcgaaagatgcatcaatcagatagaatatgcatgtctatccacggcatctattcgtgtagtgtcagagccctcctgaacatcgtggtccagcctggatacattagtgttctattgtcgtagaaaaagagagtttgctgtgttccagtttgggtagtcgtgtggggatagttgacttgctagtggtcctaggtctcactctgctcatcaggatgattcgggctagtccttctatagacagagaaagaagtctatgacgggcattacactgggccgccgtttataaacagagttagtcaccagatgagcaggctcctcggaagtcccccctccgacactgagggtcttgtaaagagtctgccttctggatcccaccagggcccagtcatatatgcacagttagaccactccggcggacatcacagtgacaagattaacaagtcagagtctgtggtgtatgcggatatccgaaagaattaagagaatacctagaacatatcctcagcaggaaacaaaagcaaactggactctcgtgcagaaagtgtagcccattaacacatgtagcctggggacccaggcaaggacaagtcacgtgtatcacagaggagagaag

SEQ ID NO: 656496 - DNA, 356 bp, Homo sapiens
gctgtaatggggggataggaggagaacgggggatcggtgtatgaagatgagggtgtttactcgggatgaatgagaggtcataggtagtggaatgtggtgggtgagtgagccccatggtgtcgtggtaaatatgtagagggagtatagggcggtgactagtatgtagagtcctgtaagtaggagagtgatagtatatgtgtgtcttataattcaagcacgtcatattacctctgatgacttacaatttgcttcggctttaaaggctcacagagaagctgccgtccatgtgcttttcaaaggcagccaagagcacgtgggcgtggccagtcacttccaccacatctccttcgacgacc

SEQ ID NO: 656497 - DNA, 183 bp, Homo sapiens
gggcggcggctggatgataatgtgaacatctggggggacaaattctttcaggttacagcacaactttgacacctatgatgatagcttaatcacagactcaataaaacctatgattatgagtctttgatgcactaacaggctttctcatttaacaagaatggcagtgttcccaggcccgggcgg

SEQ ID NO: 656498 - DNA, 104 bp, Homo sapiens
catggtgggcaggctgttcagctgttgatggcatgtccgggcacaggtaaggtggcatcatcgggggtccctggggccggaggggctggcctcctctgtgctgt

SEQ ID NO: 656499 - DNA, 208 bp, Homo sapiens
gacgcggtctccgtcttctccacaagaatcaaggtactgtccagtgaaagccacaactccttctgtttgggggcagagctctcctcacttcagcacatggcacatttatagcccaaatgccctggaggagaactgctcatcagtaagccctggacatacgtgaaactcccagtcaggattctatccagacatccaaataaaataggcc

SEQ ID NO: 656500 - DNA, 242 bp, Homo sapiens
ctgcagagcggctcatggtggagcaggccaggacaagatgggtgggtccaggcctcagagaaggggacatataacagaggcatgctggagcgatagacggtgactctgagttcttgaggggcgccggccctgactgtggatgtgagcaggaaggagcagaggtctctgggcaggacataggccccatagtgctgatgtgcacttgtcctgtgacctgggcagagactgggtcccagcatctg

SEQ ID NO: 656501 - DNA, 894 bp, Homo sapiens
  misc_feature (552)..(552): n is a, c, g, or t
  misc_feature (611)..(611): n is a, c, g, or t
  misc_feature (690)..(690): n is a, c, g, or t
  misc_feature (735)..(735): n is a, c, g, or t
  misc_feature (858)..(858): n is a, c, g, or t
gatgcgagcactgcggctgggcgctgaggatcagccgcttcctgcctggattccacagcttcgcgccgtgtactgtcgccccatccctgcgcgcccagcctgccaagcagcgtgccccggttgcaggcgtcatgcagcgggcgcgacccacgctctgggccgctgcgctgactctgctggtgctgctccgcgggccgccggtggcgcgggctggcgcgagctcggggggcttgggtcccgtggtgcgctgcgagccgtgcgacgcgcgtgcacttggcccagtgcgcgcctccgcccgccgtgttgcgcggagttggtgcgcgagccgggctgcggctgcttgccttgacgtgcgcactgagcgagggccagccgtgcggcatctacaccgagcgctgtggctccggccttcgctgccagccgtcgcccgacgaggcgcgaccgctgcaggcgctgctggacggccgcgggctctgcgtcaacgctatgtgcccgtcagccgcctgcgcgcctacctgcttgccagcgccgccagctccagggaaatgctangtgagtcggagggaagaccgcagcgccggcagttgtggagagtcccgtcctgtctccangcacgcaccgggggtgtctgtatcccaagtttccatccccctccatttcaaagatatttatcatcaagaaaggggtatntttaagacagccagcgctacaaagttgactacgagtctcagagcncagatacccagaacttctcctccgagtccaagcggggagacagaatatggtccctgccgtagagaaatggaagacacactgaatcacctgaagttctcaatgtgctgagtccaggggtgtaanattccaactgtgacaagaaggatttataaaaaaaca

SEQ ID NO: 656502 - DNA, 185 bp, Homo sapiens
  misc_feature (11)..(11): n is a, c, g, or t
  misc_feature (86)..(86): n is a, c, g, or t
  misc_feature (92)..(92): n is a, c, g, or t
  misc_feature (163)..(163): n is a, c, g, or t
ggagatagggnactgaggctcccgtgaggttggaatcgacttcaccatggggggccctcagccagcatccagctccccacccccangctggnagtaggactggttagatgctgtatttccacccaaatctgggtatatcagtgtgtcttggagaatcttggancattaaagataaacatattttt

SEQ ID NO: 656503 - DNA, 146 bp, Homo sapiens
atcggttacagatgaggaagtggatgagctgtacagagaagcacctatgacaaaaaggggaatttcaattacatcgatgttcacactgcatcctgaaacagtggagccaacagacaaacgatgacgtgaaaggaacttatagctaa

SEQ ID NO: 656504 - DNA, 143 bp, Homo sapiens
cgcataattataccatggactaacccctataccttctgcatatgaattaactagaaattactttgcaaggagagctcgcagcaaaagactcccgataccagacgagctacctatgaacagctataatagcacacccgtctatg

SEQ ID NO: 656505 - DNA, 247 bp, Homo sapiens
aaaaaagaattcctatcagtgttgcagaagtttttgcaagtataatgacattttaaggtttgttaagtattccaaccaaaagaaaataatggaatgggggcttaggtggaacaagattggcaaaatattgattattttttaaattgagtgatgggtacttgtggcttaactatactgttctgtgtacttttatgtatgtttgagaatattcaaactaaatttttaaaaataaattcactgatggtaa

SEQ ID NO: 656506 - DNA, 141 bp, Homo sapiens
tagatgtggctataaatgattaaggatacgtagatataagagatcaggttcgtcctgtactgttgctgtatggctatcattcgattttgaggttagtttgattagtcatagctgaggctggtgtaagattactcgtacaca

SEQ ID NO: 656507 - DNA, 104 bp, Homo sapiens
tatcagctggtcatggcactcagaaacggcgttgacgtaatttaggacgtgtcataagcgaaacagcacactgtttgaataagagcgagtcgaattggcagagg

SEQ ID NO: 656508 - DNA, 547 bp, Homo sapiens
  misc_feature (142)..(142): n is a, c, g, or t
tcctgtgccaagtcccctccccggaataaattgccccaggagtgggagaacacaaaaaacgccctcctcacctacctggagcaggtgcgcatgggcattgcaggagtggtgagggacaaggacacggagcttgggatttctnaccctgtcattcccgtggatgggattaaccataacgtgaccccggcgtggggcggggattattggggttttttgaccccaggggattacatggtgactgccagtgccgagggctcccattcagtgacacggaactgtggggtccccttttaaaagggccccttcccctgcaattttgtgttccccaagactcccaaacaaagggtgggcgagcttttggcaattggggccaaggtgcccccggaccttttcaggggcctggagcggtttaaggggacaaaaggttttatacctgcggttttaaagccctagggcagggtgggcctggcaagacgggaaggggaaaagtaaagagggaggggcaaagtgaggaaaaggggttcttttaagctcccgggccccttta

SEQ ID NO: 656509 - DNA, 733 bp, Homo sapiens
  misc_feature (201)..(201): n is a, c, g, or t
  misc_feature (529)..(529): n is a, c, g, or t
cgtgtaagagcaagggatctcgtcccggggagcccggtcctcttggagggagggcttttggcttttaccatgtgaagctaggttgcccgcctcggggtgggcctgtttcttatacttctcatgaattcttattcctccaccctgacctttcacaaagggtgaattttaatcagcgtggtttttgccagagagattcagganaattccgccccattttttgccaatgttatttcttttgcgcttttccatgctccttccttctttttcccgcttccttaatgggatttagaccctggccaaccttttttaggacccagagggaaggaagccccatttccaaaaagcccaggggttttatattgaccccatttcccccctaaaaggggtttgaggaaatgcccctttttcccaaaaatggcccctgatttccccgggttcctttttaaattagggaacccgaggattttatgtttttttttccggggggcgggaaattgggtttttttaccgggtggttcccggtttcccngcccccccgggttcttttttgggggccgggtttccaaacccctttggtttttagggtttttaaatccccccccgggcctggggcccgggggtcgttttttgtttgggggttttttttttcccatggaatctttaaagggggggccatttgttttttggcccctataccctgttttccaataaactgggggtttggtccagttta

SEQ ID NO: 656510 - DNA, 344 bp, Homo sapiens
gttagtgcataccgtgggactacaaacgtcactgtaactgccttgaggacttggatattttttttttttacagtagggaggaggaggaaagttgtctaagagcgaaaaggttacattaaaaatcctgaagacctggagtacaagactagccgggtgaccatggtgaaaccccgtctctactaaaaatacaacatattagctgggcatggcggtgggcgcctgttatcccagctactcggaaggctacggcaggagaactgtttgaacccaggaggtggaggatgcagtgtgctgagatcgcaccattgcactccaacctgggcaacagagcgagacttcgactc

SEQ ID NO: 656511 - DNA, 648 bp, Homo sapiens
  misc_feature (11)..(12): n is a, c, g, or t
  misc_feature (39)..(39): n is a, c, g, or t
  misc_feature (43)..(43): n is a, c, g, or t
  misc_feature (302)..(302): n is a, c, g, or t
  misc_feature (307)..(307): n is a, c, g, or t
  misc_feature (464)..(464): n is a, c, g, or t
  misc_feature (474)..(474): n is a, c, g, or t
  misc_feature (501)..(501): n is a, c, g, or t
  misc_feature (517)..(517): n is a, c, g, or t
ttcttggaaannctgatgatgagtagggacaggcactgngttnggctccctgagagtgttgtacgagctgttgataggcatctccctccacacctccggggtccaccagcggaccgtggactgcactggcacggcctggggcttgttgcagacggtttactaggtgttggggctgcaggaacctcaggtgtctgagaaggtctagcaccgggtagcctaggaggtctttgacttatcaacctttggcaaccagtaagtaggcatcccgcgggtggagctgcttggtgttgtgaaagtgcgtnggtanggtctgccctctcagcagcagatagaggtcgctggcccagtgtcctagtccctgcggcacaagtttcgaggtgtgtcctgcgggcgagaggtcgtcttagtggtgtcctactttttgcggcaggtgtccatattttggcctctgttcccgactacgncaacatagtntttcgaggctaagagcgcttggacttngcagtgggaccgggtntgagacaacaccctggacagctccctccaggtcgcccattgatgcttgcaggtgccgcaacccctgctgtgttggttatgagtacatgtactccctacttttataggggatcgtcacttacgatactagac

SEQ ID NO: 656512 - DNA, 795 bp, Homo sapiens
agctccagtcccgatgcagaaagaggtggccggggagaaaggagccgtcccagctgcgtcaggcccaagcctcccatccccgccaaacctcagctgcccgcacgaagtctacacaatccctgtgtccacgacaccgcccggccccacgcctccaagccctccaatcctatctacaatgagcctgatgaacccatagctttctaataccatgggcaagcggcagccctggggaagcccccagcaacatctaatgtggaagtggaagatgagggcctacccgccactctttcgggcaccctgtcctgacggaagagcatggtccaaggcatgtcccaggaggccagaataacaggtggctcccagctgcattctgagaactctgtgattgggcaaggccctcccctgccccaccagcccccacccgacctggagacacaccgctcccgccacaatctttctagacaggtgcttcaggacagaggacaggcatggcttccccttgggcctcctcagtaggctggtctaggccatcgacccgcctaacaaagtaagcctggaggtgcagacgaagcaaatgcggagcctgctccctcgctaagaagagtcccaagaatccaatggcatcagtcactcggtgatctaacacagcaaagaagtctgcaaggagggcccagactagctcccacatgtcctaggtttcatcctccctggagtctaatattccttggccctctgagccttttgagtcatgggacctggtccaatgctgactgttgtctgaggaatggatttggt

SEQ ID NO: 656513 - DNA, 1289 bp, Homo sapiens
tgggggaaaatttttccatctttttttttctctctccaaaaataaaaggtggtgggtgtgtggaaaaaaaaaaaaaaaaaaaaaaaaaaaaaaaaaaaaaaaggggggggcaccacaaaaaatcccccggggggccccactacgagcgcgcgccccccgcatcttatattgtgatgagaacgaagagagggggcctccaaagagagagagaggagctgtttacttagaagagagagagagagacgagggggcgcgcgggaataaaacaagacggggagggaggggagaaaaaagagcggaacgaagggggagagctgtggaggagaaaagaaacccttcataagtggggagggggagaacaatatgggggagagaacaacacacaccaccaacaacaaaatacaaacgcacccagaagagagaaaaataataaaacttaagagaggcagagagaaagaggtgcgggaaaacacaacagcgcggaaaataaagcagagggagaggcgggagagaagaaagaggggagcggcacagacgcgagcaagatacggaacaagagagaaaaaatattataaaagcgcaggggcggccccccccccccacctaaaaacaccagcaaagagaagagagaagaaggagaggaggagaacaagaagaagagagaagaaagagaaagaagaaaaagaaaggggaaagaggagagaagaggtgaaaaaaaagaagaagagaaaaggacaagagaaaaaaggagaaaaggaagaagaaaggaaaaggagaagaaaaaaaaggaagcaaaagaagaaaagaacaaaaacaaagaacgaaaaagaaaagaaagaaaaaaagaaacaagaaaaaaaaaaaaaaaaaagagaaggaggaaaacaacagagaacaaacagaaaagagaagaaaaaaagacgaaaaaacagagaaacgaggaagaagacaaaaagaacaaaaaaaacaaaacgaaaaaaaaaaaacaagcaagaagaccggaaaaaaggaagacagcagaaaaaaggcaagaagacagaaaaagagaaacaagaacgagagaaatagaagagaaaaagaaacacgaaggaacggagaagagaagaggagcagagaacagaaagaagcgagaaggaaaagaaagaacggaagagacacgaaagagacagagagcaagaaaaaggaaaaagagacaaaggagaagaagagaaacacaaaaaaaagaaaagacacagaccagaaacaaacaaaaaaaaaaggagaaagaaaaacaaaaaaagcagggaaag

SEQ ID NO: 656514 - DNA, 356 bp, Homo sapiens
tgttcagagtgctatatctacatcttatgttagtcccgcattaattagccattgactccccaggttagtatacccgttctcatctggcattatttacagaaccacattttaaaccattggtaatcagatatccacttatgccttccagaatataaacactactgcctgacacaaatcgtgtgataagcaacaggctgggcctaaatattttgagtaattgttctgattcgcctagataagaaccctctacatttagtaatgctctacttactctcgctgtatctttgatgctggttaagagctcttgctcttgcatgacattctcagatttagaccttgttttaatttttatgtat

SEQ ID NO: 656515 - DNA, 111 bp, Homo sapiens
caaaaagaacctttattactttttatgatgggcgtgtgataggtggcgcgaagaaccttgggatcagaggcatggggggcagtatcatagtcccccttctgtcgtcttctc

SEQ ID NO: 656516 - DNA, 338 bp, Homo sapiens
tttaggggtttttcccccccccaaaggtttctttttgaaaaacccctcctttgaagccccccttttttttaaatttcccttattttttatttttcggggcccccccattttaagttttttttttcccccctttttttttttttttttttttttccaaatgggggtttttttcccgtttttgggggcttttttgggggggctttcttttggtttccccctggtttttttttttttttttaaaaaacccctttttttccccaaagggtttttttccccccccccccccccccccttcttagggggggaaaaaccccccccccccccccccccccttttta

SEQ ID NO: 656517 - DNA, 692 bp, Homo sapiens
agacctaatttggaaccctccaccgttctcccccatcctctgctccttccgctatgaaaaatacatgcagttccaccctctccccccctattgaataatctccgcgttcttttttctccccccctctccgcttcacaatatattctttccccccccctagttacctctctcccccacagatattgagaaagatagtccctcccacccatgtgtccctctcctctcgatgagcttcataatagataatatcccccctcgcttctaatatcttctatagcacaaacagtgaccaccacgcgtgagtatatatgcaatatataaatatcacgtgcgtaccattcatcatctcttagtgtaacaaaaaaccgcgcacactctttaagagacgcttaatctcatcctctactatagagattcgttatttatgtaaatttctgtgtagaacacaccccctctcctctatgtgtacagaacaaagtgtggtcattatataaccgcttccccttttgatattcttgggggtgaaacaggggtcttcttgacaatcttgccccggcattccagcatgttcgccccgccgtaacatgtggacagaccatggcattagagacgcaccgaccgccgcggtcgccccttgtcgccccaacacccagcgggacgctctctgcaaatctccccacaaatagtcgaga

SEQ ID NO: 656518 - DNA, 129 bp, Homo sapiens
ttattaatggttaactgctaacctaaaagcatctatctttgtaggcctatcatctatcttttccgatatggtccttgcccgtaaatacctacacgtacgcaactggtacgttggggggtacctgagctc

SEQ ID NO: 656519 - DNA, 177 bp, Homo sapiens
cgtccttcatcatactaccagaggggatgcatgctggagaggatgctatggtttgaatgtgtcccccagagttcatgtgttagaagcgtaatccccaatgcaacagtttttgaggtggaacctttgagaggtgactaggccggctgggcggcgtaattcacgcctattatcccagca

SEQ ID NO: 656520 - DNA, 1033 bp, Homo sapiens
gggcagttgtgagaagcgccgggacgccgagtatgggcgccagcccggagcaggtggcagagcaagtggcgatgacgcgactcagaaggaggcctgggtggagaaccacggtgggacagcaccatggaacagtggtgggcggcgggaggcagtgctggccggaagccccgtcaagtcgggctatgaaggagctgggcgtgttcctgggacgaacggtcactgagcaggcaccggcagatgagggcatacgggtggccaaggcagtcacctctgagtcctgtgagtgagctcgcaagatagctgggatcacacccctgtccaggaatccctggcaacaggcaactggaccgaggtccgtgtgagcagggatctccgaccatgcgccattccaggatgagcggggcccatctggcagcaagcttctagtccctggacatctcaccaagtgtgacaagcatggcctgtacaatcgcgtcagatacagtgcaagatgtctctggaacgggcagcagtgcgggagtgctggtgtgtgaaccccaatcaccgggaagctgatccaggaaagcgccccagcatccaggggggaaccccgagtgtcatctctgtctacaagtgaggaggaggaggctcgcggggtgacacccaggcggatgcagtagaccgcagacaggcggtgcctggggacccgtggacccgccggcacatctacaaagaacagtgcaggaaaacgggagtagatgatcggggagggagcgacagaaggagggagatgaccagtacagacagagacgaattagcaatggggaactagagcaagaaagaatagacacaaacgcggcaccgaccacctaccatgaggggaagtcgaccaggcatgaaccacgttgccctcaccaggcaagaagaaagggagactgagaaagacacacaggagcaacacgggaaagagcgaaggccacaagaaggtaccaccccggggaccataggaagagaccgcgacacgagaacatcgaccacaaagagaggcaacagg

SEQ ID NO: 656521 - DNA, 209 bp, Homo sapiens
ctggagatgactcactcactcattccacctagacagaagcaagcaaaatgagatgaaggcaggcctgggcggagagtgagacatgtactttcccttgccaattaggagacaggaaaactaatatgagagcctcagaggctccctgggccagtaatattacagggaaagggtaagggttgaggtggggctagcaaaccctctgcgtgtca

SEQ ID NO: 656522 - DNA, 292 bp, Homo sapiens
tcctgcaaggcctctggagatttctttaggaccaatgtcttcgcctggttgcgacacgtccctggacagggattcgagtggatgggagagatccgccctgtttttgatgtcataagggtcgcagagagattccagggccgagtcacattgatcgcggacgtttccgcgagcacagcctacatggagttacatcgtctgagcctcgaagacacgtccgtctacttctgcgcgacaaggactccgggcgacggctggcccttcgagttctggggccaaggaaccctggtcaccg

SEQ ID NO: 656523 - DNA, 986 bp, Homo sapiens
tcgaggacttcgtcaccatgacagcttctcggatgctatgacccaaccgatcatgtggagcagtgtgatgtgcaccatgggaaccatttcactggacttcttagagtgacgagaagtatgtggacatctcttctttatcctgtccctctagaagaacattctcccttgcttgatgcaacactgttccaaaagagggtggagagtcctgcatcatagccaccacatagtgaggaccggggctgaggccacacatatagggtgacctgatggacgcgagcaggatcgacgttgactgtcctgatggccatgagcagtctgagtggcacagcctggaccccaaggagcagcgtcacttgtaactgcgagtacgtgtccagatccagctgagctccacacactgactgccagtgagttgcagtgaaacactcgcgacatgttacctgtagatacactgtgctatccacatcacccacgcgccactaccatgatcaaaaccagacgcccaattcatacatccaacaagcatggacattctcgaacccaacgccatgagtagcacgactcaatgtcctacatgggacccactgctgtgacctgcgcaataccatggctcaaccgacgcccaattaaagaaacccccaatggactggctggatcaaaccatacctaagaccatgaccctgcgacgcacctgggaccaccattgtcatccaacaccaacacaacataatgtacatcccacaatgtgggcaaatcatatatgtaggacatagcgggacctttcacttgctcccacaatctgtgcaagaacaaggggggaaccacaccattacaatacggtgcacactgtgccaacgacgaattactcttgaaatctagcggaataataacagcgacagtacccaaaggaagaaacacagctagttatccaagcaatttaattaccattgaccacaaaatcaacttcatacactcacacaactgtg

SEQ ID NO: 656524 - DNA, 196 bp, Homo sapiens
gctcctctaaaaaataaacagcaaggtgagctgctcacacctgttaatcccagcacttgggaggctgaggcaggtggatcacttgaacccaggagtatcacttgaacccaggagttccagaccaacctgggcaaagtggtgaaacctcatctctacaaaactccatctctacgaaaaaaataaaaaaaattagcca

SEQ ID NO: 656525 - DNA, 180 bp, Homo sapiens
agcactatcccactacactctatacaacatattttgtcaacaagacccaacactgactaatcaactaaccaccataattacccccatactccttacactattccatcatcacccaacataaacatttcaacacaaactaccacctaactccctcaccaaagcccatcacaataaaaaaaa

SEQ ID NO: 656526 - DNA, 178 bp, Homo sapiens
actgatcctatcgggtatagaagataagggtcatgaaggtaaagaaaaacgttaaaattagccaggcatagttgtgtgtgcctacagtgctacagtgaggctgaggcaggagaatcgcttgaatccgggaggcggaggttgcggtgagccgagatcgctccattgtattccagcctgg

SEQ ID NO: 656527 - DNA, 302 bp, Homo sapiens
ggcattatccctttattgtttttttaacaaaaactttttttcaattattttattgcaatgttattttgagcaagtcctatgccaaaaattttgtataatgtttgtatggaaaattaaattttactcttgtggggtaaaactatttcagttactgattttaaagttggaatttgatattccagcccaaagtccccagggtattcaaaaatccaagttggggtcaaacatttcattttgatgtgaacttttttttgctttcctttgttttaaaactcccttttgcaataaacgttttgccagta

SEQ ID NO: 656528 - DNA, 630 bp, Homo sapiens
  misc_feature (66)..(66): n is a, c, g, or t
  misc_feature (196)..(197): n is a, c, g, or t
  misc_feature (501)..(501): n is a, c, g, or t
  misc_feature (518)..(518): n is a, c, g, or t
gagtgaggagggagtgttatttccttgggaacctagggaggagaggttccttcgttgggaaacttncgttgatagctgctgcctttgtcctgatcgttttctttcccttttctctggtggcctgttgtggtgcaacgagctgatggcatttgatcttgccccattcaggttggggagtgaagtgtgaggacccttnncccccgcttgctgtgaaagcacagattcattgactacagcacactgttgctcagaaaagaaggctgcaaatgacttctgagactttatgtcttttcttccagaccaaggaccgtaggaaggagtcacatctagccggcttagccaaagtacaggtgtatttgttcagggcacttgatttagatttggagggggtggggtggacagagcagcaagaggcgagtaaagagaatggtgggttcaaagatctctcttcccaaatgtgttaaatttttcttctcccagattagtttaattagaaattanctggctgctttaatcgngggtatgtacttatctttttagaaggttcggcgccagaagttttctttcgactaatttgttttcttaggagcaacaggagaaaatttaactttggacttctgtctttcacat

SEQ ID NO: 656529 - DNA, 131 bp, Homo sapiens
tacaggatcttaaattgaggtcgggtggggagcgagtgacacattgagaatgtcaaggcaaagatccaagacaaggaaggcatccctcctgacctgaaggttcgagccacacctccacccggactcaattt

SEQ ID NO: 656530 - DNA, 211 bp, Homo sapiens
taacccacttgtagttagtctgtttcacactgcttataaagacctactcaagactgggtatttatacagaaaagaggtttaattgacttacagtttcacaagactgggaggcctcatgaaactttagtcatggcagaaggggaagcaacatgaccttcttcacatgtgcggcgaggagaagagaaatgagagcctaacaaaggggggcaaa

SEQ ID NO: 656531 - DNA, 925 bp, Homo sapiens
ctcttaagtatagaggtttgtatctagaggatctcagttcaactcctgtctctccatataccagcaggtaactgtgaataacatacttaaatggctgtgcttatttccttttcttttcttttttcttttttttttttttttggaaatgaagtttggctctggtcccccaggcgggagtgcaatgggcacgatctcggttcactgcaacctccgcctctcgagattcaagcgattctccgtgcctcagcctcccaagtagctgggattacgggtgcccaccaccaccccgtggctaaattggtatttctcagtagagacggggtttccccatgtgggttaggctcgtcgggaacctctgacctcaggtgatccacccgcctcggcctcccaaagtggcggggattacgggcgtgagccagggcgcccagccgggtgcttattttcttaaaataatttttggttttaaaaacttcacattaaataagtgctaaggtctatggcatagtagggtgactagaagttaacaataccctatggcatatattctggaaatagctagaagagaggatttcgaaagttctcaaccccaagagtaatgactcctattgcgcggtgcgggttctgctaattaccccggctgcgggtatacggccagtgtcctggttttcctaacctttccgctggctgcccctcttaattgttgtgtttttttctcatgtggggccatgaaaaggcagaatgaaagcaaaaatcatcttcttctaaaaaaacagtagaagagatgcagaacaaaacacagaagagagagaaagaaacgggtctagaaacagcaggtagaagaaagagggagcgggataacggttccaagaaacaccgccgtgcataagcagaccaagatataaataaggagacataaatgaaaaga

SEQ ID NO: 656532 - DNA, 264 bp, Homo sapiens
atgattgcgtagcttccgaaatacttgctctaggtggacgaccacgacactactttctggaccgctgtgactgacgttgtgtgatgcagatagagcccatgtgctgtctctccaggacacgtgtgtggcgttgcagagcagaaagcaatgaagtccttctccacgtgggtcttgtcaacagcatcttcctccaggttctcagatgactgtgcagaggccacttccaacggactgctggacgacactcaccttggttgtgcatct

SEQ ID NO: 656533 - DNA, 169 bp, Homo sapiens
atgatgaagtagttgttgcgaatcagggcaactggtcggtggcgcttcatctcggtcctcaggccctgcctcggggttgggcatcagacgtggaggtcccagctggtccagctgtaccacgtacccctccatccacgtggtgagaggatcttgcttgaagtatgtagta

SEQ ID NO: 656534 - DNA, 89 bp, Homo sapiens
tggagacgacgtgcagaaatggcacctcgaaaggggaaggaaaagaaagaaagatagatgcagagagacctgggaagtgactcaggtgt

SEQ ID NO: 656535 - DNA, 248 bp, Homo sapiens
gagaatatgagacccagaaagatcacgttgtctagagaataccagtcgtagaagtccatgagcattgtcggatggaatctcccatcaccgataggctgccatgaagcaaaaccgccaggccgtagtcgatctctggcaggctgctcaggtcggccaggtcatactcctcagggtccgctgacatgcctcgcatcccgaagcgatgggcgtccttgaacagcgaggtcaacaaacatcctctgaaagtc

SEQ ID NO: 656536 - DNA, 1032 bp, Homo sapiens
  misc_feature (463)..(463): n is a, c, g, or t
  misc_feature (477)..(477): n is a, c, g, or t
gtgctgcgcaaacgggtgggacttgtccactcagcacgcgtgagtcaagctgctgaatggcaggagctgctacccacaaccgccgtgcgggccagcaaagccagtctgccacgcacattaccagaggataccgaatgaagcgagtcctaacgaggtcgactgtagctccctttgcgagattacatgcttgctgttgctagcttaacacactacgtccgaggtaagactccagccggttgctcaggataactcaagctatgaggaacccttgtcacccaatctcagcacagcttcatcttacttcctcgctcggctgactaaggccgagatgggtaccctgggatgctcccctgaacatgcgagtctgctaggaccttaggtaggggcattggagagcaaccgacgtatcctgtcgcaacgttgagctccagcctaatctggacactcgtagaaggaacgctcntagcgacatttcantcccggcgtcgtcctgtccaagggcctggccatggaaggactagtcatcgagtgaaagttcgcgctgtcccatggtcaaatcgaagcggtgacggggtctccttgcttggcgtgcctcatacggcatgcgaaccatcgcatgcattgcagtgcgccgagtgcagacctactcataggcttggaggacctctgcccgtgataagattcctagcgcccgtcaattcatgtcattggcatcaaggaacttcgctagagggtcgtggctgagcacgtgccagtggagttcttggtcgcgcaggggcgtcactcactcaccgacctgaatgcctagcagcccagaaccagaacgaatttccttgtacgtggcgcccaggacaacgtgggggcccgtgtttgtgtaggtggccaagggtggcctcgtgccccgtagggtgggcgacttagcctggcttgcacgcgcagggtcctcgtgcggtcactcgttcctttccaattgggctcctccaattggcgccctttttccatttcctggtgcgcgacgtggcgcacgcaggg

SEQ ID NO: 656537 - DNA, 1014 bp, Homo sapiens
tgggcttctagaagggggttaaagggggtgtgctaatagggttaaattacgggcccatatttcaaagattttaaggggaattaatttctaggacgagtgggcattgaaacgtggtggtttgtgcctccacagaattacaaagcatgtgaccggtagttattaccccgcggacacggtgttacacgaggtgcaaagtgtggctatgaggatatatagacacgttcgcgggacaattgtgactatcgtggatctctaaacgccatacagtggtgcgggaccgacgcctcacgtgaagtgtgccacaacagcagtactactctagggtacaagtgtctaaatatattatatctaccaacactgtggaggggcccattcccaactcaggagaagattaacccatcacctcgaacttggtggtcacacgctgtccccaacgcgcacgatctccccccgagtcactccccccgtggtctcctcactagagaaaacatccacgtggggcgcgaggcaacaagcatcacgatcgcacccacggcgacaccaccaccgcgccaccacacacgaccacgcaacctaccgcaaccacacgcaaaaaaatcaagagcaccgcctccagcaccacccacaaccacaacccgcaacaccccaccaaccaccacccaacagacggccggagacgaccccacaaccacaagccacacaccaaccccaagcgcacacaccaccacgcacacacgcagaacccgccccaagccatccagaacaactcaactagaaacaaccccacgcgcactacaacagggtaccaccagcgcagcaattacgcgacgaccaaaccgcatccccactgagaccgccaacacgcagcctgccacacacttccaaacgcactactaaaatcgccgccacgtggcaaaccagcaccactagcggagaccaacccacctatatgcaccacctaacccacaagcccatccgcaacagccacaacgaatcacagcacccgccgctagt

SEQ ID NO: 656538 - DNA, 502 bp, Homo sapiens
ggttcgggtagccacctgacctgctaggtagggccgtgttcggatgattcgaccactcctacagtcctcctctcgcatccaaactgcgtcgcgttgttctaggaagatgatacgggggcctcgtccctagccagcaaaaggtttgcacttcacctctcccgcctaattgtagttcctaacgtagtattctaacgtttgaccgcacccgtttctgagcctgcagccttcaccgtgtggccttgagggcctgtcgagtgagctgccccagcccctcccagcccttgcccagcctgggggagtggggaaggcttgggcatggcccccgttggaggattgatttgctgattttgtttcttgtcctttgtgttctgtggtacttgctgagagaataaagagtaagtgagccaagcagaaggaggtggagttagcggacccaaactcgagtgtgcagtgccccatgcctttcctggtagtggtgggaacccttatctgcaaagatacg

SEQ ID NO: 656539 - DNA, 120 bp, Homo sapiens
ctgcttatatacacctcgtgtgtgaagtggaggtgcaggtggcattagtgaatgaggatgtgacactgtaaagttaggagatgatttcttccccgccccccccctttttttttaggaaac

SEQ ID NO: 656540 - DNA, 225 bp, Homo sapiens
cgtgtgatggacgagacgactcaaaaaaaaaaaaattgggacaaatggaagagtgttttttctcatcactgggtattttctaaaaagaaaataacagcagagataagaaatctaatacaaaaggtcgtattcatcttatgtcctcttcttggaggtagactaaaagagcatcattatatgggaagaacccaagatggaattgtccattgggcttgggagatttta

SEQ ID NO: 656541 - DNA, 92 bp, Homo sapiens
aaaaaagcggcgcgaatcgatatcagctatcgatcgtcgactcgaggggcgtacatgctatagtgagtgatacatcatgcgtcgtacacgtg

SEQ ID NO: 656542 - DNA, 478 bp, Homo sapiens
gcgattctgcggacgcatccctgaggagagtgccgatgacggacgaactacgaccctgacaagacgcatctcgatctgctcctctgacaaacgacttgcctgtgaggcagagtctccgattctagaagaggagggagaggggggccgcaagaactcttccaacttcaaaaaagccaagagagtcaaaacagaggatgaaaaagagaaagacccagaggagaagaaagaagtcaccgaagaggagaaaaccaaggaggagaagccagaagccaaaggggtcaaggaggaggtcaagttggcctgaatggacctctccagctctggcttcctgctgagtccctcacgttacttccacaagccctcagattatatattttctatttctctgtgtattaatataacaatttattaaatatagatatccccagggacagaaaccaaggcccgagcttcaggcagctgtgctggtgagctcttc

SEQ ID NO: 656543 - DNA, 840 bp, Homo sapiens
taatgggtctcggcatcccagcccattgtgccgggccgacgttttggcacttgcgggattccgtgtgtgcaagaccactcaggccggctggacgggctccggggaccttccatgattggcagcccgggttttcaagaaggagaattgtccttgtgtctgaccggtggccctgctccggttcaccacaaccaagccggttgttccttgccccgatggaccccagagcccctcctcagccctgtgccacccccttccccaagcccatgcattagccagcgacgcttgtaggacgtcactctggctgtaacgtggcaactggtaggttgggacaccagggcgagaagatcgcacgcctcatctggacaatggctgtgtttgcagcctgctttagtgggaccgccccgagcctggctgcccctcatgtggccccaccccatcaagggaagaaggaggaatgctggactggaggcccctggagcccgatggcacagagggtgacagcttcctttcctgtgtgtgactctgtcccagttcctttagagaaaatggatgccccgaggactccccaccctggcttggggtccagaaaccagcccgccagagttaggggccttagggcaactgggctgttgttcccttgagccgactctggccctggcccttacttgcttttttagctctctaggcctttcccgtttgtgcaccgtccccaccctccaatcagctgtcctgcagccaacatctccaccctccaccttccattttccccccctactgcagcacctccaggcctgttgctatagggcctacctgtatgtcaactacccacagctggagcca

SEQ ID NO: 656544 - DNA, 478 bp, Homo sapiens
gcttccgccatctatcgtgcacgcaatgtggccgctccgctcaacagcaaaaagaacaaaaagagctctctcaatccatgtgccacattagaagagaaatgctatgactgtggttctcccgaccgcatatgtatgcattaaccatttactataaaaagatgcgcaatatgcaaactatggaagtcatcatcattaatgaatctttaggcttctaattgtttgcggcccattcaaaaaatcttgtatattcatttctccaagtccatacactactctataaattgtggaccaccgaggatctacggcaccactttcaagatcactaatataagattgggctaaaccagatttatctgccaattgatattgagtcattcccaattgtctgcgccaaagtaaaatcaatacaccaagcttgtgaacttcttgtcgaacttgtagatcttgacaacatacgataggattcatgctaacctct

SEQ ID NO: 656545 - DNA, 1156 bp, Homo sapiens
  misc_feature (1118)..(1118): n is a, c, g, or t
catgaacgaagtggtgtatgctgtgaccattgtagatgacaccaccccagtggtctgggtctgtgaggcatatgtaggagtctacgatgagaaaccctcgtcgaaggcctccgcgatcttcaacgactgtcttagctgagcacgtcagtgatgcaagtgctacgaggcgtgtatctatatgaaatccggacttaaatctaagacagaaggcctgtataccaagatactgccaaggataatagcgcaggatgcatgcgatgcgcaagaacgacacgcctggaagcaaggacttcagcatgtcactgcacagatagttcctagcacaagattcagtaccgttgtttcacttggcaccgacaactcgcagtatggcgtccgctggcttgcctgcgtggcgtcgcgaggactgataggtccctacctggtatgtgagatccaggctgaacgagagcgcactgttgcgccgagataggctgagactgggtcccgcgtaagagtggcttgtactcagacctagtgattatcctgttcgtaaatccaataggtgtttttggggtcccgtgattcgcacgagtcgaattccgagctggtcaggtcagggtggatataacccaagcgcggcaacatgaggctactcataagcgaggatctagccatgttcggtatgacgagcctgcccataggacaggcctttgtctcgccctgccacacgagccccatccgagcgggccctgccgccagagagggttgggcatgtctatttgagcgaggtcatttgtgcaaatccatgcttctgatggtaggcccgtatcgtcctgttggggctatcgccggctttggccgcacaatgaggggacttaccccaattcgaactccggccagcattgattggaccttcgagaccaaaacgcaataggaattttcaacttgaaaggatttaggggcgccaggtcgggaccgtgagccccgtgtatacatccttagtgcacccgcggcaggagagctcaggagttctaaagcgcatatctagaagataggcgcttgcgccaccaatatgagggcttaatttgacccccgtaacttctttcggagttcgacaaggaaaggccattcaaagnccccgtcatgaggggatggcgacgtttgaggtccccaa

SEQ ID NO: 656546 - DNA, 178 bp, Homo sapiens
agctcaaagaaatccactgatcacctctgtagcatcttcaggtcccatcttgacaacttcctctaattccccaggggaagagttgtttagagactccgtggatgccctagagggagcggctccagaagcttgccttcccgtcctctggtttacacacacggtccagccgactaggcac

SEQ ID NO: 656547 - DNA, 984 bp, Homo sapiens
  misc_feature (383)..(383): n is a, c, g, or t
  misc_feature (386)..(386): n is a, c, g, or t
  misc_feature (390)..(392): n is a, c, g, or t
  misc_feature (394)..(395): n is a, c, g, or t
  misc_feature (397)..(397): n is a, c, g, or t
  misc_feature (399)..(399): n is a, c, g, or t
  misc_feature (402)..(402): n is a, c, g, or t
gggggcaccccgcgggagacgccacgccaggttttcctccaaataaggcccgggccccaaagggcgccccctcccgtgggggccccacgaaaccacgtgctcgcgtctggtgagcgccccggatgtataggacagagaacctctagggacccatgtgtagggaacgcaaaagccccaacccccacccttgggcccaggccaaccctgcctcgcgtggcaccagggaaaaataaggtgggccaagaagaacccatcggggaaacacacccgagcttctggcaaccttcatgcctcatggtaaaaaaaagattaaccagggtgaacattctgatctgtaattccagggactgttttctttccaatggactgtttgttggtagaanaancccnnnanntnanagntaaaatgcatcatcagtcctagtcggcagttccttaagaatggactggcggcgtggttgagctgatatggaaaagctgcaccttcctgcagaagatcaactgaccattgctatcccaccgccaaatctcagcctgaggtataagtcactgaaggcaggtagctgtccatatcagatcagagaaacaggttttccagagcaaaaaggttaggaggacaatctagtgaaagaaaccgctcccttgatacagatttaatcccattgccccgatgaatgggagggcacaagaacccacatggcaccttctgctctatccagcaatattgcacgtcatcatgtgcgatcgaccaacttctgcccgttccatagggtcttgaactggtcaggaactgggaattcattcaagtcaccgaccttctgtaggaatgagcacattcatctcggaagatgtggccctgactatttcactatccagggaattcgttgactcaggctaagcatggcagccatctgtatttagatgtgtatggagtagtggcttggcactttacccaatactctgaaccttggacatccgtatctg

SEQ ID NO: 656548 - DNA, 1493 bp, Homo sapiens
  misc_feature (1367)..(1367): n is a, c, g, or t
ggaaggacctgggctctgggtaagatcataaagacccatggaaggtctctgtcgatgaggactaacacgccacctaatgaaactccccctaacttctggacgtctatctgtattggacgcagggatgactggaacggagacccctttgcagggacgtctgcgagggacacagtgagtgagctggtggctctgggtagtgtgacgcattgcccgtcccacatgacatagtagtcgagggactggtccgcacgtcttagttctcaccgtagccgacgactactgcgctagtgtactatacataacgcttttaccggtgctccctcgcagagaacgtatgcgaacaaccagttgagagacatgttggtcggggctatcccgtgggggatgtctcaaggactcttgaccgacattagcttcccttgggcctgcaggacaagtcgtctgccaacgcaacggactacagtagagctcataagcctgttgcgggtatgtaaccctataggcccggcgaaggggtggcattacctaagagggtcgcatcacctccatggaggtgtggtctcaacttcgcctacaacatggttttcagacttattctaaaactgttagttccgaaaattcccacgatggttgcgttggtcccaagcttggccgacgttccaactcccgacgggcgttccaatcggctcctcgcgtccttttggagaacgctgcctacggcaatcccaccaggtggccctccggtccgtttccgcctctgcccctggacctggcttttctccaccggtgcgggcgagtttgggaccgcgcctcgacccggccctcggcgccaccgctttgtgccgttccgtccgtgtgccgttgccctgcaattcccaagaaccccccttgaggttaccgccggccggtgtttgcggctcctaaccttgacgttttgggccccattgggtggttataccccccggcaagcgttgctgggcgtgtgaccacttggggtcctgaatcgcgaaggcccctgaccctttgtgcccttttctattgcaccctgaaccccttctccccttcttgtccgattcccctgggtttccctcgttaatcttggcacagccttgggcttcccccaaggcacctcgaggagctaagctattccagcgataacttgcgccaccgttcatcccccttgttgggcaaaggcatagagaccttcccctccctacacactcctggcgctctggcccgaactcccacctagcagccattacaaaaacccctacccctatgtccaaacctcaactacaccttggacgcgcttcgtcctacccacgccaccaccaccacccactcacctagcacacaacacaccatangcaaccacatacaacacacccactccccactcgagcaagacccctcacgcgcactgacgccataccagtaccactcctcgtatcacaacccgcccgccccatcatctcacaccacgaccgcccgac

SEQ ID NO: 656549 - DNA, 162 bp, Homo sapiens
cttgcgggtataagagaataaactgtttccatgtcactactcccatccgggtttggcctcaggatgggaggggcatccgtttccaaccatcggagccagctcgcatgcagaggtgcatggcgtgtgcatctttcatctacagaaaacttaggtcagctctag

SEQ ID NO: 656550 - DNA, 228 bp, Homo sapiens
  misc_feature (65)..(65): n is a, c, g, or t
gccagccaacacggtgaagtctccggggacggggtcggcgcccgcgctgccgctgcctacggtantccgccatgcaaggctggcgcgtctccattgaggatgctcacaactgttatttctcgagctgggacaagttagacagaccatgttttttgtctacgcatggacataggagggggagggaggttgaccttgttactgtggccatatatcttcctgatatcatca

SEQ ID NO: 656551 - DNA, 111 bp, Homo sapiens
cagaagcgctcagagtcactctagacaactggggataagtatatggagaaagaaacaaatgaaagaaacaaaacaagccaggagaagtggttcactcctgtaatcccagca

SEQ ID NO: 656552 - DNA, 224 bp, Homo sapiens
  misc_feature (133)..(133): n is a, c, g, or t
  misc_feature (198)..(198): n is a, c, g, or t
  misc_feature (200)..(200): n is a, c, g, or t
  misc_feature (203)..(203): n is a, c, g, or t
  misc_feature (213)..(213): n is a, c, g, or t
acccggggggccgcatccagtccagggccttttataacatggtgacgtcgattattaaacaggtgtgctgagttaactgtgctgcccaccctcgcaaaggagcccgcgcccgactgtggtggggccgtcggtntgttttggttgcctcttcctgaatgggacgcctggggctttcagggcaggcaactgggcatgttntntcnactaaaggtnttgtgagagga

SEQ ID NO: 656553 - DNA, 791 bp, Homo sapiens
ttagggctaggtactgaggccctgggtttccgaatctgtgcgcgtagagcgtccgtccagcaggcttgactggtgatgacggcgtcgcagcattcgtctccagatctgctcgatacctcatgtgggagacttcacacgtaatgcagcgggtcagcagagctaccccagaggcctggacaaaaccacagtacaagagctaacctatccctgagcctgaaggtccagatgccagctcaatcatgtctacgtgaaagtattacagtgttccctggtgccccctgctggatggtacatgccaccttaaggctggtgaacgacgacaagtccccctggatttgtgttctgtatcgatatggttccttttccgtcaccactggacattgtccagggtattgaaagtgcctgagatcctgcaggctgtgcctgtccggtgatgtggggatagcatttgagctgactgtgtcctgccaaggcagtggctgcccaaggaagcctgcataggagatctcatcgccagggtgacagccccctgcccagcggctagtgccagcctgtgcatacccagtccagcctgtccagctggttctgcacagatactgaatgggtgtgtcggggacatactggcctcaattgtgtctctggcttgataccaacagcctggcagtggtcagaagccagcttatcattgcctggtcaaggaagcaggcctttgggcagggtccgctgatcgtgggcatcttgctggtgttgatggctgtggtctatgcatctctgaatataaaaggcgcaac

SEQ ID NO: 656554 - DNA, 934 bp, Homo sapiens
gggctgcgtcgaggctgcaaggcacacagatggcggactccacaggagataaaagtccctcgataaacttattcggtggtgtggaagaacttgatagtaaggactaagaacaggagtaggcgacggtactgtgagctggtgcctcttgatgatgatcgaacgatatgacacttacaaggtggacaggcatgattattggggcaccatggacaaattatgaagacgagaatatatagcctgacaaggtagaatgtggcacctaaatagcccagaagctcctccggcagttagatttgtaacaaacaattaatatgaccggattaaatatatttccagcgggactggtggatgcccggagtcataccagtgttagcaaaactggcaaatattcttactatagcattaaagtggtacttcaatgagctaagacgtctaagtgactgtccagagacagtatgaggcttccacagtcaccagtagggatcaacatacaagaattaatcctgaggggatctcaaacttgtctttaaatcaagaagcttctactcatgtttagtgtcttggattaaattatcgcaatgcgaattcacacttaaggtccaacgacctcccagccggcaaacatgcaccggacacttcgccagacattttttatatgtgttgacccccatagtgttcagggtaacggccgaaaaatggtcgccaagtgttaccctgaaaggagcggcggttaacatagtcgcagtctcgcaaaactcgttacgacgaaggtgcgaacgtcatgcaggagggtttccaacaatacaaagggtctcgcaagagtgaggttgctcttcttgtcttctcgtccttcgtcatcagctctctgctcctcttatctcttcgtccccggacatcggtacagagacacacaatcataacccgacaaccaagt

SEQ ID NO: 656555 - DNA, 500 bp, Homo sapiens
gagcataaaaaaattcatataacattgaaacttccttgtttaatgaggctgaatataacaacacgtaccttgattaaatcattctctatatgtaaatagaggccaacattttataggggagctcagggggtcaccacggcacaccattgatgaagccaatttccttccttccttcctttactaatgcagtcaaaaaatgtagaaagcaatgttccctaaaacagctatagagaaaacatttgctcagcttggatagttcttaatataggccatataatttctagcctatttaattacataacatattttatgcttcatgaccaattacattaatagcttaatacagaagaatattatcctctcttgatttgattatgcagccacacaatatggtatatttggtacttaattatcatcatccattgagcaagctgctgtggtagaataaacagagagctgggactatgcaggctgtgttattggctttagatggttttgcc

SEQ ID NO: 656556 - DNA, 573 bp, Homo sapiens
gggtcccgcgcccaggtgggaagaggccggcgactggggtgaccgcggggaaactgaggcagaggttgagccagaccctgaagccttggccaccgtgtttttggggcggagggaggagatgggctccaaggcaaagaagcgcgtgctgctgcccaacccgccagggcccccacgggggcagatctggaggatgtgcgggggcgccggagaggatcaggtcacatcctggcccggaagacccccagtccttcaggatatggaggatgcggaggccggagagcagtctacacaaagcggctagtggtgcaaccagggtgagcaggcgggcaacgtgctgaggcgaggtgtgagctcctgcgggcggcgaggacctgagcggggtggccagatgagcaggcagcattacggagcgaggtgctcctcaggctgacctcggcctgcggttggcggccaggggctgccggttcctgggtcgcgccgatgatcaggtccgccctggtgtgcgggcctctgtgtggtgggtacgcgtctctgcggtgtggaccccatgtcctgtgctggcctggttacgtg

SEQ ID NO: 656557 - DNA, 413 bp, Homo sapiens
  misc_feature (42)..(42): n is a, c, g, or t
  misc_feature (44)..(44): n is a, c, g, or t
  misc_feature (391)..(391): n is a, c, g, or t
gagacagtctcactctgttgcctaggctggagtgcagtggcngntactcagctcactgcaacctccacctcttgggttcatgagattcttgtgctccagcctcccgagtagctgggaccacaggcacacaccaccatgcccagctaatttgtttttatttttactagagatgaggcatcgtatgccgcccagactagtctcaaactcctgcccccatgcaatcctcccgtctcagcctcccaaagcactgagaccacaggcatgagcaactgtgcctgggctctccttctgtccataaaaatttaaaaattaatattgggtgatagagctttttttttaaataaaagtgagctaatttaaagtaaacatttttgggtaaaggagtacatcntttggggccaaattttcacagg

SEQ ID NO: 656558 - DNA, 339 bp, Homo sapiens
ccagttacacagctcaggaacaagaatattttctggctaggcgaggtagctcacgcctgtaatcccagcactttgggaagccgaggcaagtggatcacttgaagtcaggagttcaagaccagtctgaccaacatggtgaaaccctgtctctactaacaaatataaaaatttgccaggcgtggtggcacaggcctgtagtcccagctactcaggaggccgaggcaggagaatcgcttgaactcgggaggtagaggttgtggtgagctgagatcacaccactgcactccagcctgtgtgacagagtgagactccgtctccagaacaaaaaaaaagggtacc

SEQ ID NO: 656559 - DNA, 122 bp, Homo sapiens
  misc_feature (114)..(114): n is a, c, g, or t
  misc_feature (121)..(121): n is a, c, g, or t
cccttgtgccctgttgataggaatgtaaaatagtacagccagtgtgaaaaatagtatggcaattcctcaaaaaatgaaaaatggaattaacatatgatctaccacttctgggtntttaccna

SEQ ID NO: 656560 - DNA, 920 bp, Homo sapiens
agggacggttccaggctccggggcccaagctggcgccatgccgggaatccgtcggcaccggccagagctacgtgacgaagggtgaagccaaggacattccgagggccaggtgcaggcacgctaaccagggctgtacgaggactgggccggggccagtcccgcacaggagcctcgggcagccgtgctgtcgggccttggcggccgcactggagcgccggaactctaccgtggcgtagaggctggagaggcagggacacggtagctcaagcctgcggtaggcggaggctggagactgagcgcaagacgacttcgggcctggggtgccccgggagcaggcccaaggccacacccagccaggtagccgggctgagaggccctgtgctgcgcctagcgggagccgctggagtgtgacgggctgtgatgtgtccggacgagcggccccggcttgccttagtgtccctgctggctcccgccctggcctacggcaacactgtggtcataggtgcaccagtgcggcctgtcctcatgctggccctggaggtctgccaggacatggccaccgtgttcccagcaggcactggccaacgtggtgacaggagaccgggaccatactgacccgctgcctggccttgcaccaagacgtccaggccaatgtcggtactttcggactcagccaagggttacaccagtttgttcgagtgggcctcggcaggaaacctcaaaccggagtgggagagcaggggctgccgagcgggcactgggactaggaggccgagggggcaggcccagagctggggctgcgagtggcgcggaccaaggccctgtggctgcctatgggggactagatgcctgagcgccacagactgcagtttggacaccttcacacgaaggggagataaccccagggacacctggagtct

SEQ ID NO: 656561 - DNA, 652 bp, Homo sapiens
ttctcgaggatcctcgatatggatgcggcatatagcttcactgtagttatctgtaatggagacagacttctttacttatattgtatgcaaccaacctctggtagcttcactatttcttctgcagcttcctcacttctctcggctttacatgaattgcagagcgtgggagccttatctgaaataggctttggcctaagtgtgcctggttggatcttttatacagaccactaaaatctttcttcacatcaacagtactaaatgccgtttacttcttatcagtcatttgctcactggagtaatcatttacttttagttccctttaagaactttgcatttgccttcacaagctctggctacaatgattggtacaaggacgcccagctttcggtctgtatcagcttttgatatatcatcttcactaagacttaatcatttctagctttagatttaaagtgagagacatgcaacttttcctttctcttgaacccttagaggccactgtagggctgtacttggtctcatttcaatattgttgtgatccaggaacatagatagacacgttacaggcccctcccaaaggcaatgggcagcaacaggactggcagttgtagcacagccgactttataagttcctgcttaatggggtgttgtg

SEQ ID NO: 656562 - DNA, 495 bp, Homo sapiens
ctaggagtggagcctctagcagattgtcagctcacatgataggtaagataagagctggtttgacagtacaacttcttactagtacgcgtgtcaagtctactagggtaatgtgaaaaaattaggtatgagtcccatacaccgtgctgagatatagtctacttacagcagtacaaatggctcttcacacacagggcagcttatactaatgttctcaaaaccaattaatctccagctctagcctcatttaataggtttttacttactttatttattatttatagatggggtctcgttctgtcgccaggctgagtgtaatgacatgatcctccagctcgtacaacatctgcttcctgggtcagggcgattctctggctcagctcccaagtagctggactacagggcgccaccaccacgccagctaattttgtatgttagtagagacgggttcacatgtggccaggctgtcttgactctgactcaggttcactacttggc

SEQ ID NO: 656563 - DNA, 138 bp, Homo sapiens
accggaaaggtaagctgtactgcgatggctatgtggctgattgaagagtatgcaatgacgcgattttagtgtctgttttgtcgtagtgcagactgtgagcttgtatataacttattgcctccatagtgtgcatagtac

SEQ ID NO: 656564 - DNA, 265 bp, Homo sapiens
cgtgccacacacctgactaattttggtatctttagtagagacagggtttcaccatgttggtcaggctgatctcgaactcctgactcgtgattggccactcagccccccaagtgctgggattacaggcatgagccaacacgcccgggccactctgccattgtctaagccacctctgaaagcaggttttaaccaaaaggatgagcgcagaactcttccagaaccatcacctttgggaacctgctgtgagagacctgagcaagccagg

SEQ ID NO: 656565 - DNA, 962 bp, Homo sapiens
ctacaaaccacaaagacattggaacgactatacctaattgattcggcgcatgagcttggagtcctaggcacagctctaagcctccttagttcgagccgagctgggccgaagccaggacaagcttctagggtaacgaccacatctacaacgttatcgtcacagcccatgcattggtaataatcttcttcatagataatacccatcataatcggagtgctttgtgcaaacttgactaggttcccctaataatcggtgcccgccggatatggctgtttccccgacataaatgaacaataagcttcatgactcttaccgtccgcttcgtcatccgtacattcctgctcgcagtctgctataggtggtaaggccgtgagacaggataccagtgttgaactagatctagcctcccttagctagagggaactgaatctactccacacgctggtaggctccgggtaggacgcgtaagccagtgctttcttcctgtagcgacctaggacgaggtggtgctcctgctatgctttagggggcgcatgcaattctcagtcatcaaacaattatgcaatataaataaaccctcggtggccgataacgccagagtacgcaaagcgcccctcttcgtctgatccgtcctaatcacagcaggtcgtagttctcctatctctcccagtcctagctgctggcatcaagtatactagtaatcagactgcaaagcttaacatcaccttcttcgaccccgccggaggaggagaccccaattctataacatcagctgatcctgattatttcgggtcaccctgaaagttaatatccctatctaaacagggtttggaataatttcccctgttgtggacttactcactcccggggcaaaagacgccttgggtacacagggtgggcctcgggaacaaacacacaggggtccgcagaggattcggtggagcgccaaaataagggggata

SEQ ID NO: 656566 - DNA, 314 bp, Homo sapiens
  misc_feature (230)..(230): n is a, c, g, or t
tggggggggggggagaaaatctcccgttgcaggtacccgggatcacatcctctgctcagtctatgcctggtaatttgtatttgtggagaggggatatctcgccacgttgccgagtgttgaagccagatcatgcaattgggttccttggatttccgaaatagaacccaatattctggctttacccctggagggatgcagatgtaccttctctcagtgcgatgaactcaggnctccacggtccctggagctctaggaaaggtgggcgcgatctcgcgcccacacccagtgctctgggtcataagcctggatctgga

SEQ ID NO: 656567 - DNA, 657 bp, Homo sapiens
atcaaatcagtcggcatatatgcattcatagtatgtacgtatagatgcttcataaatatgtgtactgagtgaaattgcgcctgagtactctgcactcattgcatttgccagtgctcaccaagtaatacatagtgctggatctctttgtctgatgttctcgaagatcatactctgaaagtgtttggtccatagttgtgcatgtatcgtgtattctaatgcaaccgagtaggtcctgcagtctgtagactggaattatcataatttacgccgctgtttcgtgttcatactgtctatttagtttattacccgtgtatttattttcttattcgtacttgttgagggtttgttgttgctttccgttttctagatctgtaagttgaagtcttaagattattaagatcgttcttcttttctattatagccatttaaagctacaaatttgccccatgtcttgctttatttgcatcctacatatgtgctcctttctgattaaaagctctctccttaaagatatatagtaccctgactcttgtagtattttgtctcattttctgaaacaatacactttagtttttctgtgttaagggaacttgcctttaagctggaggtcacgttgcctctgtgtgtgtgtgtaatgactttaatccaatatttctg

SEQ ID NO: 656568 - DNA, 142 bp, Homo sapiens
gtccttgcttgctgaagtgaaccagttcccagaaagacaatggtgagccatcttggtttcactcgcggttagctgaggtctggggccacacagggggtttcacaaacctcgggatatatcagagtttatgagaagggaaaca

SEQ ID NO: 656569 - DNA, 193 bp, Homo sapiens
tacggatctatctacgagcgcactgcacccagctgggcggcagagcaggactgtcttaaaaaaaaaaaaaaagacttaccaaagactgggcgatttacaaaagaagaggtttcttggctttagttcccctggctggggaagcctcacaatcatgggggaaggcaaggaggagcaatttggtttttacccgcga

SEQ ID NO: 656570 - DNA, 330 bp, Homo sapiens
cgtgcagctgacctggcatatctctggctaccagctagccaccggcactctacaaacacctggacatccgtacgccctgcaactcgacctcacggctagcgcaactagctatacatgcattcccactcctcggccaaaagcaaaatgcgttcaacaaaaaaagtagatcaaatcctgcaccatggaatcctgctaatagacaaagtggaagcgcatattctctctgttacctagcactttcaccccttctactgctggcgcaacacgctcacaccgctctcctcctgcccagctacacctcaaccccctcgcactgaccttaagctactc

SEQ ID NO: 656571 - DNA, 122 bp, Homo sapiens
gctgtatgtatgtctcagagtattggctagctgtacatatatcattctaactaatattatctttgtcaaacaaaatgtcgctttattataaatgatactattaatagaagttgaaatgccag

SEQ ID NO: 656572 - DNA, 182 bp, Homo sapiens
gatacatcatcaagactattaccagtgaagacgtggccgaaatgcacaacatcctgaagaaataccaccagtacatagtggaatgtcatgggatcacccttcttcccagttcttggcatgtacggcttaatgttgatggagttggaatatatgtgatagttacaagaaatgtattcagccac

SEQ ID NO: 656573 - DNA, 127 bp, Homo sapiens
tgccaaagcggtagtacaatgcccaatctcagtgctggtgagacaagaggggggactcatatgtccggagggaggctctggagggagacatgccctgtggtcaaccctgacttgtgtacccacaccc

SEQ ID NO: 656574 - DNA, 122 bp, Homo sapiens
atccggggtaagatgaagggaagagggttgtgttggttaaggacgacccttgctctgaccggaagagaagtccctatacccacacctgcctgtcactgttccctccacctttcccactgcgc

SEQ ID NO: 656575 - DNA, 943 bp, Homo sapiens
tgcagctcaagctcgatggagatcaaccccgagatgctgaaacaaagtgctgttcccggctgggagggtcgcccggcagtggagcttcgtggacgtgctgggggtggaagaggagtctctgggctcggtgacagcgcctgtctgcgcgctgctgctgctgtttcccctcacggtccatgatgagaacttcaggagaaagcagattgaagagctgaagggacaagaagttagtccgtaaagtgtatccgtatcatgaagctgagcattgggaagttctgtgtggtgagaatcggacttattcacgcatgttgtcagagtaatcaagaaaaacctgggatttgaggatggttcacgttgtgaaacagttatctttctgaaagcagataaaatgtctcctgaagacagagcaaaatgctttgaaaggaatgagggcatacggggagccatgatgccgtgggtcaggaaggacaatgtcgggtagatgacaaggtgaatttccatctaattactgtgtaacaagcgtggagtgtgccagctctatgaacttgatggacgaggtgccttttccggtgaaccatggtgccagttcagaggacatcctgctgaatgacgctgcaggtctgcgagaagttcacgagtcgtgagctatgtgaagtcgcttactctgccggggtcgtctgagagctaatgtttgtggaggactgtggtgattcccttccgttagttgaatattttgccgcatgagctaaatgtttagctgggaagagggtttatgttggaaagctacgttagcatccggattagaggagggagtgcctggcatggggtaggaacaggagagttcacggtgtgtgtgaaagaaggatgtgtggaaacacagggctggtacaggagtgggaaaaagggcacggactgagtgaaatatgaggaatatatataatac

SEQ ID NO: 656576 - DNA, 220 bp, Homo sapiens
  misc_feature (56)..(56): n is a, c, g, or t
taatatgaagctatcaggactggatactagtacctttgttacaattaaagagaagnaattattccattctttgtttttgaatcaacatgctttacaaactaaggagtcaaataaacccaattctacttagtactctcttgggacaaagaaagtaagtgagataagtgaggcagccaatcactaaatataggggaatgaataaaaaccgggaaccgggttg

SEQ ID NO: 656577 - DNA, 558 bp, Homo sapiens
ccccacgatggccttcattacttacgtgctcctggctgggatggcactgggcattcagaataaggttctccccggagggtgctggtgcctgtgtgcaagcacagagctggtgtgggtggtgatggatggtgctggccctgctcctgggcctctacctggccaccgtgcggcagatgacctgagcacctttcacctgctggcctacagtggctacaaatacgtgggaatgatcctctagtgtgctcacggggctgctggttcggtagcgatggctactacgtggcgctggcctgtacctcatcggcgctcatgtacttgcattgtgcgctctttgcggacagcagtccctggagaccccgaccagcatggggggccccgtcccccggcagcgtctccagtctacctgacctctgggagctgtagccttccagcaccctcatcatatactgctgacgtaatgcacctggtccggatgaccctcgatgggccccagatggcactgagtctatccatttcattgaagaatttgatttccttgaaaaaaacaaaaaaaacggg

SEQ ID NO: 656578 - DNA, 257 bp, Homo sapiens
gatatacatagatcacagctatttaacctgttcctcaagacagtgaggctgtgttggaaataacccgcctctagtgctgttggtatgcaaggcagcggtgcttaatcaatatttcctgtgttcaacattcgccaaaatataacccatatcctgagcaccaatctactctccatttacaactaggtggaaaccctagactcatagactcttagaaatgacccagaaataggagcataaactttataaaacagatccgc

SEQ ID NO: 656579 - DNA, 353 bp, Homo sapiens
tatgccaccttgaagatgttataaattggtgagtctgggcattgatctttactagagaagaagcccacttggctgggagagtaaagaaaccacatctgaattctcttgtccagcactcagctttgccacgcctgtgtgccactaatgcaagctccagcaggcagtcagtcatgactatcattctctctttataaataaacggaagcccttaaaggtgacgtgacttgcccaaggttacagaaacatggcagtgagtcagatggaactgtgtgtgtttggaggaggaggagaagatgacattataaacaaaaggcagagagtgagggacagatccacacctcttctgaagttaa

SEQ ID NO: 656580 - DNA, 916 bp, Homo sapiens
tcagaaaaaaaataggtctaggtacgaggctcggtggttaatcggccgaggccagctcgcagctggagatctgagaacgggtagactgcctcctcaagtgggtccctgacccctgacccccaagcagcctaagctgggagtgcaccccccagcactgacacctcacacggctgggtactccaccagacctgcagctgagggtcctgtctgttaaaaggaaaactaacaaacagaaaggacatccacaccaaaaacccatctgtacatcaccatcatcaaagaccaaaagtagacaaaaccacaaagatagggacaaaaacagagcagaaaaactggaaactctaaaaagcagagcgcctctcctcctccaaaggaacgcagttcctcaccagcaacggaacaaagctggacggagaatgactttgacgagctgagagaagaaggcttcagacgatcaaattactccgagctaggggaggacattcaaaccacaggcaacagaagttgaaaactttgaaaaaacatttagaagaatgtataactagtataaccaatacagagaagtgcttaaaggagctgatggagctgacaaccaaggctccagaactacgtgacagaatgcggaagcctcaggagcagatgcaatcaactggaagaaagggcacctcctaggaaccaggatctgtacttggtgtcccagtgatcaagtacaacagactgtccttcctgcactcaaggagacagctccataagtgcacgagcttacactgacactgcccaatccggggaactatacacagatattgctataacgtcacattggaacaaggccgggacaagctatgatcccccggtcggtgaatcgccacgtgcatcgctcaaagcataatctgccactatatcgcccaaccaaggc

SEQ ID NO: 656581 - DNA, 120 bp, Homo sapiens
ttagagaatacatggatgtgcatgaactccacgtcgtgagctgaaagtacagactgcggggtgaatatcctttgcttctgagtgttattaacaggtccttatggtcgtcagaagatcgag

SEQ ID NO: 656582 - DNA, 1135 bp, Homo sapiens
  misc_feature (760)..(760): n is a, c, g, or t
gagatgcaggtgagcaagaggatgctggtggggggcgtgaggagcgtgcacaaaccgcatgtgtcttgagggcggagccgatcctgctgctggttgctgggcacagatgctggtaggctcggccacggtgctgccgcgtcctcgctgcgatgtgctcacgcgccaggaccgcggctgtgctgtgccagcgcaagcgcttggtggcagtccccgagggcttccccaccgagacgcgcctgctggacctaggcaagaaccgaatcaaaacgcacaaccaggacgagttcgccagcatacccgaacctggaggagctggagctcaacgagaacatcgtgagcgccgtggagcccggcgccttcaacaagcatcttacaacctccggacgctgggtctccgaagaaacacgactgaagctcatcccgctaggcgtcttcactggcctcagcaacctgaccaagctggacatcagcgagaacaagatggtatcctgctggactacatgtgcaggacctgtacaacctcaagtcactggaggtaggcgacaatagacctcgtactaaaaactactacaccgtgccttcagacggcctcaacagcctggagcagctgactcttggagaaatgcaacctgacctccatcccacaccgagcgctgtacaacctgcatggcctccatcgtcctgaatgctcagaaacctcagaaatacaatgacaatacagagaaataatccttacaaaaggctctacggaactcacganctttaggaacatccccttggctcatttggaaccacagaagaccaaaatatgatataagagccacaaattgacatacccggccaaaccaaaactaggaaatgagacgagaggacacaaccgggcgggtgcaccaccaaaggaaaacatcgcggaacagaaagacatgcagcaaaccccacaaacacaaaagaccacagagacagaggacgcacacgaacaaccagagggcgacaaatgaggtggatcaccacgacgccaaaacaagcaagcagaatcatagcagagacgcaccagagaacacaacataaagcgctcaaagtcgaagacacacaccacaaacaacaaaatcagaacagagaaaaataagtgaaatca

SEQ ID NO: 656583 - DNA, 209 bp, Homo sapiens
tcagcaggtgtcgtggctaggcactgtgtaccaacaacttgagagactgaggtggcaggaggattgcttgagacctaggagttaggggctagcagtgagctgtgcatcgtgacaccgcactccagtactgggcaacacagacaagaccttgatgtcacaacaattttctattacttacaatctaaaagagtttcatgacacctcagaga

SEQ ID NO: 656584 - DNA, 274 bp, Homo sapiens
  misc_feature (48)..(48): n is a, c, g, or t
agaaagggaaaaggtaaggaaaacatatttaataaaataatgtcagangacttcccaagtcttgggagagatggacattcaggtccaggaagctcaaagaaccccagattgattcagcccaaacagatcctctctgaggcacattatagttaacttgtcaaaagtcaaagacaaagaaagaattttaaaagcagcaagagaaaagcattaagtcacatataggggaattaccattagctatgaatctccattagactatcatatttctcagcat

SEQ ID NO: 656585 - DNA, 89 bp, Homo sapiens
ggcacgagctggagaataaattgcctttcctaaattcctctgcttcgctcctttcctggcgttgctctggaaccttgttggtgtctgtg

SEQ ID NO: 656586 - DNA, 595 bp, Homo sapiens
gctgcggttagtgatcatagaggatcccctcgcaggttctctacctcagtgatctggcaaaccagcagtgtcccacacggccgggtcagcagctggcggcccctccacctcactccagctccatccgggcggcaaggaaaggtggggaggtcagcgggtctacccacagtagaggcccggcactgaccatgaggccacggcccacggccaccatatcatccccatctgacagagggggactctgaagggacatgagggggtgcccgggcataaacaggcccctgactccccacacctgccagtgacgggttatgtgataacagatctcagactctcgggggttcacttccctcacgtgtcaggggggggtcaaagtatgtctcagggtcaccgggagaatccagggagatgcaaggacaagggcccttcgcattcactcattcattcgacaaccattcagcaagcatgctgatgtgatagtgatccctaccctggcggagactcagacaaggagcaaagaatcacttgatacaacaagtaacaagcagggcttgccagaaaccaacaatgagtccaggagccacaaagaagagac

SEQ ID NO: 656587 - DNA, 242 bp, Homo sapiens
atggcgaagcagtatgagctgggcctggggcagcctcccagtcgggcttttggtctacccgccaaggacccccagtccccagcagactggtccagcgggctctctagcaccattgaccggcacccctgaggcgcttagctgccgtgagtccccatggtacactggccctgagtccatctgacctggaacaggtccatcaactgggctgagctctgagcctgtcttgacagccgctccttgac

SEQ ID NO: 656588 - DNA, 759 bp, Homo sapiens
tcctcattaaaccttttaaagtggggtctcaaactcctgtgacaatttttgggccaatttgttcccattaaaaagtcctggtatttcaaaactaataatcttaaaatgccacacgcaaaaaaaaaaaccaaggtggtccaaaaattttctccttcccttctgaaggttacgatgcttggttatcattacccagtctttatactactaaacttaattggccaattgtgaaacaaaccagttctgaaaccgttctcccaccactgataaaaaggtgggggtggcaggtataagggataatatccattagccttctgagctttcggggcagacttggtgacctggcccagctccagacagccttctggctccactgcctttgatgacccccaccgacaatgtgtcgttgtctcatatcacgaacagcaaagcgacccaaggggggatagtctgaaaagctcctcaacaacacatgtgggcttgccaggaaccatatcaacaatgggcagcatccccagacttcaaaaaatttggggccatctcccagtttttaaccagaagggggatcaatcttctcccttcagctcagcaaattgggcttgcaatgtgacccgtgtggcactcccaatacgggggcatagcccggacgctaaattgggcctggatggtcaggataatcccccttgagcatgtgaaacccaggctgttccccatggcggggtcattttgctgtcccccagcaaggttgccacgaagagattc

SEQ ID NO: 656589 - DNA, 176 bp, Homo sapiens
ggctgatctagagtatccccgctccatccggcaatcgaaccactgcgccggtgcaaatactaatacttataacgcattattttaaactgatgacagcttaacacaattgcagaaacaaacttgcaaaaagaaagttaattaaaactctacactttaactttgtccccggctgccat

SEQ ID NO: 656590 - DNA, 250 bp, Homo sapiens
  misc_feature (76)..(76): n is a, c, g, or t
  misc_feature (182)..(182): n is a, c, g, or t
  misc_feature (189)..(189): n is a, c, g, or t
  misc_feature (208)..(208): n is a, c, g, or t
ccgatgaagatgccgttcggtagatgatgatgccctgcacggagacactgaagccctggcacagagcgcgagttcngaggcctgggagactgcctggtgaggatcaccaagtccgacggcatccggggcctgtaccagggcttcagtgtctccgtgcagggcatcatcatctaccgggcggnctacttnggcgtgtacgaaaacggcntcttcatcgggggtaccgagctcggatctcgcctcatggtca

SEQ ID NO: 656591 - DNA, 790 bp, Homo sapiens
ggcattcctgtagctgggaggcgtgggctccgagatggcccactccctggcctaatatgagctcgctctactgtctctttagggcctggtggctatccagagcactccaaagattcaggtttactcacgtcatccagcatagaatggacagtcaaatttactgaattgatatgtgtctgggctgcatccatccgacattgaagctcgcttactgtagaatggacagagaatctgaaaaacagagccattctgacttggctttcagcaaggactggtctgtctatctgttgctctacactgaatccacccccactgaaaaatatgactatgcctgccttgtgaaccatatgactgtgacacaggccaagatagttaagcgggatcgagacatgtaagcagcatcatggcgggtcgaacatgccgcatttggattgcatgaagttcaaaatctgattgcttgctctttaatattgatatgcaaatgcactgacactttatacactgtacggttataataatgttaacatggacatgatcttatgtataattgtactccgagtgctgactccatgtgtgaaatatccgagaaagttgcttcacacggagctatagggaggctggcgactaagacgtggagagacccaattcttttattcacaccaactcttggcacgattgaaccttaagctgttgactccaactttgtaagatcgggaacccccttaataacttcaacctcatcttggttgagacggggaaatccaatataaccgtgttgggaagtgcttag

SEQ ID NO: 656592 - DNA, 201 bp, Homo sapiens
ccagctggagatcaacttcaacacgctgcagaccaagctgcggatcagcaaccgatcctgaccttacatgaacctccgaaggcatagcgatcgtgtacggcataattgcctgtgtgccctgggtcagaaggctggcagcagagtctgtagaaaggggtttacgagggagtgcgtatgtctcaattgagatttcggaagact

SEQ ID NO: 656593 - DNA, 108 bp, Homo sapiens
atatacaattctatacaatgataaatactctgcatataattagtagaaataacttctgtttacctagttacaataaacctatgtgtggaccaaatgttatgcagacaa

SEQ ID NO: 656594 - DNA, 145 bp, Homo sapiens
tcacgatccctcagctcccccacccacccaggaggcaggctaagtaaggccccatcactgagtccgggcccagagagaaggctcgggcactaagtatgtggttgcctgtgcagcagtgcaggtgagcacacttggcacactgcag

SEQ ID NO: 656595 - DNA, 599 bp, Homo sapiens
cgtttttctgagcaccttcgcagatggctggccacactcccaccacagactctttctagagagtccgctgggcgctggcgtttataactgagagttttctgaaacgcacaaggcgccccgtatattctctcccacatggcgtatttgtaaagagaacacaaggtggcgctgttaatcttaattgccgggtggtataaggggagataatctcttgaatataaacttggaggcccacgcacaaagattatccacaaggtttgagagaatgcctttctttgttcttcacatgtctgtcacagccacgcacccacaaggcccttgtttgggcaccataatcacgggcgtgtaatggagaaagagtctctccggacccaatcacgaatgccaaagctgagaaagaggagttgtaaccacaaattttcttggctggagatttgagaagcgttaaaactcctcgtggagattcaccacatccaataccacgcttcacgcttttgtcacttgcttttatgtataattagttccatttgtaaaagggttactttcatactccttatgtaccagaaatcacatgaaaaataaaggttccataaagccca

SEQ ID NO: 656596 - DNA, 121 bp, Homo sapiens
ctcttcgttccagatccaaataaatgggacagagtaataaaattttagttataactatgttctcatctcctaagtatctcttcagagtctgaccgtcagtaaaacacacagaattgtgttg

SEQ ID NO: 656597 - DNA, 132 bp, Homo sapiens
attacctggcatatgcacaacacggcacactaggtggcatcccagtctaggcacacgtgtgaagcactactataaacttgagtcatcccgacgttgatctcttacaactgtgtattgttaactatataggca

SEQ ID NO: 656598 - DNA, 181 bp, Homo sapiens
accagcatagtgatagtacaggcatacctattgccatgattataggggcggagcaaccacacaatataggatcctcacactagactcatcgcgtcacccttatctccctggcacagcagaatacacattagactacatgctcttatctggaatattaccacacagaaccctgacccttact

SEQ ID NO: 656599 - DNA, 131 bp, Homo sapiens
agcgcctcacgagcgcctgatccagcggcacattcggctcggtccggcagtcaccatgtaggtgccttcgaacaccgcacctttatcctcgtctgccgaatcagatgcacttccggcgtgcactgcgcgcg

SEQ ID NO: 656600 - DNA, 123 bp, Homo sapiens
agagggtaagggtggggtattttgtattagtaagggtggggaagcgagttgactgtagtgagaagaatatcagtgctatagggcttgtagaggtagcgatgagagtaatagatagggctcagg

SEQ ID NO: 656601 - DNA, 1138 bp, Homo sapiens
  misc_feature (17)..(17): n is a, c, g, or t
  misc_feature (275)..(275): n is a, c, g, or t
  misc_feature (284)..(284): n is a, c, g, or t
  misc_feature (318)..(318): n is a, c, g, or t
  misc_feature (921)..(921): n is a, c, g, or t
  misc_feature (950)..(950): n is a, c, g, or t
gaggtctggagttcaanaccagcctgaccaagatggtgagaccctgtctctactaggaatacaaaaattagccagttatggtggcaggcgtctgtgattccaactacttgggaggctgaggcagagaattgcttgaacctgagatctcggctcactgcaatctcctgcttcctgggtttaagcgattcccctgccttggcttcccgagtagctgggactacgggcgcccaccaccacgcccggctagttttttgtattttagtagagacggttcnccatgttgnccaggatggtctcgatctcctgactttgtgatcngctgcctcagactccctaagtgctgggattacaggcatgagccaccccacccggtccatatagtacaatcttaacccaaaaagtgtgtgtgtttgtgtgtgtgtgtgtgtgtgtgttttgtttttgacagagacatgtaggagacaggtggaaaatttgaggctgatgaaccaaagagaatttcgagtttttagtactatatgtggttgatacttgaagccatggaaattgccaaatttatcaaagaaaagggattgtgtggccaacagaatgttagagaaatttcaagagttgagggcaaagagaaaaatctagagaagaaattacctgtaatgtagaagaaaaagtacagttcactgaagccatgtttcatgcaggatgaagtctaatcctatgcagggatcactgaaaggtgactattgagaaaaagttattattggctgtgaggaagtttcaatagcatagtggaatagtaaagcaggtcacagggaacgaggagagaatctcctctgaggaagtgaagatgagcggtagctggataggataccctggttgaggttgttttttaagttatagacaactgagtagttttgtagaggagcntcctgtgaaagagaacagagttgaaggtnaaaaaacccaggaggaaggaggaggagattgaaatgagaacatgagtaaaatgggaactagagaaaaaggaatagttaatgagtgaggatagatggagagatgttgagggaattcactttgacttgtgagtaaatcatattagaggggaaaaaggttcagatccaaactgggaacgacaggaaagtaa

SEQ ID NO: 656602 - DNA, 231 bp, Homo sapiens
cctcccctagggggggggtttgccccccaagggggggttttttccctgtttttcccttttttgggggggcccccggggccccccccccgccggaacccttttttttttttttttttgggggggggttttattttttttcccccccccctttttgggccccccgggggggcccccgggtttttgggggcccccccggggcccccccccccgtccccccttttttttttgtta

SEQ ID NO: 656603 - DNA, 311 bp, Homo sapiens
aaataagtgatgagaactggaagggcatcaggtgcccaaagctaacactaccagcactttggaggcagaggtgagagaattggttgagcccaggagtttgagaccagcctgggcaagatgacaaaaaccccatctctaaaaataaaaacaaaattagcaaggcacagtggcacgtgtgcctgtagtcccagctacctgggaggctaaagtaggagtaacccctgggcccaggagtttgaggctgcagtgagctgtgatcacaccactgcactccagcacctgggtgaaaaagcaagaccttgactctattt

SEQ ID NO: 656604 - DNA, 717 bp, Homo sapiens
ccacaatctgctgagctcgcatgttgcgggtgggtggggtcccgtgcgcttccccctgacgcctccaggccagccgtaggtccgtatctgccctgtggaattcaagcctcgcatagcttcgtgtgcggcgtatgataagcctaagagtggatgtggtccggcggttcactggaggcggccgagtaacgttgcggtcgtgatcctagggtgccagaaagggccgggttggagggatatcgaggagaatcgaggagtttctgaggaccatgcagccacctgcttgctggaaggtggaagtgatagaggtgcaccctgcagtgcccaggaatctaggacgtgatgttgccccatcaaggcgcagggcatccccaacactatgctgctgagtgacagaggaaactagagaagttgattagttgccaggcggccagtttttcttgttcatgagtgtgtatttatcgttgatctatagcccggttctccgaacttctgcctgtgtgtatccgccgaaccgcttgacccaagtgacatctagaacacacgagtgtttgaggctgcggtattcatgagtatttggtgttctcattagcaggtttatgaaccgtctctcagttgattaatggaaagaagtccagggctgaagttctgggtggacccaaaagccgcgcaggaaccggggctgggcaagagcggtacatgtccacctttctgggacag

SEQ ID NO: 656605 - DNA, 195 bp, Homo sapiens
gtccactaaggtcttcaccacccactggagaaagctggggctcacattgcagcgagggagccccaagggtcatcatactctgtgccctctgttgaggcccccatgttcgtcatgggtgtgaaccatgagaagtatgagaacagcctcaagatcatcagcaatgtctcctgtgccaccaaatgcgtagcaccagcg

SEQ ID NO: 656606 - DNA, 282 bp, Homo sapiens
ctagaggttccccccgccggtctcgcgcggctggccagagctagagcagaccctggctttgtagtgtgttgcctttctcgcggctgtatgttctctcactgtagctgctttcagcctattgatgtgacatccttgcatcgtgtagtttgggatgagtctgtgcacgattcgtttttgtcaagcccgctccagatacaccatctagatggaatgactagttaatctccgccagtgcacctcctccaaggatagtgtcgcaagctgttgattatgagttgataa

SEQ ID NO: 656607 - DNA, 146 bp, Homo sapiens
  misc_feature (13)..(13): n is a, c, g, or t
catgggtatagcnttttatagaacacttagaccctgtatcttttagcaattactctgaagaaataccataatactatatgtggaagacatcccattggggtgttattaaatgctatcacacagctccagaggaatggaatgaatat

SEQ ID NO: 656608 - DNA, 337 bp, Homo sapiens
cagatgccttcattgccattgggtttgtgactgtgatatagtgacgacctcaggagcaacaggtgggtcacaaccccgtggctgggcagatcttccgaggcgagggaccacatgaggagccaagaagtgactcagaacctgactgacgtggcatcgatctgccgcactggaggtgatggtgcgagcattgaccttcctgcctggtactggttggtccttctgcaaggtggttcctgctccagtgtacactgtctccagtgctcctggctcccttccgctcgtcagaggtcgctccagctctcaaggagattgtcgttcacccagaactcttgcagcc

SEQ ID NO: 656609 - DNA, 155 bp, Homo sapiens
gtttgattccgcctcacagttgatggagccaggcaggcaatccatggaccttgtggaacttgtgtctctttttcccacgctggctggacttgcaggactcaggttcactggttgcccgtcttcattcacgttgagctgtacagagaggcaagacc

SEQ ID NO: 656610 - DNA, 205 bp, Homo sapiens
agaggctgttgtcagtggtgatgacctggccgtcaggcagctcgtagctacttctaccaggcaggagctaggaagcagccgtggccatctctatgctcgaaagtccagtgacgactgtagccacatgctatctaccttaactgtcactgcactgatttccctgctacgggccggtgggtgtgtagcaagcttgtaagtacgctgc

SEQ ID NO: 656611 - DNA, 219 bp, Homo sapiens
gttctagcctcgcctagtgggtcacacctattgtgccaccatgtagggagggcgaggcataaggatgcttacgacaggagttcaggaccagcctgggcaggataggaagagccggtctcttaaaaaaaagagaaaagtggggccggggtcagggggtcgctagggtagtccccgagctcggctcgggcgaggtggggaggggtgccgagactcgaatcg

SEQ ID NO: 656612 - DNA, 246 bp, Homo sapiens
aatttccaagacctgtcttactgaacaattattggatgctaggtagtctgcatccttttattcttacacttctgtatagtctaagtgctcatctctcttcaaaggctttaagactttattagtactccatcatactgtgccacttgccttgtaacagctatgttcttcacagtaactgcctatctgccacatccttatatttgtgtgctctggaatttgtgtcccgtgcatgagctgggtcgacgc

SEQ ID NO: 656613 - DNA, 460 bp, Homo sapiens
cttcgggtaccgtttggccctacacgtctaccagcatggcctgactgtcttcctgggccaggtgacccgcttcgtgggcgacttcttgctgcatcactgcattgcccggtggattgcacagaagggtggatgggtggcagccctgaacttgggcaacggtcccatcctgaacgtgctggtggttctggatgtggttctgcagcgccagttcgaggtgcgaagattctggagcccgagactgcctaggctgcccattagcgacccgggtcagacccatgcctagacttaaccgaagtctttgccttctttgctcccctgcaagggtaccccgtcaagagtcccgaaaacaccccctgactcggctataccttcgaagggaccctgcgtcggggcacacttaggctgcagaggcaccttaacattgcatgatgctaaagagccctttctctgggcacatggg

SEQ ID NO: 656614 - DNA, 235 bp, Homo sapiens
tttttagcttaaacaacaggcatttatttctcacagctctggaggctgggaagtccaagatggtggctccagcagattcagtgtctggtgaggggggcttcctggttcacagatggtagcttctagctgtgtcctcacatggcaggaggggcaaaagagctccctcgggcatcttttataagagcactaattctatgcaagagggcagagtcctcaggacctaatcgcttcccta

SEQ ID NO: 656615 - DNA, 119 bp, Homo sapiens
cataggtggcactgtctatggtgtgtcttcacatggtataaggggttagctactgggttctcttttatgatggcactaatcccattcatgaaggcaccacccttatgactttattatct

SEQ ID NO: 656616 - DNA, 449 bp, Homo sapiens
tgcgtcctcgtcttccttcctcttgtgcttcgaccgtgttatttgctctcaatcctatgtcctggatgtctcgtgcatatgttcttcctttctggtctgagcctgacatgctgcacttggccgttgtctggggccctttgcttgccatcaccatcagcctttacatcatgatcctcgtatcttttgatatcgagctgcagagtccgtggccgcacacacgccgtggggaatctctgactacatgggtctgtcggggagcgtgaagcgggcatgggacacccaacacttcttccatttcttcagagggaaactcagatgtccaaactaattttaacgaacgcataagaggtttatttgggtacatggcccgcagtggctttgcccagaaagggaaagacacgcgggtagatgattctagcagcagaattactccgggtcaccatgggcac

SEQ ID NO: 656617 - DNA, 720 bp, Homo sapiens
gaaaaagtcaaaggaaagtttgtatatagatgatatgacagatatgattgtagagagatatatatctcatggacatcgtgtgaaaaacactatgtcctctactttgcagacaatattcattctctaggtcacatcattctttgatctggtcgctggtgcctaaatggattcccgcagattttccggaaaatggatcacaaactcacgatcgtatagttgtgcgtggtacgagtgtacggtactatttccatcagcatcgacgtcccatacaggtggctgctagatctagggctgtatgcccgatctatactctatcctctcgtggttgcaccgttggtccagcacaacgctcatcttcatactcaacgcacatggtatcttactagatatgtttgagaaattgggtaccaggcaaatctcatacgtgtttgagaaaacaggctcagagcacgatgttgtagaatagaggccaatgaagatagatcaatggcactttgcatcacatcgtttaggcccagtcccgagtccaagtatgactgacacggtgtgaagtttataatagctaagactcaagattcacatactaatcacacttacaaattaatttcctgaaagtagagattcagcaaaactcacccgttatagagaggagacgagagaaaatagcaaacctcacatgtcctcatggtctttgtctcggtagctctagcgatagcagtt

SEQ ID NO: 656618 - DNA, 198 bp, Homo sapiens
tgaccacgtccttcctctcaagctcagcccgagggtgggagcctcaaggaagcgtggggtcaccactggagtcatggtcacgaggtccagccccactcccaaagctcagccttgccaggctccctttctcttcttcccccggtccttcctttcagtctggttgttgcaccctctgcttggttggctggagcgtgcacg

SEQ ID NO: 656619 - DNA, 377 bp, Homo sapiens
  misc_feature (198)..(198): n is a, c, g, or t
  misc_feature (207)..(207): n is a, c, g, or t
  misc_feature (303)..(303): n is a, c, g, or t
  misc_feature (319)..(319): n is a, c, g, or t
atagtatgttttaaaaatcaaatggtatagacggacttactatggcattagtcatttctgcattcaccctctttcctctgctactggttttgctctgtcacccagactggagtgcaatggtgtgacctcggctcgctgcaacctccacctcccagtttaagcgattctcctgcctcagcctcccaagtagctggggantacaggcgntgccaccacatccggctaatgtttttgtattttagtagagactgggttcaccgtgttggccaagctggttttgaactcctgacctcagtgatcggncattcggctccctgcnaggattacagggtgaccaccgcgcccggcctatgtcacgattttcttattttagtcgc

SEQ ID NO: 656620 - DNA, 1065 bp, Homo sapiens
acctggcgccgcccggagcccgagccgcgctggggccccagcgacccgcccgccatgggggacgaggacgacgatgagagctgcgccgtggagctgcggatcacagaagccaacctgaccgggcacgaggagaagtgtgagctgtgtgagaacttcgagctgctcaaggtgctgggcactgggagcctacgtgcaacggtgttcctggtgctggaattgccgtggctgggcacgacgctggggaagctgtacgccatgaaggtgctgcgcaatgcggcgctggtgcagcgcgccaagacgcaggagcacactgcgcacctgagctgctctgtgtgctggagctggtgctgccagtgcgcccttcctggtcacgctgcactacgctttccagacgtgatgccaagcttgcacctcatcctggacgtattgtgagctgtggctggtggagattgttcaccgcagacttctaccaggcgccagtacttcaagggagggctgagggtgcgcggtgtatgggggtgagatcgttgctggccctggaacaccttgcacaagctcggcatcatttaccgagaccttgaaactggagagatgtgctgctggaactccgagggggccacaatttgtcctcaacggaacttcagggcctgatgcaatcgaagtttccttgacgggatgtgaagtacaaggatgcggggaacttcgtcacgttactgtggcaccaagtctgaggtacaattgtccccgcgaatattcaattcctggtagccaatgacagggcgtccattgtgcatactggcctgagtagcaacatgggattgccacgcccccttatgacaattcttgtgcctcccatccgaaacgtcattgacttgaagctggtggagcccatctgtgccaattttaccccatgtcaagtgctgcgaaaaactgtaaaactatgctgatgatcgttgcaagtatgatactaccgttaaggtgcaacttccgtagacaatgttagattcccacttcacatataccccaacatcggcggaatcgatgtccacatgtgatccgcacaca

SEQ ID NO: 656621 - DNA, 149 bp, Homo sapiens
ccctcgaaggatgcaggaggctcgaagataggaggcactggaggccagggacagcactgagccgtgaacatcgtccgaggggtctcggaaggatcctgaccgaatcattccctggggtctctcggccagggacagggcgctccccattt

SEQ ID NO: 656622 - DNA, 694 bp, Homo sapiens
agcggagaatgtcttcgtgctacagtgcccggcactaggtgtgtgtcatgtcccggctgcgttatctggggcccgatgggccctccttatgtggcaagtactgtggctactagtcaaggaggctcagactctggagtgggtcaaggagccgctcgagctcacctctaatcccttggggccgctgattcctggtcttcccagtcctcccattgcccacgggaatctccccatgcgcctattctcccagtagagccgtgggactttgatcagcatgggggccctctgcctatcctcagaagattgccaagatgccatccccaggaattcgagtgaacaatgtggttccagtttcgcttggacagcctgggggattcaggtctgggacgaagcaagccctctggaagcccgagaagctaggtttcattggagtatccacaggcaggggattttaaaaatggaacaatgtctgagttcacgacatggacacagaatgtcacgcatgtgatgcggaccccaaagaaagcgtggaaggcaaaccagaatcacaggtctaaaggcggttgagagcacttaggcttggacagaattagttgggacattgacaccgcccaactgtatcacagagaccttcaagatgtttagaaagagaaggagtttgggcagaattgaacattattctccagttacgagacta

SEQ ID NO: 656623 - DNA, 302 bp, Homo sapiens
  misc_feature (94)..(94): n is a, c, g, or t
  misc_feature (298)..(298): n is a, c, g, or t
ctgctcgctaccagacaattgaagagaacattaagatctttgaggaagacgcagtggaattcatcagtgtgcctgtaccagagtttgcggacancgatcctgccaacattgtgcacgacttcaacaagaaactcactgcttatttggaccttaacctggacaagtgctacgtgattcctctgaacacttccatcgttatgccgcccaaaaacctgctggagctccttattaacattaaggccgggacctacctgcctcagtcctaccttatccatgagcacatggtgatcaccgaccngcat

SEQ ID NO: 656624 - DNA, 911 bp, Homo sapiens
ccccacgagacctttctccaccaacggggccccctctctcaaaggagggggcacaccgtggcgccaagtccacaaacctgaggctcacattcaagccccccaaaggtacctcatatctagagaacgcgctgtatcgccgtcgtaaacaatgcaattgtagcaaaccccccccgcgcgtggcacagccgaacggtggtaacacccgaggaccaccaatctgccggaaaaacttctagagcagctcgccccggcaaagatctcccgcccgccacattctttaggcacggtccctctgaaaaaatttgcaagcatgttttgactcgggggaaccacacacttcagggaccctctcagcttaaaccactctggcgaatagtagatctgtttcgccgcacccccaacaaagggccagtttttcacaggttaagaaatgatcgttaaaaaccccttggggaggtagttccttttttcgaaactgctgttacgcactataggccactggtggatacctaatctcgctgagagacttgacaaagaattctctatcctcgggggataatataagagactgccgtaatattctattgttaggacacagcacactatgcaccaccctcttctacaatcttaaaccacctcttggttgactaacaacatgtctcccccccaactgtctttgttagagtgaggcttctcagacttctttctcccgcagggtgaagaaatgttttgacgcacactcaatagtaaagaaaacaatttctgtctttaagacatttcctactcgcttccacaaaaaacatttttttctcttctcataacagatagataaccagtattgtccaacagataaacatgaaacttaaaacatttcccaaaaacaaaaattacattcccgttaaaaaaaaaca

SEQ ID NO: 656625 - DNA, 480 bp, Homo sapiens
actgaactcagatggtggggaatcacataaaatggcaagagctggtacccaaaggataaggcctgggtcagagtgttagtagagggtgagaggacctttatctccaaaggcgaaaaaaagcaggtcaaaataaggatctcagccggatagtagcaatcttctagggtgctcagagggtgagaagggcacgctaaaatacgtgtttggacctccgagcaggatttcaatgagaggaagagaactcgttcttgaatgggagagagtgggagggtgcagagtaagaaagtgggaacgcgtcagtcccttcctgcaggagaggtggcggcaggagggggctcccagcagctacaatcccaacactgcttgcccgcagagaaaatgccctggcaggaaagccggccctgctcccggcttcggccgcggctgctccgacaagttgttgttggcgttggtggcggcggctgcggcggcggcggccgc

SEQ ID NO: 656626 - DNA, 281 bp, Homo sapiens
atgtatgccatttgttattaatctgtgccattaatgctgatttattctggatcactgtcggaggctgcaccactcgttgttccggataaatcatgcttcatccgcgcctgataattgcagtcacactgaacgaggcttctccacctttggctggtgtctatgtgtacgctactttggtgcgcgcgcttatatcctatgccgcatttatgctcgcggtggttgccgatgcggcaacgttgctgggcggtgcaaccgcattttgcgatgatgtagatttcagt

SEQ ID NO: 656627 - DNA, 275 bp, Homo sapiens
  misc_feature (7)..(7): n is a, c, g, or t
  misc_feature (49)..(49): n is a, c, g, or t
  misc_feature (72)..(72): n is a, c, g, or t
  misc_feature (116)..(116): n is a, c, g, or t
  misc_feature (140)..(140): n is a, c, g, or t
  misc_feature (227)..(227): n is a, c, g, or t
  misc_feature (260)..(260): n is a, c, g, or t
  misc_feature (273)..(273): n is a, c, g, or t
acgtagncactgtcatggagatatgaccattgtagacatacggcatggntggtagtttcaccttaccttggngttatgtttcttcacccataaaatatggtcatatcacgcctgcntgtagtcacttctgaagggttcancctgtatggcactgatttaatgctgtaaagttgtaggaaaatgcagctcattagacgcttgcactttgtgtgcccaagatattcctngcctgggggatcaaggttgttatagcttaaagnaggcctcaatganct

SEQ ID NO: 656628 - DNA, 105 bp, Homo sapiens
aaattattgccttcatgttgggacagaacaggtccaaatggaaaagaatgaaagagaaagacagatagacacacacacacacacagacacacacacagagagaga

SEQ ID NO: 656629 - DNA, 637 bp, Homo sapiens
ggaactgctccgctctcagctcatcctgaagcttcggcagcactatcgggagctgtgccagcagcgagagggcattgagcctccacgggagtctttcaaccgctggatgctggagcgcaaggtggtagacaaaggatctgaccccctgttgcccagcaactgtgaaccagtcgtgtcaccttccatgtttcgtgaaatcatgaacgacattcctatcaggttatcccgaatcaagttccgggcaggaacgccaagcgcctgctctttaaactatgcgcgagcgccgccaggcggctcatcgagctccagcgagctgcatcccctgacagctagggaacggtggctcaaactggaatgtggaagcacacctttagctggcttcggaaggaccactcagcctccaaggcagcgactacactgcgcactcgcctggcaccatctgcggcagcgcacgctgtggcccccacgtctcgcgccgcacgccaaggcactccgctggcacacggcatctgcagctaagatctaccacatctccctggagctacgtcaaacggactccgagagacagcaccttgccatcctcaaggcaccaacatctcagaggaggtgccggcccctgaggtggcgccccccctag

SEQ ID NO: 656630 - DNA, 1004 bp, Homo sapiens
atgagtctttgcaggaaactgtctcctccagcttctcctgccttggtctccccatattcttagcctttctatttatttcctggtgtataactttccttgctttaaagggatcttcctttaattccttgggccaatttactggccattgaacaggtcccttgagtcccaactgtgtctctggggaacctccttacccacccctgctgacctcccacttcccaccctgcagctgagtatccgtgattacaggcgattgaactgtagagtcctctctgcctctgtacctgccagcagcagcctcacagtgacccccacgccactggacaactcccaggagacctgtgcgctccgtgcagctcagctcagccgcctctcaggaagcctggagcaggtctgggggaccccccccccatcactctttacattaagctgagagtggggagaagctgtgcttggctccctgaggccaccctgatccacggggcacccgcacctctgcgttctggattcacagaccaagtctaaagcccgttcgttcctgagttggccgtcaaggccccctgaacggtactctcggtacttctgtggttttgtacaatttattagacaggacctgtcaaatagccactttagacactttacctctccagtatgcaactgttaactatatggtcatctaggacattctcgttacaaatacgaatgagcctgtccagtgtctgtgtacattataaagtgtatcccagaaaacaaacaaacacggggccgccaaaaaaacccgaggggccagtataccagtcccggttccggtcaagggccctagggggggatataagaagcagggcggttacaggcgggcgtgaaagcgcgcgggctgggacgaccacctcggggcactgggcacccagcaataccaggaaaaatagatggtcaccttttcgggaaccgcgtttatacacatcggtgtaccactataagtgctacaataatacacgaagccacac

SEQ ID NO: 656631 - DNA, 528 bp, Homo sapiens
taactcaattggaaatgcagaaatcatctgccttttgcgttgatctcactgggagctgcagactggagctgttcctattcagtcatctcgccagccacccaagaggatcttttctgagccaaagtttagcacctctgtcccagctccttccttagagaattctgaatgtgggttccacttaaagaacaacacagcatcaaggggcatctgacctctggtcatttggagacttcaaccccctattactttctatggatgaaaatcaaagcttctgctgtactgttctcagagccaaagcctgaggtgaaactcctctcctctgattttttgagcatggaatataaacaaaataattagccactcaagaggcattgcaaacattaactaacatgtaaccttgcaaaacagggaaggttcttatttgtaaatgccaatcactacacagaaaagctctaaggatttatatcctaggcaacagaaaattgctctgtaaaagaactcttcccacatgttttactaaatttacaa

SEQ ID NO: 656632 - DNA, 142 bp, Homo sapiens
cctctcgatttcactggggctaggccctatctcttgcgttttcttcaacaggcgcctttactgtgtaggtttaggttcccttgtttggcgacattgcctgggcaccgtttggtccgttcgaattacacgttgaatttttttt

SEQ ID NO: 656633 - DNA, 1155 bp, Homo sapiens
ataggggcagatctagctacatactttattcaaataccactgggaggcaaggggctaagaggcaagggcagaatgtagctatatctgcccctattattacctgtatctagcagacccccaaatcacacatgtaactcattactgtactcctgattatttatactacagtagtcccctctccatagccactcatagaccccatattaactactgacattaagcattccacataataaaattaaaggttccgagttacctgactatggtagagcctgacctaggacctgtctacttcatcatcttatcccatagtacatggtagcttcctcaaatgctatatactgaaactagctacgcagtacaatgcaaaggatagatcatcaacaagtctctctcatcacacaactacacataaataaaaaaaccaaaaacaaaaaacacacaacaacaagcaaaacagtgagtcaaacacagacacgacatttcaatataaagcaacagacagtcagaacagtaaaagcatcacttacacaaaatcagaacgtgactacgccaacagatagacagaaactcaaagtagggagggaggaggtggggcacgcgcaggggcaggcgaccgcaggggcagggagctacggagagaggaggaggacgacacaggagataagaggcgagaaggaggacggaggcgaggggagggcgagaagaaggggaagaaacgggaaggacacaagagagcacaagggaggggcagaggagaggagaggaagcgacaggaggcgagggaagagagaggacgaaggtacgaacgaagagcggagaagagagggggacgagggcaggagcaaagcagaaggaggaggagagcggccgggagagaagcagagaggagaaagagagaggagcgacgagcgaagagagagaggggagcgcgaagacgaacggggaggcaggggagcaagaggcaaaagcgcagacagcgagggggaaaggacgacgggggagaacgagagaggacggagaggacggacggggaggggcgacaagaagacggggcgagggaggaggtcaggagcggggagcgagggaaagacagcgagaggaagcgccagaagaagagagctggcgcgggcgcgaagaggggggggggacgga

SEQ ID NO: 656634 - DNA, 390 bp, Homo sapiens
tatgtggtacacatgttaattgattcgcatacgcttaactaatgccgtgccgattccaccttttgttgagaattttggcacctatgtcctttaggaatattgccctgtggtttcctttccgggttgtgcccttgcctcactttgatctctggtgctcctcacctgcctttaaccgtggtgccctcacctcactttaaccgtggttttgtagattgagtatagaaaggattaccctctcctctcaatttcctgaaatgagttccatgtatctcttccctaaatcccacgcttttctatatatgtctgacaattccacgccacatctctctgtggtcgtcgccttttgtggtgttaagatgttctcgcgtgcaatactcctacagcccgggg

SEQ ID NO: 656635 - DNA, 1380 bp, Homo sapiens
taggagtacccgccaaacaagcgggaccgagcaggaatccgtatctggggaacagagcccttggtgtcctcccttcagaaagtaaacggaacaccagaaatttcaaagtggtttagtgcccaagaaaaagcaggaatttcgtctcagcactttcttcccagaatcgctataggggtgcgtgacgtgaggattgaaagtggggcacccagaagaaataggagagtgctattgtgcccggtatcaagggaggctccgtggagttacaagtgccactgtggaggcaagttattaaccggggattaggacgggtggatagatagcatttccgggacacgtgggtggacgcccaaggaaaaccagggagtgcgatgaatagctcttcacaggcggagccgtggaccgtggagggccgtggagaggtggtgagaaacgtgggtgcaagacatttctcaccgggagtggacagaaagcaacaatcagtgggaatccactctccttataccgcggcgcgggggaaacagcgaatcagaggcgggggaactacagaaacccgcggggcgcgatgggatatgcggaagagcccaaatcaatgtgcagatggcataaacgcaccccgtggggacaagcaagtgcgtaatcaataacacggacgcagtgagagggcaaacggccatacaaaatgtggccgggaggagaaagaacagcgcgccaataaatataacccgtggagacaccgtgggacaccagaaagacactccgttaccccgtggtcagagaaagaagtccgcacaataatatcaaaagaagcggtggaacacaaaatgaggggcgacaaagaaccccccgtggggcgaacaacatccaccttacaagacgaggcccccccccccgagggggcccacacacggggcgcgcaaccatcgatagggggccgacgaaattataaaccgctgtgacacaaccagaaaggggcgtaaccaacaacactgccgacaatgggggtgccaaaaaagcataacaacaagacaaccacggccgcaatacccaaaaaccacccagcattatacctaaacccgtactcaccacatagcataagccgcagccagaagccccaaagaaggaaaagcagcttgggggacacgaagacaaaaatttgtgataaatagggcagcaccagacaaacaagtgtgagacacaaccagcgccccaaccaagagggtgcgacgccaacgacaagaaaaaatcaccggggcgggaggaaccacaaacggggtggcgaagagcaacatactacgcacacaaacaccacccgcacgagggcgtgagcaataacaccgctgtaacagcgaccacatctctggggtaagaaccaccccccag

SEQ ID NO: 656636 - DNA, 787 bp, Homo sapiens
tggagaaaaagtctcactgtttggcccaggctggggtgcaggggtgcaatctgggctcactgcaacctcagcctcccgagtagccgggattacaggtgcttgccacttgcccaactcattttggtattttagtagagacgggttttcaccttgtgggccaggctagtcttgaactcctgacctcaggtgatccacctgcctcggctcccaaagtgctgagattacgaggcgtgagccaccgtgcccagccaattcatgcctcaatttcttatatctccggatggagggattggtatcagattttttttttccctagtaccttccagctctaaaaaatttggaaatacgcttattaaaacgacaaattgaaaccgaattttactggtaatattttctggtcccagcagcttttgttttttggacattcgtggtaccacttttagggtagcatcctgcggtataaactatgtatgatatgcctcctgacctttctagtgccccccagacttttgacttttactttaaaaagaggcattttttaaggccttgaagtggataccgctatatacatctccagtgcttaggctatattgtggaagacttgtgtccgttaaggcaggagggagggagggaattttggagccacgaattttgtgggagtggccggttctataaactttaggggcaggttaaaaggtctgagaaaagggggaaaccgcgaagtggggtgcacacggagccctggagaggagggttctcaagaatgggggaacgaagacggcataca

SEQ ID NO: 656637 - DNA, 166 bp, Homo sapiens
  misc_feature (42)..(42): n is a, c, g, or t
ctgctttcaaaatacactggtggaggacaagcataagtaagncattcctagccaggggtagtggcttacacctataatcccagccctttaggacggctgaggcaggaggaccattttagcccagaagtttgagacagtttggccacatagtaagacctatctctat

SEQ ID NO: 656638 - DNA, 125 bp, Homo sapiens
ccagtcacagaggtatgaaatattaactacttacgtgtattggaggaactataagaaattcagtattgctagagcgaagaatgttctgaggagaattttgaggaaaaggctagaagggctttcta

SEQ ID NO: 656639 - DNA, 246 bp, Homo sapiens
gtgccaggtgatgagtgtatcaaggcgcatccacatgatagaggatttgactgctcgttcgactgggcgtcaccctcttagactgtgtccccgtccggagtcacatatgatgcgaattagtgcgacaccgatcggatagcgcatacagccagaaatcctggactcaagcgatcctccagcctcagcctcccgagtagcttggactaaagggcaagcgccaaccgcgcccgggaagagaactgcctg

SEQ ID NO: 656640 - DNA, 478 bp, Homo sapiens
atcagctcggtaccctcatgcctgtactcccagcactctgggaggccaggggacggatcacctgaggtcaagagtttgagaccaccctcaccgctatgccctcaccgcttaaatacaaaaaattaaccatgcatcgtggtgcacgacctgtactcccaactacatggtaagctaagagcaggggaatctgcttgaacctgggaagcggaagttgcgaatgaaccgagatatcgccgctggactcctgcctgggctagcaaaaagcaaagactccttctcaaaaaaataaaataaagagtaaacataaaaataaatgattagccaggtgtggcggcgtatgcctatagtcctagctactcagagggctgaggcaggaagatcacttgagcccagaacctcaaggctccagtaagctataatcatgccactacactccagcttgaatgacagagcaagactctgtctcaaaaaaatagaa

SEQ ID NO: 656641 - DNA, 148 bp, Homo sapiens
gacaggtgtccacatgcagtagagcaggcacggagaatgacggggggaaaatcatttaaccctgggtggaaggaaatcactggtgacctccagcgtgattcctccgtcgagcgcttttcatgttcagtcgtagggctttcaactgaca

SEQ ID NO: 656642 - DNA, 264 bp, Homo sapiens
agaatcacttgaacctgggaggcagaggttgcagtgagcccagatcacgccactgcactccagcctggtgacagagtaagactccatctcaaaaaaaaaaaaaaaaaaaaattcctttatttggggccaaaaggaaaaccccccggtattgggggcctctctccatttctccaaaacttcgggctccgtgcacttaagcctcaccttctcttggggacagggccctctttcgggaaaggggctgggtccatttcgtgctccccg

SEQ ID NO: 656643 - DNA, 514 bp, Homo sapiens
ggcacgaggccgaaccgcagcttcttggcttaaggacttttactaccaggggccgattccaaggccaactccagcaatggtttttgcaaatctgcggaaagtgctcatcagtgacagcctggacccttgctgccggaagatcttgcaagatggagggctgcaggtggtggaaaagcagaaccttagcaaagaggagctgatagcggagctgcaggactgtgaaggccttattgttcgctctgccaccaaggtgaccgctgatgtcatcaacgcagctgagaaactccaggtggtgggcagggctggcacaggtgtggacaatgtggatctggaggccgcaacaaggaagggcatcttggttatgaacacccccaatgggaacagcctcagtgccgcagaactcacttgtggaatgatcatgtgcctggccaggcagattccccaggcgacggcttcgatgaaggacggcaaatgggagcggaagaagttcatgggaacagagctgaatggaaag

SEQ ID NO: 656644 - DNA, 133 bp, Homo sapiens
  misc_feature (11)..(11): n is a, c, g, or t
  misc_feature (46)..(46): n is a, c, g, or t
  misc_feature (55)..(55): n is a, c, g, or t
  misc_feature (90)..(90): n is a, c, g, or t
tctaactccancagaagccctagagagagcacagctcaagccaaangatatggangccagagcacatctgccgctctgagagggactccntctaagaagtcagaaccgtagcaaggagcatagcccaagcctt

SEQ ID NO: 656645 - DNA, 459 bp, Homo sapiens
acgcgacgcgcgtcaaatagacgcatcttctcctacgtaaaaatggctcgtcgcgatcaggggatagctagaacatgcaccccaccaggaacgcggcgacggttacagaatcggctcgcgcgtgaatggaaacacatacatcaggaatcccgtgctcatggcgagcggcggaatgaggatcttccgcgcattcgtcgggcgctgtggatgcccgcagccgcacaaaaatgaccgtgatggcgaacacgaggggcgaacaacggttgcaatcagcgtggtgacttcgctgtgattcacgctctcccctcgccttcctgcgagatccgacgagctgatatggcgacaatcgtttccccccatgcggactacgtgtgagtataccaccattgactcaaggctttcttgaacagggatctacaaaactgcgaactttgaaccggcggtgcggcgtgaggtacc

SEQ ID NO: 656646 - DNA, 994 bp, Homo sapiens
tgttcaggaagcgaatcagtgttctaacctctgtctacagtaatccctggtgggtggcagcctgtgtgcgccattcatgtccttggcaggtgatgtactaaaatagctgatattctatgggaaggctaattatctccaatgttttggattggtaacaggtgtatgagagtgatactgcttgatggtaggtcggattgatgtgtgtcggggtctctgttgctcgagatcgccagctaatgcatgaggcgtcatggaagggatatactggggcaaaggcccagtaaaaatgaaatgatgttgattgtcaaagaaaatcgagtttgaactatttcttgccttttggtgcaagtaatttccatatgagcttagtgacataggcaagctattgaatgaacgttaagatagaagtgtgtgtgtgatgggcgataggagaagggaatttcgcaaatgggaacgaggactagttggtgttagctggaaaattcgcggcgattgtgggcatagttgagttattgaggaatggaagcacgttcgcaaatgaaggggtagaaaggtgtaaaggcggtgaatggtataggtcacatcattgaatcaaaagtggctgtaataaaaataggcagaaatttttttgtcaatctatttcatgtaatattcttggttgggatgatctataaggagaaatgtatcgtgaaggtagagagtgggtgggatacgtgatggagagtcagtgcggatgactagtcttcagagatggtggatgacactcttcttagtgcaaacatagcgattctgtgggggatcaagagtgtgcaactctctggtagtgattacatatacagtggcttatgaattggattattctcggacaggaaattgtgggggctaaatgaggacaaggtggggagttgaacagccaattattcttcttgattggatttgtggaaacattgtgacttggccatgatggaaagggaaaaacgaaaagggcggctaa

SEQ ID NO: 656647 - DNA, 124 bp, Homo sapiens
catggacctgcgtggactgagagatcaccatggtagagcagcacatctctaagttgaagaagaagcagcaacagctggaggaggatggctgccaaggcctgcccgagccatgagaagcccgtgt

SEQ ID NO: 656648 - DNA, 455 bp, Homo sapiens
agctcggtaccggaagcatccctaagcaggaggaatgaacaactccggagccgctgcttaagagctgtaacactcaccacgaaggtctccagcttcactcctgaagccagcaagaccacgaacccaacagaaggaagacactctgaacacgtctgaacatcagaaggaataaactccgaacacaccatctttaagaactgtaacactcaccgcgagggtccatggcttcattcttgaagtccgtgagaacaagaacccaccaatttcagacacaccaccatataacagttgctcaataaaatgcttcctctttttccatttccttttgctctagatttaacattgggaaagactcaggtccagacttctttaactaaccaaattctaatttttctccagggttcacatgcggaccccagttcatggagcatttgacctcatcttccctggtctct

SEQ ID NO: 656649 - DNA, 1709 bp, Homo sapiens
  misc_feature (362)..(362): n is a, c, g, or t
  misc_feature (381)..(381): n is a, c, g, or t
  misc_feature (447)..(447): n is a, c, g, or t
  misc_feature (469)..(469): n is a, c, g, or t
  misc_feature (474)..(474): n is a, c, g, or t
  misc_feature (783)..(783): n is a, c, g, or t
  misc_feature (866)..(866): n is a, c, g, or t
  misc_feature (1709)..(1709): n is a, c, g, or t
gacggcagatgtcgcatctgctcatcgagcggagtggtccgcagccgcagttcgtgatgcctcggaatatgacttaactgttacaaggcttggttaatgcagttaggagacttgcgagtgccgtgaggtgcaccttactgccttggctctgtgacgccggggtatcgtactgaaagtgttcataacgaagtagcctacgactgcatggatctcactctgtgaggctgagactgtacaaaggatcgcgcaaacattcccagcctggaactgagagaacaacgtcatgcgaacactgtgtccatccagtgtgagcgacacatcaaagccgaggcccatggccaaccgggtctctcgggacagcnactccactgtgtcacatgncttcaccttatcccggggcgtggctccagtggtgccatggattccgtgtcgcgctcggtatcgagntgtgcgatcgtgcgatctcgangaganagctctcataaccgctctagaaccagctcgaaagcgcgatcgttgcgattctgtccgagacgattccgatccccggcgtaatcgcccaaagcacgaaagaaatcggctaagagatacattgcctccggtgcggactgagaacccaaagcgcaagagagtcccgcaaccctctcagcgcttgacctcaaaacgagagagtttgtggcagtgtcacaaacacagacacttacgatggtggccaggggcgggaagttgtggtggcctacggaagaactccctaaggtgcggcgacccaatcttccccacctnttcgtcttgttggtattgcaccacggcactgccccgaccaaaaaggagaggtggggcaccaagaacttacaactcgggtgtcngcacgaacgaacgagacacgattttccgaaattggaacttcgaattggagagcgtggggcattattggaccaaacaggtttccaccaaaagaaaaaggtgccgcgaatttggcgcgcgggcgcacatagggtttatggaccaaaggggcgccattcgtggggggggcgcgggccgggagcgtcgggggggcccccgaagaaatccttcttaaaaggggaattttccgtagcctaagtgtcagcgcgcgccctctgtgtttagagagggcgcctcctgccgttcgttctgcgcccacggggggtgggggtgtcccttcgggctctttgggattatacgccgagaggggggagcgcgcgcccccccagttgtgttttcactgtgttgccgctgtgcgaggccacacacgcgccacctggccgcaggggttcacagctctcttttcttccaccggaaaatctgtcaagtgtactttccatcctctttgggtgccacaggagagggcgcagttcgcacacagtctggcgcgggttttacaccccttttacaccccgttttttcctcttctttcatttacgctggggggaggacaattgggtggggacagtttcactccggtggagggcccgcatggggggacggagcaaggacggcctgcgggggcccctccgcgcgcgcatacgagcgcggttctctagagaggcgcaaccccttgggccctgtcttttggtgcgttttgaagacacgcccacggggttgcctcgaagagacacgcgagaggttccgctctgacgggccgcgacgaggaacgcacactcctctcgggcatctctgtgtgggatccn

SEQ ID NO: 656650 - DNA, 152 bp, Homo sapiens
gtcgatactcagatacctcgttccgcttctcggcgccgacattgccttcacttcggacttgatcaaccgacgtggcctgattattccgcccaagtacccgattaccgaaggcaccagcctcacgccctcctggcaatcaatacagcttcatt

SEQ ID NO: 656651 - DNA, 520 bp, Homo sapiens
  misc_feature (86)..(86): n is a, c, g, or t
  misc_feature (97)..(97): n is a, c, g, or t
  misc_feature (99)..(99): n is a, c, g, or t
  misc_feature (102)..(102): n is a, c, g, or t
  misc_feature (114)..(114): n is a, c, g, or t
  misc_feature (120)..(121): n is a, c, g, or t
  misc_feature (125)..(125): n is a, c, g, or t
  misc_feature (229)..(230): n is a, c, g, or t
  misc_feature (385)..(385): n is a, c, g, or t
  misc_feature (453)..(453): n is a, c, g, or t
ggtttcttacgctgctttccggaactcggaacgggccggaattcatgacggagcgctcagtgcgtagagagcggggcgatccaganccgatgagccntnacngctgcgattagntagggnncgcngccaccggcgaggacgatgccgattccgaagatgaaggatccgcccaccacggccgcgagcgcgagcgtgggaatgttcgggttgatccacgtgcggcgatcannccgttgacgcaaccgcctgaatggcaatggcaacgaggaaggcagtaagccagcgggtggatcccgaaagccacacgtcacggaaggctcccgtgacacagaacctgcctcgctggaacacgaatcctaggcctaagcccagtagtagaccggtnataatcatagttgtctccaggtatgggggtgaaaagtgttaagtgaaggcaccctgagatgtcgaagntgaccacgaattgggtatggaacgccccgtcgacgcggccgcgaatttagtagtagtaggcggccgc

SEQ ID NO: 656652 - DNA, 1449 bp, Homo sapiens
ggaaggaggcgtttgcgctgatcgtggtccgtcgtgcgccaaagccagagtcgcagccgaggggagccggggccggagcctgatcccgagccaggagccgggatactctgagcgagacggtggagaccgtgcccccggctcgtgctccgctgccgtcagcgagccattgtccaggacaatgtagggaaggatgtgccagggtagttctcacatacatgatgactatcagtcatctcgcaggctacgatggtgcaattcagggttggctacagttcccgctagtacgcgttatgagcggaattatgacgatttgcggctagttgaatcctttgctaccacgatatttcagacatcacacatactagagcttattgctctcatcgtggtaaaaggggtgccatacggttggcttggacctttcacgcattttgaatggcattctcaacggaaagtttggtagcgcacaggggtgcctggatggcggttgacagcaaatggagttgacatataaatttatttgaatttatacggttaggcttacatcgcaggggatctagtacctggaagtgttgaaaccaaagagtttctgccttactccctatgggttccccattgttgtgcatgcgtttgggaacccagtttttgtttgtccatggagaaggccatttcaaaaggcacggacgtagtacaaaacgctgccgaaggtggccattgggagtggcttaggcgtattgcttgtgttggaagtccccagaggtgccttatgggcgtgatgttaccccaatggggttggggtacaccgggggacgccaagatggtgccttccgaaatgttggtttaaccggtttcctcggggtaggggagaggggatttgctctttggcgaccggtttccttatacgaagatgcggacacaactacctcgttagagggttgccccccggcaggttctggagccacgaacggcatttataaatacttaggcggccgctcaaagagtccatagggttttgttgtaacagcgtccggctggacggacttttacgcttgacaggggtaggcgccttgggagaaaagaatttgccctatgccagcttcgatgggagagcgagatacggtcgctttagcacttggcgtttgacattgagagccaatttgactgtggcaaccttccttagtgtggtgtgaccccggggacatgggcctggctcggtactacaatattagccagagggccttctttgagagcccttggtacccatttcttcttggcgttgggggtgtatagcatacacacttagcgcccatggaattctggatagcgtagaggagagtacggttctactactgttcgatgtggagacggtgatactcttcgctgctattgtgagcttcaccagggttcattacgaatatagggatcactgtacatgtgcgcgcattattctgg

SEQ ID NO: 656653 - DNA, 257 bp, Homo sapiens
tgtaaaggtccagccgcatttcatgagcagagaaggagcttggagcgggtcaggacagaggactatctcaaacggaagatacgttcccgtgcggagagatcggagctggtcagggatgcacattttgggaggagagctcgggtggagccattccttccgggccaggcggttgaggctgaggagagccagattagccggatgacctcaatgagaaggatggcccagggggcctggcccccatgggaggctgggtggga

SEQ ID NO: 656654 - DNA, 471 bp, Homo sapiens
gcgcatgtgaaaaatgtagcgaatgatttgatcataagatcctgattgtccgactaaaaaatgtcttcgacatgacactgttacaatattggcatctacaggcaactgctctatacaatcaagtgatttggaacctgaaggtgaccagtgtgtctatggtccgatcggccctacgtgctctagatgttagcttggctctgagatattatgacagcatctgtagaaagtgccaatgtcacggccatgtggacccagttaaaactccaaaatttgtaagcccgagagtggtgagtgcatcaactgcctccataacaccactgggttttggtgtgagaactgcctagaaggttatgttcacgacctcgagggaaattgcatcaagaaagaagttattcttccaacacctgaaggttctaccattttggtttccaatgcctctttgaccacatcagtgcccacccctgttataaa

SEQ ID NO: 656655 - DNA, 584 bp, Homo sapiens
ctcttaatacggtgctagaactgccatcttatgtctggtatcaagaacatgtgtggaatctgcgtctatgtatacgagctatattctactgtgatcaatagatattctctaagcgtcaatctcagtacacagtactcgattatctagcacgcatggtcctctatacggtctgtatgctaatattctcctccttaaatccaaactgaatggtctaaaaaagcatatcatggccatcttcgtgatacccaagttgctatacgacgttcccgtcgtattcattgtgtgatataacgctcgcatctaatgtagtgtatctttcttctacgtggctggtactgtacatggaatcttatgccatctcttctcaacagcaacttgataatgcacttgctctggatctgttcttaggcagtggactcagaaagccaacatgtggctgcctcacagcccataagccagtatttttgctgcttctgaatacaaacttggttggtctcttgacttcagacttgaacttactgtagcctcagatgatttcccccctccgcctccaggaagaaagaatactaccgcgcgtaataaat

SEQ ID NO: 656656 - DNA, 127 bp, Homo sapiens
  misc_feature (35)..(35): n is a, c, g, or t
  misc_feature (69)..(69): n is a, c, g, or t
  misc_feature (84)..(84): n is a, c, g, or t
  misc_feature (97)..(97): n is a, c, g, or t
tagctgggactacagacgtatgccatcacacctgngcaaatttttttatttttcagtagagacggtttncgccgtgttggccangggtggtctcaangactcctgggctcatggatctgcctgcctc

SEQ ID NO: 656657 - DNA, 425 bp, Homo sapiens
  misc_feature (130)..(130): n is a, c, g, or t
aacgccgaaatggccaagattaaggctcgggacctgcgcggcaagaagaaggaggagctgttgaaacaactggacgatctgaaggtggaattgtcccagcttcgggtcgccaaagtgacaggcggcgcgngtccaagctctccaagatacgagtcgttcgcaagtctatcgcccgagtcctcactgttattaaccagactcaaaaagaaaacctcaggaaattctacaagggcaagaaatacaagcccctagacctgcgacccaagaagactagagccatgcccgccggtcaccaagcacgaggagaagctgaagaccaagaagcagcagcggaaggagcggctgtatcctctgcgcaagtatgcagtcaaggcctgagatgacaacgacaataaagtgcgagactgactggcaaaaaaaaaaaa

SEQ ID NO: 656658 - DNA, 672 bp, Homo sapiens
aatgaatcttggccaggcgcagtggctcacgcctctaatcccagcactttgagaggccaggtgggcaggtcacctgcaggtcaggagttcgagaccagcctggccagtgtggcaaaaccctgcctactaaaaatacaaaaattagccaggcatggtggtgcgcacctgtagtcccagctactcgggaggctgaggcaggagaatcgcttgaactgggaggcagagggcagatcatgccatgtgaattgccgagactgggcaacagagtaagactctgactcaagaaattgaattgaatgaatgaatgaacgaatgaatgtactatgtagctgattactgggattgcaggtaccgagtttgtgctgaatgatatgttggggtaaatcagggtgcttatagaatttcggcgtaatgctggaagctgccactaattttgcatttaaatagagcataagaggaatgtatttttacaagaggagtgaatgaggttaaaatcagagattgcgaatgggtgataaatatgcgaagctaattcaggtgtaggatatgatgactttcttatggctaaatatgttgctttcatacgttgcagtgcttacagttccgacagctttacaagaaaacatttccatatcgtgtattcgtgggtatacttaaataattgtcacaata

SEQ ID NO: 656659 - DNA, 613 bp, Homo sapiens
gggcctgctcaccgacagcgtaggtgctaccaacgctgtcgtgcgccgccgccatttggatggcaggaagagtccggttctgggacagctggagacagtggtggtgaatgaaataactgtgaccaaaggaaagctatttgcgaacgtatcattctcccagctggggatggcctgaatgtgctgttgtaacagatgcctaggactggtttcctatcgtcccaggatttagctctttctagtttaaaagggttgtccaatcccaagagcctttatcgactgcgaggatcgatcaggttgcggatgagtcttcagtgtggctgcatgaaaccgtccagatgtaatgctctcgaacagtgtgggccgtgatgaaaactatgggaccgctattgggacctcaagattaaggaggttcgaagcttcacttggagagacaataggtttacgatggtcacaatcaaggggacgggattccacagaagaaaagcctggttcattacaaacttagcctgatgtactagcagaacctttatcaagtgataggaatgaggttaggtgatgggacaatatgtgagtgaaatgtcaggggtaaatgatgccctgttgggaccagaat

SEQ ID NO: 656660 - DNA, 411 bp, Homo sapiens
gtcgactaaataaaatgaaggcaaccaggaaagtgatatggaggaaggggaaaggcacagggttactgagaatgggacagagatcaaggctccaggaacattaatagctgtaagatgcgttttgtgtgcctggggtgcacaaaaacacatggcagcagataattgttaaattcgagtacatgatggcccttgttggggctgattttaatgctagttgggactgcttttgaatccaagtgatgttcttctctgattctggtcatatgaaagacaaaattggagatgttaagtagaaagcctgcgtaggctggtggtaaagggtcagacactaacattgttttgctgaggggaagggtaactgtgactcatggtttcagaagtgtcagtccaggaactgctctatccattgct

SEQ ID NO: 656661 - DNA, 197 bp, Homo sapiens
  misc_feature (85)..(85): n is a, c, g, or t
ctgtgttggccaggatggtctcgatgtcctgacctcgtgatccgcccgcctcagcctcccagagtgctgggattacaggcgtgancaccacgcccggcccatcagtacttctgaaaagttgttatgtagcatatccagtaaccttcattcattgtttcctccaacaggcatttgtttgaccaggtactgtctgcaac

SEQ ID NO: 656662 - DNA, 186 bp, Homo sapiens
gatgataggcttatgatagcacgagatgaagtggtagtagatggggaagcttagaaaacgagtaacataatcaatcttttgagatttaattttgttgtggctgaggttgaatttctttaatgatgagttgcattgactgactgaatttgcagtcacagcctcaatttcattgaaccggatagcttg

SEQ ID NO: 656663 - DNA, 493 bp, Homo sapiens
ttagtgtgggcttcagcgcactggccacctcccgaacactccatgatgtcactgtactacctagatgccaggagctgctgggaaggggtctctaaaacaagaggctccagggcagatgtggtggcttacgcacgtattccaaacactctgggaggccgaggtgggaagactgctttaggctaggagttcaagaccagcttgggcaacatagaaagacccgatctctattaaaaatttagaaattcagctgggcacggtggctcatgcctgtaatcccagtattttgggaggccaatgggggtggatcacctgaggttaggagttcgagagcagcctggccaacatggcaaaaccccatctctaataaaaatacaaaaattagccgggtgtgtagatgggcacctgtaatcccagctgctggggaggctaaggtggagaatcgcttgaacctaggaggtggacgttgcagtggtgcctggagtaccgagctcga

SEQ ID NO: 656664 - DNA, 318 bp, Homo sapiens
cctccttatttatcaacatctttttcctccccttccctgagagctctcagagcaatgtttcaaaagccccctttggacagggtttcaacaactcagaaaggtttactttttttttttttaaaaaagaattaaaatccattctggtggggcccccttttttcttccaaattccggctggggttggggggaatccccgttcccaaaccccccttgttgagttggaccccctgtaaccccttgggtacctgccaagtcatgatggagacttcaggttgttctgtataaaatgcaaaataaatgtttttattaccaaaaaaa

SEQ ID NO: 656665 - DNA, 858 bp, Homo sapiens
acacggaaagggtacagaacccggaactgtctaaagatagaacgcccgctggaacccgggtccaggcgggaaaatacctccgggaactgtggtctacaggaccttcatagaccccggtgcagatgcgtcccaccccaggcagagcccggcagcgggggaggtcccagtattccgggccccacaatagctgtgagtcccccggccaaatgggatggcgcgtgcgagtcccaaaggtggctaaaaaaaatccggctgcacacggcaggggaccaccaggaggagcgcccaacagttgcgcaggagtgtgggactatcagaccacgtctctacgaggatggatcgtgcagctcccggctccagtgtgaggacccgggtgccctcatgaaaaacttgtagagcccggatttgagaacccccctgtgcggttgtgcggtcccccaggctccctcacgtaggtgcaggttacgaagggcaggcccgtcgccccccgatgtggcaagtcgccggaaaaacaccgggggatagagggcccagtccccggcccacgggctgtgtagcccggtggaaaacgacacagctgcacagcctgtggcgcgcgagatgatcgcctgctggacgccgcaccgcggaggaaacgggaagacgagatcaaacttgcggcggatagcaacacgtgtggcagcccggcaactcctgaccggcacgcgccgccaggaagcccgccgccccctgcgcagagtgcagggaccacaatagttgttggagaacaggacccaaagtggtggggccctgcccccgagagccggggacccttggggggccgggggcccaacaaaaagccaagcgttaacaataaca

SEQ ID NO: 656666 - DNA, 375 bp, Homo sapiens
aatgaaaagattataagcaaaccctggagaaccaaaatgagacgaaaagtctgttcgcttcattcattggccctcgacaatccgtaggcctacccgcgcgcagatactgatcattgctatttcccgcctctatagatccccaccgccaagtatctcatcaacaagcgacgaatcaccacgcagcgatgactaatcaaacgaaccgcagaacaaatgataaccatacgcaacgactaaaggacgaacctgagctcttatacatagtatccttaatcatttatattgccagcgactaacctcctcggaactcctgcgcttactcatttacaccaaccagccaactatctatgaacctagccatgggccatcgggggg

SEQ ID NO: 656667 - DNA, 289 bp, Homo sapiens
cgtctggtgctgcatgtggagggcacacagttggtgcaggaaggagtggagcatgggttacagggcagcctgaggagaaagtctaagagaaaccggattagtagagaagggccactcgggcacagggtcctggccaattctccccttcggatgcctctcaaacccatcttccgtgctttctctggccagactccctggtcccaacctccggcatctttgccttgagtacaccttcatggcgcttcctgtaactggagtctccccaaagcccactttggggacccttcct

SEQ ID NO: 656668 - DNA, 105 bp, Homo sapiens
accggcaaaatcatttgaagaaaacaatgaagcggaaatcaaaccaaaaagcacgaatcctactttcttatattaaacccccatacgggcctacacacattttta

SEQ ID NO: 656669 - DNA, 223 bp, Homo sapiens
  misc_feature (9)..(9): n is a, c, g, or t
  misc_feature (36)..(36): n is a, c, g, or t
  misc_feature (171)..(171): n is a, c, g, or t
  misc_feature (183)..(183): n is a, c, g, or t
  misc_feature (194)..(194): n is a, c, g, or t
  misc_feature (215)..(215): n is a, c, g, or t
tccaggctnagtgaaatgtggatctccactcaccanaacctccgcctcctgggttcaagcgattctcccgcctcagccccccgagcagctgggactacaggcaggcgccactactaattttgtattttcagtagggcacgggttcccccacgttggccaggctgaggcagnagaatcgcttgnacccgggaggnggaggctgcagtgagccgagntcgcacca

SEQ ID NO: 656670 - DNA, 98 bp, Homo sapiens
aagaaggaaagaagaaaggaaggaaggaaggagaaaaaaagaaagagaaggaaaagggaagggaagggaagagaagggaaaggaagaaggaaagaagt

SEQ ID NO: 656671 - DNA, 125 bp, Homo sapiens
  misc_feature (90)..(90): n is a, c, g, or t
taaactaagtactaatttcagatcatctctctatgaatgcatacagctgactctacacctttcagaaaaagccaggtcaccctcttggantgctttgctgccttagaaaatttcttccacccaga

SEQ ID NO: 656672 - DNA, 1055 bp, Homo sapiens
aaccccaaggtgcgtcccaacccagcccgcttccatgcagaactgccgggcacctggtggcttcatgagcaaccgcttagtagaaacccaacctcttcctggcaggagcattccagcatccaaagcagcccagccgcagacagccaacaaattcttccaggcagctgcagcaagagcctggcacgcattccctgaggatttctgtcggcacaaggtgctgccccagactgctgaccgcacttcgagttcggcaaatgctggggaccgattgtcctcacgccaccatctatcaaggatgggcaagttcctgagcgctgaggagtatcagcagaagatcatccctgatggatggtcaagatgttctcatccactgaccgggccatgcgcatccgccatccatgcagacagatggagcagttcatccagtaccttgaccgagccaacagtcaacacccagatcttaccacccacgatcgtacatggcttcctggacaccaaccctgccatccgggaagcagacaggtcaagtccatgctgatcctggacccaaagctgaacgaggcaaaccatcaagtggagctgactgaagcacattgcacggcatacaggcccaaggatgaacagggacccaaccgatgaaaacaccacaagtcatgctgggcaaaaacgggtacatacactacaagggcatagcaacaccacaacaggagacataacactctggccttagacaaaacaataaggaaccagaatgacacgatcaagggaaagaagaatgttcatagatattaagtaaccaaaaaaataacgtacaaaaaaatgtgaccacaaaacaccgtcccgctagcacaaggacacaacggacgaccccacagaacaccggagacaaacgcggcaccacacgaccaaagaaaactcaggagaaaaaggcaccaagaccgaagagcaacacacaagagacactatacagactaccgaaaccagacaccaccgagaacgaacacaccaacgacgaagccacacaacgacctcaacacacgatgcccacacaaccc

SEQ ID NO: 656673 - DNA, 167 bp, Homo sapiens
cgtgtgtcacaccgtctatgtacaaaatagtgggaagatttataggtagaagcgacaaacctaccgatgctggtgatagcttggttgtccaagatagaatcttagttcaactttaaatttgaccacaagaaacctctaaatccccttggtaaatttaaccttgttag

SEQ ID NO: 656674 - DNA, 615 bp, Homo sapiens
catgctagctatttggagaaggatgggaacagatggatggcaccgtcactactacaaggatactccgtgtatgaactccttggagagacctactatagctgagtgcttgacatacactttgataataggtagttcgtgtatcagtacgggtactcgtcctgtgagtagcactacccaggcttgtgtaagctcacgtgtatgacaggtaatagaacaaggactcctaatagtacgataggaccatgagaaacctatataacaacttagtgactccatatgtactgatatgttgcgtgagataggagcctgagcatgacggccagggatgcaatggtgaacatggctaggtacgactatgtctactagagggacttcatcaagagcaatgtgttactatatagcggagactacataccgagacatcggcaacttgggaataccaacggaggcgatatgccagccaattagcactataaccagggcattcaacgaggatttcatgcgccacttgcgggatcttgacccttaaatcgttggaagacttggatgacactataaggtgcttctctaatctagtttgggcccagacaacgagttccccatgttacaatggca

SEQ ID NO: 656675 - DNA, 168 bp, Homo sapiens
gttcgccaacacggtgctgtcgggcgtgcccaccatgtatctgggcattgctgacaggatgcagatggagatcaccgccctggcgcccagtctaccatgtaagtatcaagatcatcgcacccccagagcgcaagtactcggtgtggatcggtggctttcccctgccct

SEQ ID NO: 656676 - DNA, 446 bp, Homo sapiens
  misc_feature (359)..(359): n is a, c, g, or t
  misc_feature (394)..(394): n is a, c, g, or t
  misc_feature (417)..(417): n is a, c, g, or t
ccagaactgggttctgacaggtgggagccagcagctctgaaggctgggggcagagggttttgaggggacccaggttagtggggcattggctagccctgggccgtgggtatcactcagtgtcttgcagtaggtgttgatactttcgaagccacattgtttcttgggttcttacacatctttatatcacgtttttataaccatcaccctttccaatcaaaatatttattgccaattttttcttttaaatattttcaattttcaaagtgtgtagtgcgtgcattgttttaaaagtttggtagtactttttggccgtttgatatttaactccgtttctttttttttgagacgggagttttgcnttgtcgcccagtcccggagttgcagttgacgtgantcttcagctcactgcaagctttngccttccggggttcaaaaccattctcttg

SEQ ID NO: 656677 - DNA, 890 bp, Homo sapiens
  misc_feature (9)..(9): n is a, c, g, or t
  misc_feature (66)..(66): n is a, c, g, or t
  misc_feature (69)..(69): n is a, c, g, or t
  misc_feature (86)..(86): n is a, c, g, or t
  misc_feature (93)..(93): n is a, c, g, or t
  misc_feature (95)..(95): n is a, c, g, or t
  misc_feature (131)..(131): n is a, c, g, or t
  misc_feature (138)..(138): n is a, c, g, or t
  misc_feature (151)..(152): n is a, c, g, or t
  misc_feature (170)..(170): n is a, c, g, or t
  misc_feature (174)..(174): n is a, c, g, or t
  misc_feature (184)..(184): n is a, c, g, or t
  misc_feature (190)..(190): n is a, c, g, or t
  misc_feature (194)..(194): n is a, c, g, or t
  misc_feature (206)..(206): n is a, c, g, or t
  misc_feature (241)..(241): n is a, c, g, or t
  misc_feature (291)..(291): n is a, c, g, or t
  misc_feature (297)..(297): n is a, c, g, or t
  misc_feature (324)..(324): n is a, c, g, or t
  misc_feature (349)..(349): n is a, c, g, or t
  misc_feature (355)..(355): n is a, c, g, or t
  misc_feature (357)..(357): n is a, c, g, or t
  misc_feature (361)..(361): n is a, c, g, or t
  misc_feature (367)..(367): n is a, c, g, or t
  misc_feature (414)..(416): n is a, c, g, or t
  misc_feature (548)..(548): n is a, c, g, or t
  misc_feature (602)..(602): n is a, c, g, or t
  misc_feature (813)..(813): n is a, c, g, or t
  misc_feature (859)..(859): n is a, c, g, or t
ctccctttngcctttttgagggaaccaggcagacctggaagtggaactttgttgttagcaccaggngcngcccacagctgggctcngcaacangncagcacatggccctgttgcctccacctgagagtctngggaggngctggtggcaganngctccctgcaggatgtcncctnaatgactctnagattnacanaccccctcttcncccacaacccctgtaaacatgagaatgggctcgtnacaccctcaacacctcaggacaagatgagggtccgagatgtgtggcttgnctttangcggcccaggagctgccgggctttctnctgcatgaaaagctggtcccttgtncccccncntgcnaccgtnttctaggcactgtttttttttggcatgtgtctgtgttagtggcttcnnngcttctgggccactgctgccttctcgggcttggcctgcaagaagccctggttgagcaagctgttgtcttctttgatacctgacagggtgaggctggaagagtttgaaggggcagttgtcggcaaggataganacttgggcagtgtggacatcatcagcttcatatcctcatccacaatgtcaaganccagagacttccggactttcttgatggggctccgcgcagcccaggcttcctcttctgcttctcgggcctgatgtcgtcctcgatgatgagttcgatgccagcctcagaacgcagcacctccttcaagtcctcctccaggtgcggggtctgtggcaggggcttcagggggtccgtacttctccagggcgttcttgaacggggttggcgtgtngggagtgttgtccatggagtacttctgatctggggttacaacgcancatgtttctggtgcagggtgtcttgtccggt

SEQ ID NO: 656678 - DNA, 348 bp, Homo sapiens
aattatggttagcactgtctattaaatatctcgattaattttcaaaaaaaaaaaaaaaaaaaaaaaaaaaaaaaaaaaaaaaaaaaaaaaaaaaaaaaaaaaaaaaaaaaaaaaaaaaaaaaaaaaaaggggggggacagggccccaaaatacacataaaagggagaaaaaaaaaaaaaaagggggcaggggtaaaaaataaaaaaagtgggaaaaaagccgaggtatcccaagcaaaacggagggcgcttttcaaaaaatgggaaaccgtaaagggaaaagggaaaaataaaaagctaaaatattttgaaaaaatcggataaaagtttgggaaagggcaacatttcg

SEQ ID NO: 656679 - DNA, 403 bp, Homo sapiens
tagctgtcctggacgcgtggttatccttgagtctggacagtactccgagtacagcagatggaataggttgagttcttaatcatggagtttacaaggtcatagttcagtatttcagagagaagcctaacatagacgatatgtttgcccacaaaaggaataaaaagactaatgaaaatggtaaattattggcttagggctggaatgtgagtacctaggtctgcctacatggtgccagtcagaagcatgattggtgttgtacatgcctttatgtagcaaaatataattctttaataaatgcagttgggtagacataatcttttaagacacaggacataggggagtaaaaagaaggcctgggtgataaaaaagtttgaaaccactgaattaaattaccttcaaatcc

SEQ ID NO: 656680 - DNA, 81 bp, Homo sapiens
tccgccccccccccctccacgcgccccgcgcgcgcgggagggcgcgtgccccgccgcgcgccgggaccggggtccggtgcg

SEQ ID NO: 656681 - DNA, 327 bp, Homo sapiens
gagtacagaacagttcagaacaaaaacagattcgcaagctgctttcattaattcaactaaatggcatgccataagaatgcaattcgacatagaaggaagaggatgaatttgggaaaagtctgcaggccgtaccatggtcagaaatcatggactgaatgtgggaatgagaaaaagctaggagttaaggtttctggcttagtgaatgttactgctatattctcgacaggggaatactattgaaggagggggactgtagaaaaagatgatcaacacatttcggacatattgaatttgaggtacccattagacatttaaagtgacatcaga

SEQ ID NO: 656682 - DNA, 469 bp, Homo sapiens
  misc_feature (144)..(144): n is a, c, g, or t
  misc_feature (148)..(148): n is a, c, g, or t
  misc_feature (155)..(155): n is a, c, g, or t
  misc_feature (157)..(157): n is a, c, g, or t
  misc_feature (159)..(159): n is a, c, g, or t
  misc_feature (161)..(161): n is a, c, g, or t
  misc_feature (163)..(163): n is a, c, g, or t
  misc_feature (170)..(170): n is a, c, g, or t
  misc_feature (173)..(174): n is a, c, g, or t
ggccgcgtcgactttttttttactttttttggtcacagaaaattttaagttttaagagaaactcctacagtgattggcatcaaagtaggtagtgttccctccctcccaccaaacaaaagaagtcccttatcacctgaggaatgnccantaaatantnantnantatttanttnnatggctggctggctatattaagctgttttgtttttaggggaaaatggtgttacttctaacacagaaagagtgctgaattaaaatctttctctgcagcaatatctattgagaggtgctgactgttttgctacagcatgcaactcaaaagtggctgaaaatatgcagctttgggagtctacagatcattgcaggagctaaaggtctagtcatttttttttaaccaaaggtaatctgcagcagctggtaaccgtggaggtctctgcacaggtttgtgccaagaatatgcctgtgtgaa

SEQ ID NO: 656683 - DNA, 1136 bp, Homo sapiens
cgttgggcgccttggccggggtttggccgggtagctcctgtgctgtgtgtccccgtggtgtacgtcggtgttcctcgacccgtctcccgtcgccctgtagtgtgtcgttcgcctttgtcccgttttggttccctctttggtcctacgtcagctacagttccggtggtgccatcgttgctgtctcgggtctcccatgcttgcgtgcagggagctatcctttcgtgctgcctcttggttgctcgggcctctcgttatctctctcccgccggtgtccactgttgttcgttatcatcgctgcggccccatctcaagcctatggtggtgatcataggtcgaagctctcggccactattgaaaccttaaaggccctttcggtttgggatatggacacgctgggacatccttcgattccggtaagcattatgaagcaagtagtgttgtcataagtacatgccgtgtactagggtctcggatcgaggttgaaggttctttggtcaatgttacgtaatgagcagtgttgggccccactgtctggggagtacacgtggctggtcttgtccagggcctctagttggtacatcatggggtgtctcattggaaagctctctgatgtgcacctcgcttttgtgcataagttatattgctgtctcgagcaatagtcagatattccgtgtctttcaccccctgaagctaagacatcagggagtatttcagaggccagcgtatggagtcatcgacaagcgaaaagccgatgaaacccagggtccagtcagtggtagcctcagcagactcagggcctggtccattgcataattgactgtcacgggtggagtttgatctggccagacccgatcctccttcatgaacacccagcaacctgagcaaagtccgcgagccctgccactcatgcgagcaccggacatggcagtaccacgggacagctcagtgttggagggcacacctcgaaccacgagccagggtctggggcttgcatgtcattgtctatgacagcgtcaagactggcccttaggcaccagtagctgtgatggaaaccctcccctctgagactccacgtgaggacgtggctgagtgaaatcttcctcgtcagtggtgcaattaccgtcatcgataagctc

SEQ ID NO: 656684 - DNA, 361 bp, Homo sapiens
  misc_feature (33)..(33): n is a, c, g, or t
  misc_feature (70)..(70): n is a, c, g, or t
tagaaaaaaagtgaaaagaaaagtgaccaaaanctagtttgcaacaaggttaaaatcaccccttacaagnacaaaccagaaccatgggtgaagagacgtcatgcatcaatgtcttacagcggttgcaagcttagaatgaattcaccttttcacagtatccgagatctatgattacaacagtgtcatccgcctgtacctggagcagcaagtgcattttcacgatacaatcccaagaaagctgaggcaccccctcagccgctttccagtgatgtaggacagaacgggccttgaagagaatgccgcgtgctttctcctgacttggggcaatgcaattcaaaactttttttcccctattattcag

SEQ ID NO: 656685 - DNA, 135 bp, Homo sapiens
acggcgagaacgctcaattatattccagtttaaggccactcctcctgctgtgacttttgaactaactggggagacagacaacagtatttgtgatagaacggagagggacttctagtattacaacatgagccttgg

SEQ ID NO: 656686 - DNA, 958 bp, Homo sapiens
cggagggtgctgctgggggggttttcagcgccgtgtgtggattcgcgctatgtgggaggccctggccggtggtggaccgcgtgagggctgtgggggggtcggggtgcggggatgtaattcgctggccggcggtggcttggaggaccaggcgctgggcagggggcgtgaggtcgagcctggtgggtagtcttggcgggcagggggtgtgtaataagggtgggtctccacaatcgcggccgtgcgggcgcgcggctcataagaattccccgagcgcttgtgtttttgtggcagaccggctggctctacgcttggggacaactgtcgatgtggaaacaccgagtgttggccgcccggagtagtcagagaagcgtgggccgggtgcatcagactgtcgggattgttatgctctctgggcggcgcgggctggggttacaaggatgtgtggaatcgcgggggcaacagctactgggcctctcttggaaggcgctatgtttatgggggatatagatgaggtccgctggtgtggcacgggaagaaaatagctaggtgtgtgggcacgcgggagtgtcgggagacttctcccggggacgatttattctaccccgcgcgttaacagggtttttttcgagttatgcaagggcacacatgcgagtggacacagtcttagccgtcacacagagcagggttacctccgttgatattccctatggatcttctggcaaccgtgatgctagaaccctcgcgtctgaatggagaaatatcactgtggtttttgtattatagctgactgctaggaggcgccgctctggacctaagtctctgcttgggaattgatgcccacactattgcacaaatataactcccttccaccatataacctttttttcggccttccatcattttgacccttaacctcaaaatttaacgaaaaaaagaataaccccaaaagataagatta

SEQ ID NO: 656687 - DNA, 556 bp, Homo sapiens
atagcgttcagaggatacggaaggactcggccaacagtatgacaaaaagtgaagaatctggataatgcgttaatagcaattataatgtattattggtatattgtacgtaaactaaagaactattgagaacaatcctttgagataaatggagcagattcgatccattatatgaagaaagcaatgtaaagtattcatgtcttgcttaggttcatactgatgagtgacagccaggaaaagaatgcactacgacttgaaagttctataatgctcttacattagtaattacgagtctttcactcccaaatctgtgagtcctaagagaacatagtaccctctcatttatctgcatcagtggagatgtatgtaagaacatatttcaaatcatcacttagaggctgagtaaaggtgggtacccctgagatcccctcacctcactccttgaagttcggctagagaaggacagttgatggaaggtaactagaaaaatacaaaggcggtctgcatctgacttgctagtataggcagcagaattatagctgaatctatatacttaccc

SEQ ID NO: 656688 - DNA, 361 bp, Homo sapiens
gtatcgttgtttaaaccaggcgcaggatagtacacttttccgatcatcccctcttgacgttcttcaattttattgacaattggtaacaatgttgcggtggtgtcattcacataagaaattgaaccggttggcgcaatcgcatgacgataggcatgatacatcccatacttcatgacattttcctttaattctaaccagtcacgttgtgttggcacgtggtgattagcaaaggcagcggcaacttttggtgtttttggtgcccaatcttgcgtgagatacttatcaaaatatgttccctcggcgtacgctgtacttgtcaaactcaaagaacttttcttgggcgtgtctctgtccaacttca

SEQ ID NO: 656689 - DNA, 1799 bp, Homo sapiens
  misc_feature (149)..(149): n is a, c, g, or t
  misc_feature (528)..(529): n is a, c, g, or t
  misc_feature (697)..(697): n is a, c, g, or t
  misc_feature (1433)..(1433): n is a, c, g, or t
cggtcacacgaccttaaggccgaacaaagtgaaaaccattatgctgagtgatatcccacttaacccatggcccgggggggagctccagctgccatagctattcgaactatagcttaaggaagtgtaacaagagaaaagggtatctctanctttgcctaaaagtcccctgagtgtccgacctctcctaggtacctcgtccggacgtttaacgggtcctagtataagaaaaccccctagtaacagtaggacagccctctccagtagacataccaatcaagggagtaagaactgaagacaccaagggtgtcttctccacccacctgatcgtcctcctgaccgtcatttcgaacacgtgggacatctacgcaactaaagttttataagaaccaacactaagtaagccacttttaggtctcttctgtgttacctacaagcgacaaatccgaccccagcttactgaaaatgttataaaaactcccgtcatagtcccctacctccacttgttagtccacaacccggacaactcgnnaaagataccaatgatcaaggacctcatcattgacgatggagtctccgtaatagtcaagaaccccttccacgggaacgttaaagattcctcgttccaaagaaacattgtcgacacaggtactctagtgtgtctttcaagagtaaagacttcctttacataggtctcttngtctaccatgttaaaggtatcacattaaagagaagaaacctatcctgaggaccctttcgtaccccttcggttccaaggatgtaggtaatgtgcctcaattacgaagggtttcaggactaccgggtgtgcataaaagtagtagtaggagaagaaggtgaagaggaccactgtttaactaacatctactccaagaatgtgagaccgaaggtaaaaagggttcaagaaggagactttagaacgagtttaatagattcgatcgaccagactataacacaccgtgttcgagaagtttgcttattaggaaaagaactgtctcaaaataaagtaggttctcaaaactattaagaggtcactgccaaagtgaaaaccagaaaacccttcctctgagttgtcctctactttacacacaaagaacacaacgtagaaggacatgtccggaagctcctgacatctagaagggtgcggaagatttatgagaacattctcacaacgttagacctctctaaagactctacctacaagaaagtcttacaggttctgtcaagatggattcgataggaaatacaaccgtagttaaggacaaagattgtcttgagcatgttgtaggtggaaaggtttgtttcgacgaagtacttcacgtgaggggaaaagacaaactgtcgagtgtaggtaaggacggaggtcgtcgtggacgtgctgacgaaacaccggtaacgcgcgtcgttccacttcaccncacacgaacgctcacaacgtcgagtaattcaatcctacacgtgactactagtaaaaatggtgagattcggcaggcatctcacggcctttataccaacatatacgcgacgcttgtgacttgagatgcggtgaggtgtttactacaaaagtccacagtacctgacaacggtggtacataagtaggtctcaagctaaggacgtcgggccccctaggtgatcaagatctcgccggcgtggcgccacctcgaggtcgaaaacaagggaaatcactcccaattaacttcggcttaagacgtctataggtagtgtgaccgccggcgagctcgtacgtagatctcccgggttaagcgggatatcactcagcata

SEQ ID NO: 656690 - DNA, 182 bp, Homo sapiens
gagctagtctccaactcaaaaaaaaaaaaaaaacccaaccttccccttccttaaaggggccccacccccgggtttaatggtttttggggcccccctgcaacccttggatagccaaaacccccaggggggcccgggcctggatttcaaaatattggcaaggcttgttctttttcggaaaaaaa

SEQ ID NO: 656691 - DNA, 133 bp, Homo sapiens
actgaccaagcgtagtacccaaaaccacaaacataaactgggtacctggtatttccataaacagtgcagctcaagcaaaccagtttcagcagcacaacatttaaccagagattcaagcattatatcccattct

SEQ ID NO: 656692 - DNA, 144 bp, Homo sapiens
tctgctacccaagaacgagaatacagcaacatggtccgttgtaggcattggccccgtgtgtgatttttttcccaaaaagctatccttggcattcttgctggagtggccttgctccaccctaccttgtcattggcccttatcgag

SEQ ID NO: 656693 - DNA, 434 bp, Homo sapiens
ccccctctagctgccatcaattgtgctgtaactcatgtcactaatcaacaggtttttccatgtgacttctcctaactcctttcagtctattcgttacacagcaccccaagggaggctggcaccccaagggaggctgttaaaaagtaagtcaaggctgggcgtggtggctcaccccttaatttcagcattttgggaggccaaggcaggcggatcacctgaggtcaggagttcgagcccatcctcgccaacatggtgaaacctcgtttctactaaaatacaaaaattagctggatgtggtggcacacccctgtaatcctagctactcaggaagctgaagcaggagaatcacttgaacccaggaggcggaggttgcagtgggccgaggctgcgcccctgtactccagcctgggtgaacagaatgagactttgtctca

SEQ ID NO: 656694 - DNA, 1541 bp, Homo sapiens
gcggccgccgcctccgctctgagccccgccccgctcggccgccgattgctcgggcctggccgccagcccaggggccgatggccgagcgcgtcgcactcgcgtccctgcgccgtgcctgcctcgcgctccctgttacggcgttcgtccccgggcctggcgcccgcgtccggcccggctccgcggcggcctggtccgatggctcctcagcggagggccgcaaccaaggcgcccgagggcaacggagcggccgagcgccggaaccggagcagcaccaagaaggaccgagccccgcgggaggtgcagaggctgtggcagaggccgtggctaaggaccgcgggcctgggggctggctttgtgctcaccgcactcctgctctggagcagcttgggggccgacgacggggtcgcagaggtcctggcccgccgtggcgaggtcgtggcagggagattcatcgaggtgccctgctctgaggactacgacagtcaccgcaggttcgaaggctgcactccccgaaagtgcggcagaggtgtcaccgatgtcgtcatcaccagggaggaagcggagcggattcgcagcgtagctgaaaaggggctctccctgggaggatctgacggaggggcatccattctggacttgcactcaggggccctgtctgtcgggaagcactttgtgaacctgtacagatacttcggggataaaatacagaacatcttctcagaggaggacttccggttataccgggaggtgcggcagaaggtccagctcaccattgctgaggcttttggcatcagcgcatcctcgctgcatctgaccaagcccaccttcttctcccgcataaacagcacggaagcgcggacggcgcacgacgagtactggcatgcgcacgtggacaaggtgacctacggctccttcgactacacctcgctgctgtacctctccaactacctggaggacttcggcggagggcggttcatgttcatggaggagggtgccaacaagacggtggagccgagagctggatgtttttgtttccggatgatgtcttgtgggttccaagaagttaatggaccgagagccagtgaagctgctggtgcgaaggctggagtcaggtgtcctccggggactcaccacccgcccgagaggggagagacacatgcgattctggaagctgagagcattgcttattgttgattccttggttgccgtgctgagtcctgctttaaggaagcaggtcgcgtctccttcttcacctcggggtccgagaacctacaccgcgtggagaaggtccactggggcacccgttacgccatcaccatcgccttcagctgcaaccccgaccatggcatcgaggacccagcgttcccgtagccagcagccgggccaaggtaacttcaggagggcccgtgtggaggcagccgcgccagtcgtgcacccacccccacgtccacccgctcctgttgcacagagtgccttaggaattctctgattttgatttgctgacgtgttaatcttttcatctgtgagtaaatgaagggaaccag

SEQ ID NO: 656695 - DNA, 252 bp, Homo sapiens
  misc_feature (6)..(6): n is a, c, g, or t
  misc_feature (34)..(34): n is a, c, g, or t
  misc_feature (78)..(78): n is a, c, g, or t
  misc_feature (82)..(82): n is a, c, g, or t
  misc_feature (166)..(166): n is a, c, g, or t
  misc_feature (214)..(214): n is a, c, g, or t
cagggntctcctctgagaaccacctgtgcctctnggcctcctgcctagcctgggccttctggcacagggacccctgcntttnagccagcaggctaatggtagggagtgagggttgggagacagctaagggggctgtggtcagtttgagggggctcaaattccagtntgcccctttaaggcccctggttggctcagaatctcctgaggccctggncaggttaaatttgtcctgtctgtcattagccttgactt

SEQ ID NO: 656696 - DNA, 373 bp, Homo sapiens
ctcaggctggaatgcagtggcatgatcttggcacactgcaacctccatctatgggagtcaagcgattgtcctgctgcagcctcctgagtagctgggattacaggcacctgccaccatgcccatctctactaaaaatacaaaaacaacaaaacaaaaacaaaaaacacctcagctgggtgtggtggtgcaggcctgtaatctcagctgctccagaggctgaggcatgagaatcccttgaaccacagatgcagaggttgcagtgaactgagatcgtgccactgcactccatcctgggcaacagagtgagactcggtctcaagagggaaaataaggcatttttctcatttaaataataaatagtattccattaaaa

SEQ ID NO: 656697 - DNA, 218 bp, Homo sapiens
atgggtgggctgtgtatgatatgacatgaaaggctggaatgaaaggcgggtgggtttgaaggccaggacccatgcgccctcatgtccgcttctgggaagggacagccttgaggcacatgagtcctggccatgccatacctacgccatcactcacattcttaacttctgacaaatctagctcaccactcatctgctttgtcattgcactacgttcaaca

SEQ ID NO: 656698 - DNA, 1586 bp, Homo sapiens
gcggccgccgcctccgctctgagccccgccccgctcggccgccgattgctcgggcctggccgccagcccaggggccgatggccgagcgcgtcgcactcgcgtccctgcgccgtgcctgcctcgcgctccctgttacggcgttcgtccccgggcctggcgcccgcgtccggcccggctccgcggcggcctggtccgatggctcctcagcggagggccgcaaccaaggcgcccgagggcaacggagcggccgagcgccggaaccggagcagcaccaagaaggaccgagccccgcgggaggtgcagaggctgtggcagaggccgtggctaaggaccgcgggcctgggggctggctttgtgctcaccgcactcctgctctggagcagcttgggggccgacgacggggtcgcagaggtcctggcccgccgtggcgaggtcgtggcagggagattcatcgaggtgccctgctctgaggactacgacagtcaccgcaggttcgaaggctgcactccccgaaagtgcggcagaggtgtcaccgatgtcgtcatcaccagggaggaagcggagcggattcgcagcgtagctgaaaaggggctctccctgggaggatctgacggaggggcatccattctggacttgcactcaggggccctgtctgtcgggaagcactttgtgaacctgtacagatacttcggggataaaatacagaacatcttctcagaggaggacttccggttataccgggaggtgcggcagaaggtccagctcaccattgctgaggcttttggcatcagcgcatcctcgctgcatctgaccaagcccaccttcttctcccgcataaacagcacggaagcgcggacggcgcacgacgagtactggcatgcgcacgtggacaaggtgacctacggctccttcgactacacctcgctgctgtacctctccaactacctggaggacttcggcggagggcggttcatgttcatggaggagggtgccaacaagacggtggagccgagagctggatgtttttgtttccggatgatgtcttgtgggttccaagaagttaatggaccgagagccagtgaagctgctggtgcgaaggctggagtcaggtgtcctccggggactcaccacccgcccgagaggggagagacacatgcgattctggaagctgagagcattgcttattgttgattccttggttgccgtgctgagtcctgctttaaggaagcaggtcgcgtctccttcttcacctcggggtccgagaacctacaccgcgtggagaaggtccactggggcacccgttacgccatcaccatcgccttcagctgcaaccccgaccatggcatcgaggacccagcgttcccgtagccagcagccgggccaaggtaacttcaggagggcccgtgtggaggcagccgcgccagtcgtgcacccacccccacgtccacccgctcctgttgcacagagtgccttaggaattctctgattttgatttgctgacgtgttaatcttttcatctgtgagtaaatgaagggaaccagaaaaaaaaaaaaggggggcgcaaaatttcctagaggggccaattg

SEQ ID NO: 656699 - DNA, 156 bp, Homo sapiens
gagaggatcccctgcttggcgagagaggagtcgcccgttaaaagcacaatcacggctactacattaacagtaagtgggaacggaaggaatttagagatgctgtcatagacatttcgtccccacataactgctttaacaaggctggtaaagttgtca

SEQ ID NO: 656700 - DNA, 393 bp, Homo sapiens
cttgcttgcaactgttcagcagccaccctgcggttcttattgtccgtccatggccgtgcaggtcgccgctggtaggagctggggctgtgcgggaattagcatgtcacaggccaggcactgagtcgcgtctatcttgttgaagaagtggcacctggccaatcccttgaaaggatctggttgtggtttagcggtttctttctccatccattcctgacgccggcttctcaattttcttatttctgttctagcatgtattcctgtgcagtgaactccacggtcttgtcgggcagcttggtgcttatgaaccgcagggtctcttatgtgaaatttgctttgcagatccttatggatctcatcgtcatcaaagctaaggatacttgcatacagaacagg

SEQ ID NO: 656701 - DNA, 1251 bp, Homo sapiens
  misc_feature (1079)..(1079): n is a, c, g, or t
gcggccgccgcctccgctctgagccccgccccgctcggccgccgattgctcgggcctggccgccagcccaggggccgatggccgagcgcgtcgcactcgcgtccctgcgccgtgcctgcctcgcgctccctgttacggcgttcgtccccgggcctggcgcccgcgtccggcccggctccgcggcggcctggtccgatggctcctcagcggagggccgcaaccaaggcgcccgagggcaacggagcggccgagcgccggaaccggagcagcaccaagaaggaccgagccccgcgggaggtgcagaggctgtggcagaggccgtggctaaggaccgcgggcctgggggctggctttgtgctcaccgcactcctgctctggagcagcttgggggccgacgacggggtcgcagaggtcctggcccgccgtggcgaggtcgtggcagggagattcatcgaggtgccctgctctgaggactacgacagtcaccgcaggttcgaaggctgcactccccgaaagtgcggcagaggtgtcaccgatgtcgtcatcaccagggaggaagcggagcggattcgcagcgtagctgaaaaggggctctccctgggaggatctgacggaggggcatccattctggacttgcactcaggggccctgtctgtcgggaagcactttgtgaacctgtacagatacttcggggataaaatacagaacatcttctcagaggaggacttccggttataccgggaggtgcggcagaaggtccagctcaccattgctgaggcttttggcatcagcgcatcctcgctgcatctgaccaagcccaccttcttctcccgcataaacagcacggaagcgcggacggcgcacgacgagtactggcatgcgcacgtggacaaggtgacctacggctccttcgactacacctcgctgctgtacctctccaactacctggaggacttcggcggagggcggttcatgttcatggaggagggtgccaacaagacggtggagccgagagctggggaagggtttggacgtccagcctctgcaagcaggagcccagcctgtctgccctcaccccngaagtcccagtcacagcagttttgtgggaaaatgaaaaactcacagagcacaagacaggcgttttcttgagaagtcaagcagctgaagcctcctgggactcgaaattacacaactttttagcatattttgatcttagtcattttaagcatgataaatacttgagtcaaaaaa

SEQ ID NO: 656702 - DNA, 397 bp, Homo sapiens
  misc_feature (159)..(159): n is a, c, g, or t
  misc_feature (353)..(353): n is a, c, g, or t
  misc_feature (355)..(355): n is a, c, g, or t
  misc_feature (385)..(385): n is a, c, g, or t
  misc_feature (389)..(389): n is a, c, g, or t
aggattgcgttcacctgcaagctcaggcattcgtgccgcaaaagggctttgatgaaaaagccgcctacttcggccacaacctgcatgaccatgcctgcgcagcagtgcacaacctcagtgacgacggccaaccatttttgaacgtagcgtgcactacgncgccctgagcctggcaagtgtcgagcatgtgcgtgaggtggtcgccaaggatggcatgcagacgctgcttgccttcagccaccttgcagccgagctggaaagcgtcgatgagcccagtgccgagcaacgccagcgcatcactgtcgggctttatttctacactgaagctaccgatcccgattcgtcgaagacancnggcccatgactcttcttgcgcgctgcctcngtgncccttggg

SEQ ID NO: 656703 - DNA, 251 bp, Homo sapiens
  misc_feature (11)..(11): n is a, c, g, or t
  misc_feature (58)..(58): n is a, c, g, or t
  misc_feature (83)..(83): n is a, c, g, or t
  misc_feature (87)..(87): n is a, c, g, or t
  misc_feature (199)..(199): n is a, c, g, or t
gacttttcctnattcaagtacatggatcttccaacaaggcccgatccagcatgtgctncatctggagagttcccatgagagancagncaactcaagccttctggccgcatggacccgatggctcgcattactgtgtagtgttttacgtctccatggtaactgtgccctgcacccctcggtagccgccctgttagttttnagtctccttttctttctcacctttatgcacttccctcactgccctacccggt

SEQ ID NO: 656704 - DNA, 3210 bp, Homo sapiens
gcggccgccgcctccgctctgagccccgccccgctcggccgccgattgctcgggcctggccgccagcccaggggccgatggccgagcgcgtcgcactcgcgtccctgcgccgtgcctgcctcgcgctccctgttacggcgttcgtccccgggcctggcgcccgcgtccggcccggctccgcggcggcctggtccgatggctcctcagcggagggccgcaaccaaggcgcccgagggcaacggagcggccgagcgccggaaccggagcagcaccaagaaggaccgagccccgcgggaggtgcagaggctgtggcagaggccgtggctaaggaccgcgggcctgggggctggctttgtgctcaccgcactcctgctctggagcagcttgggggccgacgacggggtcgcagaggtcctggcccgccgtggcgaggtcgtggcagggagattcatcgaggtgccctgctctgaggactacgacagtcaccgcaggttcgaaggctgcactccccgaaagtgcggcagaggtgtcaccgatgtcgtcatcaccagggaggaagcggagcggattcgcagcgtagctgaaaaggggctctccctgggaggatctgacggaggggcatccattctggacttgcactcaggggccctgtctgtcgggaagcactttgtgaacctgtacagatacttcggggataaaatacagaacatcttctcagaggaggacttccggttataccgggaggtgcggcagaaggtccagctcaccattgctgaggcttttggcatcagcgcatcctcgctgcatctgaccaagcccaccttcttctcccgcataaacagcacggaagcgcggacggcgcacgacgagtactggcatgcgcacgtggacaaggtgaccatggcatcgaggacccagcgttcccgtagccagcagccgggccaaggtaacttcaggagggcccgtgtggaggcagccgcgccagtcgtgcacccacccccacgtccacccgctcctgttgcacagagtgccttaggaattctctgattttgatttgctgacgtgttaatcttttcatctgtgagtaaatgaagggaaccagcttttcacttctccagcatcatgtgtgcttgggctgtaggcctgggagcctgaggtggaggccaggaaagggacccagcaggacggggcacaagtccccatctgtgaatggacgggactcatccacccaggttcagcaaccccccgggactcgtccaggttcagcaaccccccggcccatcaaagactggctaaagcatcagccataaatggggacaaacgtggggccagcagcttctgttcggggtctcggcatcagcaaaccgcagcagctttggagaagggtccgtgagtggcggctctggaggcagcaacggggtcctttggggtgggtgggagttctgctggattcaggtggaggtgaacatctgccgttcccacagccctgcgtgcacccccaatgctgctggcccacaaatcaccgtgggccacggccccaccacaccaggcttggccctgtcagcggccagcatcccgagggccagggtccgagtgtcctcaccaaggaggctcttggcgtcgctgtgccggctcccatgggccttctgctgggtcgagggtaggtctcctcctccccctttgccctggcattaaactgatggtcaggctgggcgcggtggctcacacctgtaatctcagcactgcgggaggccgaggcaggaggatcacttgaggtcaggagttcaagaccagcctggccaacatggcgaaaccctgtctctactaaaaacacaaaaacaaattaatcccagctactggggaggctgaggcaggagaatcgcttgaacccagggggcagaagttgcagtgagccgagatcgtgccactacactccagcctgggtgacagagtgagactccatcttaaaaatataaaaataaagtggtggtcagaggagccccgaatagaccagttgtggagaggcctgggtggggtggctggcagggagggcaggccaagcccagtttctgcccacagtcacctcgaggtgactgtccagggctttgggcaccttcccgggagggggacggccgcccaccctgagtggtgttggaagctgggctctcctggatgccctgacccagctgcctggggagagccctgggcccctcctccctcagcacctcctccctcagcccctcctgcctcggtccctcctcccttagcctgtctggcatagatccatgttccctagcccctggcacaggtgcctctgactggagtgagggcctactgtggcccgggagctgctctgggggttgataaagggcagcattattgggtcctgggaaggagcgggcgtgaggccagctgaggcatggtgacccctgggaaggagcgggcgtgaggccagctgaggcatggtgacccctgggaaggagcgggcgtgaggccagctgaggcatggtgacccctgggaaggagcgggcgtgaggccagctgaggcatggtgacccctgggaaggagcgggcgtgaggccagctgaggcatggtgacccctgggtatgggggacttgggggccgcaccttggtttgcccagggcccctcctgcaccacgggccacatgcggaggacggcgtgggataggctccctgggtccacagcttctgcccgtgtatggggaaccctccttggtcagggctgcaggctctgggcagatggggcaggaaccctgaggctcccgcgccctcccatggcctctgatgtgggacactggagcgaggcacgattctgaaggactccatggatctgggaggatgaggcccacctccggttggtggccaaagccgtccttgcggggccggctgcttcacggacactctccgggtcgggctggtgggccccatcgtgggtgggaagtcgcctgagcctgggccgcccttgagcttctcccagtcttgactttccagagggtccgtggctgtggtcatggtcggggcaggtggaaaatgctgcatggaaacctgatcctgtcaccttggagtaaatgatgatgtcgccggcttctcgccacgtctaaaggataaatgcatttgaagaaagtgggtgttgggtttgttatgggttaaagtgcttttgaaataagtaaattattagtttgattttc

SEQ ID NO: 656705 - DNA, 198 bp, Homo sapiens
aaggtagcgcggaccaacaggcaggttgactgggcatcgattttatacagataccctaagccgtcttgaatttcccccctgaaaatcagctcttccttttgatcggacttggccaggctgcagtatttgtgcaaactgttaggtctccacttctcattgaagatagatagttccaagcttggaaatcactttacttat

SEQ ID NO: 656706 - DNA, 3096 bp, Homo sapiens
tgcaccgcacaaagcgcatgcacgctggagagctgtggttgtgtgtgtctgaaattcacatttgaccgggcgtattagccagttctggccctgattccctggaagggcatgcgccggtggccttggaaactgcgtctcaccctggctgtcccttcacaggctgcactccccgaaagtgcggcagaggtgtcaccgatgtcgtcatcaccagggaggaagcggagcggattcgcagcgtagctgaaaaggggctctccctgggaggatctgacggaggggcatccattctggacttgcactcaggggccctgtctgtcgggaagcactttgtgaacctgtacagatacttcggggataaaatacagaacatcttctcagaggaggacttccggttataccgggaggtgcggcagaaggtccagctcaccattgctgaggcttttggcatcagcgcatcctcgctgcatctgaccaagcccaccttcttctcccgcataaacagcacggaagcgcggacggcgcacgacgagtactggcatgcgcacgtggacaaggtgacctacggctccttcgactacacctcgctgctgtacctctccaactacctggaggacttcggcggagggcggttcatgttcatggaggagggtgccaacaagacggtggagccgagagctggtcgcgtctccttcttcacctcggggtccgagaacctacaccgcgtggagaaggtccactggggcacccgttacgccatcaccatcgccttcagctgcaaccccgaccatggcatcgaggacccagcgttcccgtagccagcagccgggccaaggtaacttcaggagggcccgtgtggaggcagccgcgccagtcgtgcacccacccccacgtccacccgctcctgttgcacagagtgccttaggaattctctgattttgatttgctgacgtgttaatcttttcatctgtgagtaaatgaagggaaccagcttttcacttctccagcatcatgtgtgcttgggctgtaggcctgggagcctgaggtggaggccaggaaagggacccagcaggacggggcacaagtccccatctgtgaatggacgggactcatccacccaggttcagcaaccccccgggactcgtccaggttcagcaaccccccggcccatcaaagactggctaaagcatcagccataaatggggacaaacgtggggccagcagcttctgttcggggtctcggcatcagcaaaccgcagcagctttggagaagggtccgtgagtggcggctctggaggcagcaacggggtcctttggggtgggtgggagttctgctggattcaggtggaggtgaacatctgccgttcccacagccctgcgtgcacccccaatgctgctggcccacaaatcaccgtgggccacggccccaccacaccaggcttggccctgtcagcggccagcatcccgagggccagggtccgagtgtcctcaccaaggaggctcttggcgtcgctgtgccggctcccatgggccttctgctgggtcgagggtaggtctcctcctccccctttgccctggcattaaactgatggtcaggctgggcgcggtggctcacacctgtaatctcagcactgcgggaggccgaggcaggaggatcacttgaggtcaggagttcaagaccagcctggccaacatggcgaaaccctgtctctactaaaaacacaaaaacaaattaatcccagctactggggaggctgaggcaggagaatcgcttgaacccagggggcagaagttgcagtgagccgagatcgtgccactacactccagcctgggtgacagagtgagactccatcttaaaaatataaaaataaagtggtggtcagaggagccccgaatagaccagttgtggagaggcctgggtggggtggctggcagggagggcaggccaagcccagtttctgcccacagtcacctcgaggtgactgtccagggctttgggcaccttcccgggagggggacggccgcccaccctgagtggtgttggaagctgggctctcctggatgccctgacccagctgcctggggagagccctgggcccctcctccctcagcacctcctccctcagcccctcctgcctcggtccctcctcccttagcctgtctggcatagatccatgttccctagcccctggcacaggtgcctctgactggagtgagggcctactgtggcccgggagctgctctgggggttgataaagggcagcattattgggtcctgggaaggagcgggcgtgaggccagctgaggcatggtgacccctgggaaggagcgggcgtgaggccagctgaggcatggtgacccctgggaaggagcgggcgtgaggccagctgaggcatggtgacccctgggaaggagcgggcgtgaggccagctgaggcatggtgacccctgggaaggagcgggcgtgaggccagctgaggcatggtgacccctgggtatgggggacttgggggccgcaccttggtttgcccagggcccctcctgcaccacgggccacatgcggaggacggcgtgggataggctccctgggtccacagcttctgcccgtgtatggggaaccctccttggtcagggctgcaggctctgggcagatggggcaggaaccctgaggctcccgcgccctcccatggcctctgatgtgggacactggagcgaggcacgattctgaaggactccatggatctgggaggatgaggcccacctccggttggtggccaaagccgtccttgcggggccggctgcttcacggacactctccgggtcgggctggtgggccccatcgtgggtgggaagtcgcctgagcctgggccgcccttgagcttctcccagtcttgactttccagagggtccgtggctgtggtcatggtcggggcaggtggaaaatgctgcatggaaacctgatcctgtcaccttggagtaaatgatgatgtcgccggcttctcgccacgtctaaaggataaatgcatttgaagaaagtgggtgttgggtttgttatgggttaaagtgcttttgaaataagtaaattattagtttgattttc

SEQ ID NO: 656707 - DNA, 3334 bp, Homo sapiens
gcggccgccgcctccgctctgagccccgccccgctcggccgccgattgctcgggcctggccgccagcccaggggccgatggccgagcgcgtcgcactcgcgtccctgcgccgtgcctgcctcgcgctccctgttacggcgttcgtccccgggcctggcgcccgcgtccggcccggctccgcggcggcctggtccgatggctcctcagcggagggccgcaaccaaggcgcccgagggcaacggagcggccgagcgccggaaccggagcagcaccaagaaggaccgagccccgcgggaggtgcagaggctgtggcagaggccgtggctaaggaccgcgggcctgggggctggctttgtgctcaccgcactcctgctctggagcagcttgggggccgacgacggggtcgcagaggtcctggcccgccgtggcgaggtcgtggcagggagattcatcgaggtgccctgctctgaggactacgacagtcaccgcaggttcgaaggctgcactccccgaaagtgcggcagaggtgtcaccgatgtcgtcatcaccagggaggaagcggagcggattcgcagcgtagctgaaaaggggctctccctgggaggatctgacggaggggcatccattctggacttgcactcaggggccctgtctgtcgggaagcactttgtgaacctgtacagatacttcggggataaaatacagaacatcttctcagaggaggacttccggttataccgcacggaagcgcggacggcgcacgacgagtactggcatgcgcacgtggacaaggtgacctacggctccttcgactacacctcgctgctgtacctctccaactacctggaggacttcggcggagggcggttcatgttcatggaggagggtgccaacaagacggtggagccgagagctggtcgcgtctccttcttcacctcggggtccgagaacctacaccgcgtggagaaggtccactggggcacccgttacgccatcaccatcgccttcagctgcaaccccgaccatggcatcgaggacccagcgttcccgtagccagcagccgggccaaggtaacttcaggagggcccgtgtggaggcagccgcgccagtcgtgcacccacccccacgtccacccgctcctgttgcacagagtgccttaggaattctctgattttgatttgctgacgtgttaatcttttcatctgtgagtaaatgaagggaaccagcttttcacttctccagcatcatgtgtgcttgggctgtaggcctgggagcctgaggtggaggccaggaaagggacccagcaggacggggcacaagtccccatctgtgaatggacgggactcatccacccaggttcagcaaccccccgggactcgtccaggttcagcaaccccccggcccatcaaagactggctaaagcatcagccataaatggggacaaacgtggggccagcagcttctgttcggggtctcggcatcagcaaaccgcagcagctttggagaagggtccgtgagtggcggctctggaggcagcaacggggtcctttggggtgggtgggagttctgctggattcaggtggaggtgaacatctgccgttcccacagccctgcgtgcacccccaatgctgctggcccacaaatcaccgtgggccacggccccaccacaccaggcttggccctgtcagcggccagcatcccgagggccagggtccgagtgtcctcaccaaggaggctcttggcgtcgctgtgccggctcccatgggccttctgctgggtcgagggtaggtctcctcctccccctttgccctggcattaaactgatggtcaggctgggcgcggtggctcacacctgtaatctcagcactgcgggaggccgaggcaggaggatcacttgaggtcaggagttcaagaccagcctggccaacatggcgaaaccctgtctctactaaaaacacaaaaacaaattaatcccagctactggggaggctgaggcaggagaatcgcttgaacccagggggcagaagttgcagtgagccgagatcgtgccactacactccagcctgggtgacagagtgagactccatcttaaaaatataaaaataaagtggtggtcagaggagccccgaatagaccagttgtggagaggcctgggtggggtggctggcagggagggcaggccaagcccagtttctgcccacagtcacctcgaggtgactgtccagggctttgggcaccttcccgggagggggacggccgcccaccctgagtggtgttggaagctgggctctcctggatgccctgacccagctgcctggggagagccctgggcccctcctccctcagcacctcctccctcagcccctcctgcctcggtccctcctcccttagcctgtctggcatagatccatgttccctagcccctggcacaggtgcctctgactggagtgagggcctactgtggcccgggagctgctctgggggttgataaagggcagcattattgggtcctgggaaggagcgggcgtgaggccagctgaggcatggtgacccctgggaaggagcgggcgtgaggccagctgaggcatggtgacccctgggaaggagcgggcgtgaggccagctgaggcatggtgacccctgggaaggagcgggcgtgaggccagctgaggcatggtgacccctgggaaggagcgggcgtgaggccagctgaggcatggtgacccctgggtatgggggacttgggggccgcaccttggtttgcccagggcccctcctgcaccacgggccacatgcggaggacggcgtgggataggctccctgggtccacagcttctgcccgtgtatggggaaccctccttggtcagggctgcaggctctgggcagatggggcaggaaccctgaggctcccgcgccctcccatggcctctgatgtgggacactggagcgaggcacgattctgaaggactccatggatctgggaggatgaggcccacctccggttggtggccaaagccgtccttgcggggccggctgcttcacggacactctccgggtcgggctggtgggccccatcgtgggtgggaagtcgcctgagcctgggccgcccttgagcttctcccagtcttgactttccagagggtccgtggctgtggtcatggtcggggcaggtggaaaatgctgcatggaaacctgatcctgtcaccttggagtaaatgatgatgtcgccggcttctcgccacgtctaaaggataaatgcatttgaagaaagtgggtgttgggtttgttatgggttaaagtgcttttgaaataagtaaattattagtttgattttc

SEQ ID NO: 656708 - DNA, 3693 bp, Homo sapiens
ggcacgaggcacagctcacgaggctcagctgtcctccatccttccccctgtcctttggtgcctctgtttgcaagatgtgcagaaacaccagagggccagaggagaccctccttttactgaatgctggcagcctcctgagaaccacgtctgccagcagcagagagcagagagtgtggacgagcatgggcgactgaggtcccaaatggcgcgagccgctgggccctcctgcttgtgccgatgtctcaggctcgattgaagctggaagaaaccaaggacaatgtgtcctttaaaagtgtaaggttagaaggtgccctgactccagccgacctggaaaaggacgtgtcctgcatatctggaggtggcccacagggtccgggaaagatcggctgccttgcctgcatcccagggcgcttcccggcctccattaagaggtgaccattgcatccacgtgatttcttttgctccactatttccaggcacagtgcaactgactccctcttgaagctagaatgccctgcacacccgggatggacttctctcccctttcaaagatcgagtgaagtttgcaaatgtgaaaggaaggaattgcatttccagtggtaacctttgaaggggaatgaaattgtcacaggacgtcaggagccacgtgggggagcccggtgtcctctgagtctcaacgccccttgcttcccgcttggtgacggtcgatggctgtgtccagcggtgaacgctttaccacaggactctacggtggggtaggcagcgccacttcaatgtgaagacaaatgaactggcgtctcttgagataggcccctgcctccaggacctctcaggccccgggccctggttactgccgtggaagctgcctgttcagacgtcatctctatcaccccttgaagggagacagagaggtgtttgcgagttggatgttttatcttgtctttcctgattctttgttagaacacccccagggcttggtttttgttctcaacctgtgattagaaataagatcctaaagtgtcagatctggaaggcccatgagagctgaggagatcaaatgcccggagctcgggagatcagatgacctggggtgtctggagccagtggtggcctcatctgcagcatcttcctctgtcctgcccaccacagagtccctgctggccccggggggcccctcctccgccacagggcccctgagcattgctgcgtttgtttctccagctcctccttcctgcagaagcagttcccagaggggcaatttctccagcctgcctggtcgcgtctccttcttcacctcggggtccgagaacctacaccgcgtggagaaggtccactggggcacccgttacgccatcaccatcgccttcagctgcaaccccgaccatggcatcgaggacccagcgttcccgtagccagcagccgggccaaggtaacttcaggagggcccgtgtggaggcagccgcgccagtcgtgcacccacccccacgtccacccgctcctgttgcacagagtgccttaggaattctctgattttgatttgctgacgtgttaatcttttcatctgtgagtaaatgaagggaaccagcttttcacttctccagcatcatgtgtgcttgggctgtaggcctgggagcctgaggtggaggccaggaaagggacccagcaggacggggcacaagtccccatctgtgaatggacgggactcatccacccaggttcagcaaccccccgggactcgtccaggttcagcaaccccccggcccatcaaagactggctaaagcatcagccataaatggggacaaacgtggggccagcagcttctgttcggggtctcggcatcagcaaaccgcagcagctttggagaagggtccgtgagtggcggctctggaggcagcaacggggtcctttggggtgggtgggagttctgctggattcaggtggaggtgaacatctgccgttcccacagccctgcgtgcacccccaatgctgctggcccacaaatcaccgtgggccacggccccaccacaccaggcttggccctgtcagcggccagcatcccgagggccagggtccgagtgtcctcaccaaggaggctcttggcgtcgctgtgccggctcccatgggccttctgctgggtcgagggtaggtctcctcctccccctttgccctggcattaaactgatggtcaggctgggcgcggtggctcacacctgtaatctcagcactgcgggaggccgaggcaggaggatcacttgaggtcaggagttcaagaccagcctggccaacatggcgaaaccctgtctctactaaaaacacaaaaacaaattaatcccagctactggggaggctgaggcaggagaatcgcttgaacccagggggcagaagttgcagtgagccgagatcgtgccactacactccagcctgggtgacagagtgagactccatcttaaaaatataaaaataaagtggtggtcagaggagccccgaatagaccagttgtggagaggcctgggtggggtggctggcagggagggcaggccaagcccagtttctgcccacagtcacctcgaggtgactgtccagggctttgggcaccttcccgggagggggacggccgcccaccctgagtggtgttggaagctgggctctcctggatgccctgacccagctgcctggggagagccctgggcccctcctccctcagcacctcctccctcagcccctcctgcctcggtccctcctcccttagcctgtctggcatagatccatgttccctagcccctggcacaggtgcctctgactggagtgagggcctactgtggcccgggagctgctctgggggttgataaagggcagcattattgggtcctgggaaggagcgggcgtgaggccagctgaggcatggtgacccctgggaaggagcgggcgtgaggccagctgaggcatggtgacccctgggaaggagcgggcgtgaggccagctgaggcatggtgacccctgggaaggagcgggcgtgaggccagctgaggcatggtgacccctgggaaggagcgggcgtgaggccagctgaggcatggtgacccctgggtatgggggacttgggggccgcaccttggtttgcccagggcccctcctgcaccacgggccacatgcggaggacggcgtgggataggctccctgggtccacagcttctgcccgtgtatggggaaccctccttggtcagggctgcaggctctgggcagatggggcaggaaccctgaggctcccgcgccctcccatggcctctgatgtgggacactggagcgaggcacgattctgaaggactccatggatctgggaggatgaggcccacctccggttggtggccaaagccgtccttgcggggccggctgcttcacggacactctccgggtcgggctggtgggccccatcgtgggtgggaagtcgcctgagcctgggccgcccttgagcttctcccagtcttgactttccagagggtccgtggctgtggtcatggtcggggcaggtggaaaatgctgcatggaaacctgatcctgtcaccttggagtaaatgatgatgtcgccggcttctcgccacgtctaaaggataaatgcatttgaagaaagtgggtgttgggtttgttatgggttaaagtgcttttgaaataagtaaattattagtttgattttc

SEQ ID NO: 656709 - DNA, 460 bp, Homo sapiens
  misc_feature (13)..(13): n is a, c, g, or t
  misc_feature (16)..(16): n is a, c, g, or t
  misc_feature (33)..(33): n is a, c, g, or t
  misc_feature (37)..(37): n is a, c, g, or t
  misc_feature (45)..(45): n is a, c, g, or t
  misc_feature (89)..(89): n is a, c, g, or t
  misc_feature (124)..(124): n is a, c, g, or t
  misc_feature (163)..(163): n is a, c, g, or t
  misc_feature (198)..(198): n is a, c, g, or t
  misc_feature (205)..(205): n is a, c, g, or t
  misc_feature (390)..(390): n is a, c, g, or t
  misc_feature (437)..(437): n is a, c, g, or t
  misc_feature (448)..(448): n is a, c, g, or t
tcgagatcttacnccnaaaatttgacccatggnaaangtccatcngtcataccttgttttttaatgaaaaaatatctgaaccattcacnaagtctggtctatgtgcttaatgaaatgcctgttncttgtataccactggacaaccacaaaccatttctcttcnaaataacaatatccgcaagcagatatatagagacnatgtgtntaaaaattaaatgaaagcaaagctctggaaactcagcctcctctctcaaatgaaaatactacagagatagcacaagataaacgggagccctggttctgcagagctcttctggacgaaagagtcattttctccctttaacaactatcaagaaatttttttgttttagatccctcctgctggtcacntttagaatggctcttaaaaaggttctgaactattgtctcctcagttnaaggtttcagngactcaaagtca

SEQ ID NO: 656710 - DNA, 1128 bp, Homo sapiens
  misc_feature (663)..(663): n is a, c, g, or t
gcggccgccgcctccgctctgagccccgccccgctcggccgccgattgctcgggcctggccgccagcccaggggccgatggccgagcgcgtcgcactcgcgtccctgcgccgtgcctgcctcgcgctccctgttacggcgttcgtccccgggcctggcgcccgcgtccggcccggctccgcggcggcctggtccgatggctcctcagcggagggccgcaaccaaggcgcccgagggcaacggagcggccgagcgccggaaccggagcagcaccaagaaggaccgagccccgcgggaggtgcagaggctgtggcagaggccgtggctaaggaccgcgggcctgggggctggctttgtgctcaccgcactcctgctctggagcagcttgggggccgacgacggggtcgcagaggtcctggcccgccgtggcgaggtcgtggcagggagattcatcgaggtgccctgctctgaggactacgacagtcaccgcaggttcgaaggctgcactccccgaaagtgcggcagaggtgtcaccgatgtcgtcatcaccagggaggaagcggagcggattcgcagcgtagctgaaaaggggctctccctgggaggatctgacggaggggcatccattcccggaccggcgtgcctgcctcgtgctccgctgttncggcgttcgtccccgggcctggagccctgcgtccggtccggctccgcaggtggcctggtccgatggctcctcagcggagggccggaagcaagggcgcccggagggcaacggagcggtcgagcgccggaacctggagcagtaccaagaaggaccgagccccgcgggacggtgcacgaggctggttggcagaggcccagtgggctaaggaccgcgggcctggagggctggctttgtggctcgccgcactccctgctctgggagcagcttgggggccgacgcacgtgggtcgcaagaggtcctgggccccggcgtggacgaaggtcgcgggcaagggagaaacactcgagggtggcacgggagctggagggagtaccgacagggcaccagaaggggacgaaggcgctgcaagacccagcaaagatgcggccaaacagtgtcaaccgaagagtaggacaaccagccaag

SEQ ID NO: 656711 - DNA, 900 bp, Homo sapiens
agcgggaggggactgacgccgagacgcgcgcgggtcagcggcgcggggacgcggggcgctgggcgcggggctgggggcgcaggccccgaggccgcaggagcgcacggagcggcgatgagcaggcggaccggtggaccggggggcgcggagcccgtgacagcctcggccaggcgggcgctgtgatggaggccgagaggcctggaactggctcctggtgccactgcaccagctggtgtcctggggtcgcggccgcggcgcatggtcttcgagatgggtgtggtgccctacgtcccgtcgagtatctggagacattcggcaagggacgcagtaacgccgacggtttctccacctactgttgtgctcatggtgctgctggtgggcaatattttgcgggatagtcttctgagtcttgctctgtcgccaggctggagtgcagtggtacaagtctcggctcactgcagcctctgactcctgggttcaagtgattctcctgcctcagcctcctggagtagtctgggcactacgaggtgcctgccagcgatacccaggtttggcaggcgctttgagtccccgctgctgtggcagagcgccatcgatgatcctgacatgctgcttgatgcttgaagctgtgcaccgaggtccgtgtggcccacgagcttcaatgtctggtgccgctcctttgcaggttgcgatgccgggtgtcagaagtcatgttgcccccaggcggtcctctccggcctcaggatggtgctcctgtggacatgcgttgagccttcaagacggtctctctgctgagggtgccctctgcgtttccgggtgccgctgctcgcggtgcggggcgctggccctgggcggccggcttgcgtcccccgaggggctccgtgcccgggcggccgcggg

SEQ ID NO: 656712 - DNA, 515 bp, Homo sapiens
  misc_feature (449)..(449): n is a, c, g, or t
  misc_feature (477)..(477): n is a, c, g, or t
taattcaattaaaacccttcccttaaaatttttttctttcgaaggggggggttttttaaatttgaattaggaacggtatgaagtcatagataataggccctgtccccttaggtagtaggaaaaattccaatttttttaaatcatttatttggatttttatgttttattagcattttcaaaaagacgggttttttagagaataatcatatatatgcctacgtaaaaatggcccccagtgacttatttggagttgttagttgccccgccccctagtttgttagggcatttgagccccccttttaattttcctctaattaaaaagggcaggattttcagtgtcaaaaatatttaactatttaaagaatgatttccccctttatgttttaaaatcctaggcatctgcggtaaaaaaattttaaaaaaagtttggaatttaaaaaaaaacttgngttactaatttgtaaaacccaaatttgngcaatggaaaataaaaatcccaaagttgttttactaga

SEQ ID NO: 656713 - DNA, 209 bp, Homo sapiens
  misc_feature (186)..(186): n is a, c, g, or t
  misc_feature (207)..(207): n is a, c, g, or t
ggggcctgtagtcccagctactcggggggctgaggcgggagaatggcgtgaacccaggaggcggagcttgcagtgagccacgatcgcgccactgcagtccagcctgggagacagagcgagactccgtctcaaaaataaataaataaataaaattaagtagataatgtcattaccactggacattgngccagtttgtacttctaccgngg

SEQ ID NO: 656714 - DNA, 532 bp, Homo sapiens
attaaaaatctacttgggatgttggataacaaagtatcccagtaggatggcccttgtttattgttcttttaagacagagtctcgctctgttgccaggctgcagtgctatagtgcggtggcgtgatctcggctcactgcaaccctgcctcccgggttcaagctattctcttgcctcaacctccccagtagctgggattacaggtgcccaccatcacgcccagctaattttggtatatgaagtagagacggggtttcatcatgttggccaagctggtcttgaaactcctgacctcaactgatctgcccgcctcggcctcccaaaagtgctgggattacaggcgtgagccatcgggcctggccaggatggcgccttccttagagatgtctctcaatctttagtactcagtatggctagaaaattggtgtggggatccgaaaggttactttcctatgactagaaactcagtgaccctggttcatagggtaggttcatccaatccagtgtaagcctccgggaaaatcaagaagatcc

SEQ ID NO: 656715 - DNA, 779 bp, Homo sapiens
agcgggcgtgtgccatgaagacccggtccgggagcagtcgactgccggagactcgggaggctgagctttcctcggcctgagccagccagaccccgggcactggctcaccctcattcgccgccacgtccgcgaaggcctcacgcgcgaggccaggcgaggccccgagggcccaccattcacgacaccggagcgaacgggcgccagagggtggaacccccttgcccgaatcctgccggtgggaagtggctgcagtttgaatccaaacgggcacttcgcgggaagacagccgttcggaccaccgcagttcccgggggcttcccaaaggggcctttgtgaccggacgccgaccatccggcgtcttacgtccgcggaaagcacccggggaaacacaatccgaccctcggggagaacaatgcttgagatgcgaggaaagccgtgtcttgggaacatcggaattctaaccccaagggtgacagggatcaagacaggcgaggtgcaatcaatgctgaatttccaagggtcgaactggaagtttcgaacggaaagacagaatcgccggagaatagttattacaaaattcaatttttcagctggaatatctggtaccggttggtgaacaagcttcacgatgggttggtgccacggaaaaaaaaacagggggttatacagtgaactcaggtttattgttattaggaagcgcaaacaatatttttatggggtattggagactagaaagaagttgggaacagaaacgtattagtagaggattggggaatgac

SEQ ID NO: 656716 - DNA, 141 bp, Homo sapiens
ggggggggttttttttccccccccccccccttggggttggggggggttttccccccccagggggtgtttttttttcccccccactttggtttttggggggccccctttttccctttttttagaccccaaaggctgttttta

SEQ ID NO: 656717 - DNA, 141 bp, Homo sapiens
atatttcttcatagcagtgtgagaatggattaatagatacgtatgataaagtttataaattggacgcagtaagagattaacaataaaatagaacaattataataatacactataataaaatgtatgtgtaattctctaccc

SEQ ID NO: 656718 - DNA, 218 bp, Homo sapiens
ggcatcaaataattttatcatgccctctcacaggtattgtgttataattgtaagcccatattacttgtcgttcagtcagttatgtctctataggtaacataatgacagtagtgtaaagtttctgttccagaaacatatattgtaaagttactttataacaagatacctgccacaggaaatggtcttactttcaaatgacttttaaagcatgtattatt

SEQ ID NO: 656719 - DNA, 107 bp, Homo sapiens
tgacacttgacagattttcctgagtgaacctgcggacgctgcgcggtactacaatcagagctgaggctgggtctcacaccctgcagtgaatgcatggttgcgagttg

SEQ ID NO: 656720 - DNA, 146 bp, Homo sapiens
caattccattccagcgtatcgcaagcgaccgcaggtcagactctccaaattcatacttcttggaccaccccaggggtgcgtatcgtaagcgttctgggatgatcgcatgaaaccaggccagcaggaagtacgcgggaatggaatgg

SEQ ID NO: 656721 - DNA, 328 bp, Homo sapiens
atcctaactaaattggggcttgtaatactcggtattatgtgccaaggtattgaagaacctctacacagtgagaggcccagagcaaaggtggatcctcgcgccagcatgaagactcgtacacaggtgtttgtgagaagacctggtacatacgtgtgtggacatagttggaaatgccggctgaataaagtgagtggtttttagtgactaaaggagaataaccgaaaattgagagagtggggaatgttctatgttctatgtaaaagggaaaaagagagacatacggctccctctctggatttcaagattagatctactagccttttatcac

SEQ ID NO: 656722 - DNA, 574 bp, Homo sapiens
tatacgaatatcggcgggtagtaattgatttaaaacgtgaacatagggtattcccctgctgtcgttggtcggatcccgctgttcctcatctgttaaattggaccggacttctaccgatataacttggttcatggcgctaactcccttgtctgttctcccacatctgctaaatttatagtcttgtaaacccatcgagggaccaagtttccacttattcatgccctccaaaatggtcccctctactgtaggcaccggtgtgtattctttttgaccagctaacccattgtaattccatcccaaataggcaaatctcaaggcgatgaacctggtattatgtttagaaaagtcaaacttcttcggaccctttttcgccttgcttctcgtaccctcttcttgcgaaattttgcgctttttgttatcctcccccccctggaatttttcagaatgtggcttatttgcgttttctagttcagtgatccttcgtattagctgctctttggaccagtttgcgtaaatggagtccttcttactaacaatagcattggtacctgttgaaatccctttcattttccca

SEQ ID NO: 656723 - DNA, 216 bp, Homo sapiens
ggctcgaagtcgggcagagcaggtatgagcctgatgggttctgcccttcaccgccaggttttggtgttttcttaatttatgttagagatggagttcactcttgtcgcacaggcgggagtgcaagggtgcgatctcggctcactgcaaccttcaatcacctcccaggttcaagtgattctccggcctcagcctcccaagtagctgggattacaggca

SEQ ID NO: 656724 - DNA, 1751 bp, Homo sapiens
  misc_feature (1248)..(1248): n is a, c, g, or t
gcgggcgggagcctcggcgcggactgcggggcgcgtggcggctgctggggcacgcgggcccgagcgggactggccggctgcgagtgggcggcctgcggagctggggctgggaggggacggtcctgccgggaggaggcggaggcaggacagggtggggttgcgggcccggcgccgcccctcccggctcctggctcccctcgcctggtgccccgcgcctggccgggaggcggcgggtctcgatcgcgcgggcctccctggaggggcgcgggctctggcggcggggaggcccctgctcagcgcaatggcgggcttgcatccttgggtgattttttcgggccccttgtggcctttgctcacgcctagagagcaaaccacccgcaccacccaggagcagataaaatcgagaccacagcctgcaagggagcgcgcctccatcctgtttgcccctcgggtcgccgtctgagggcgggcccgtgcccgctcagagcctacatccgagtcgtataaagcgctgacagcagagaaagctgcggctttgctccgtgcagatgagcaggggctgagggaggacgctgtgctctcagtagccgcgcttggcccggggaccctgcaggcttagaaacgtgagtcacgcctgcagcgtggcgaggaaacgccgttgatgtggcatcctcagcctggggttgtggctttaagccagaaggtcaaaaaaagaagtcttcctgagctgagactgccctgagtcgctttaggggcgaaattccgagcatccggttgcatttcctgaggatgacacgcgtggtgggtgtggacggcctacaggggtccatcctcagcggcccctctgcagggcagagtctcgctctcactctcccagctgactcctctcaagcctgttaaccattgtacacgttcccaaggactccaagcaggttggacttcagggaacattgcagtttgggtcttggccattgtttacactccaccttgcataagtgcttgaggatcacacaaccagatacgtagatcatccgtagatcatcgcagtcacatcgaagatttgtttataataggaaaaaaaaaagctgcccactgtcatgcgctgggaaactggtgagctgaaggatgacccatctgtaaatggggtgctccctaatggacagggcacccttcagaagcctgtgctgtgtctccttgaccccactgtgagctccccgtcccgcacgctgatctaaatcaagctgctancctcatggagaggcgtccgcacggcagccccggccctgagatgcggggcagtcacccattcaattaggaaacaccagcaagtgccagaagcttctcattagcaggtcagctttcaataactggtttatccaggtgtgtgagacccgataagcagaagggaaagctcttagcgacctatccagctgctctgcactgggctcctgacatcccagaaatcagtacatctgtcttctggggtccaagaggtatttcagtttctctggctttgtttcccgtcatttgtacctggccctgcagactaccccagtatttccatcataatacccctgtgggcaggtgcatacctcatgacaatatttaatattaatagatttctgtgttgtctccagaatggaaaggggctgtctattccttgagctagttggcttgctaaagactattgacttcattcttcttttcctatctacctaataaaccagtgttcatacaacccaaaaaaaaaa

SEQ ID NO: 656725 - DNA, 1677 bp, Homo sapiens
  misc_feature (1174)..(1174): n is a, c, g, or t
gcgggcgggagcctcggcgcggactgcggggcgcgtggcggctgctggggcacgcgggcccgagcgggactggccggctgcgagtgggcggcctgcggagctggggctgggaggggacggtcctgccgggaggaggcggaggcaggacagggtggggttgcgggcccggcgccgcccctcccggctcctggctcccctcgcctggtgccccgcgcctgctcagcgcaatggcgggcttgcatccttgggtgattttttcgggccccttgtggcctttgctcacgcctagagagcaaaccacccgcaccacccaggagcagataaaatcgagaccacagcctgcaagggagcgcgcctccatcctgtttgcccctcgggtcgccgtctgagggcgggcccgtgcccgctcagagcctacatccgagtcgtataaagcgctgacagcagagaaagctgcggctttgctccgtgcagatgagcaggggctgagggaggacgctgtgctctcagtagccgcgcttggcccggggaccctgcaggcttagaaacgtgagtcacgcctgcagcgtggcgaggaaacgccgttgatgtggcatcctcagcctggggttgtggctttaagccagaaggtcaaaaaaagaagtcttcctgagctgagactgccctgagtcgctttaggggcgaaattccgagcatccggttgcatttcctgaggatgacacgcgtggtgggtgtggacggcctacaggggtccatcctcagcggcccctctgcagggcagagtctcgctctcactctcccagctgactcctctcaagcctgttaaccattgtacacgttcccaaggactccaagcaggttggacttcagggaacattgcagtttgggtcttggccattgtttacactccaccttgcataagtgcttgaggatcacacaaccagatacgtagatcatccgtagatcatcgcagtcacatcgaagatttgtttataataggaaaaaaaaaagctgcccactgtcatgcgctgggaaactggtgagctgaaggatgacccatctgtaaatggggtgctccctaatggacagggcacccttcagaagcctgtgctgtgtctccttgaccccactgtgagctccccgtcccgcacgctgatctaaatcaagctgctancctcatggagaggcgtccgcacggcagccccggccctgagatgcggggcagtcacccattcaattaggaaacaccagcaagtgccagaagcttctcattagcaggtcagctttcaataactggtttatccaggtgtgtgagacccgataagcagaagggaaagctcttagcgacctatccagctgctctgcactgggctcctgacatcccagaaatcagtacatctgtcttctggggtccaagaggtatttcagtttctctggctttgtttcccgtcatttgtacctggccctgcagactaccccagtatttccatcataatacccctgtgggcaggtgcatacctcatgacaatatttaatattaatagatttctgtgttgtctccagaatggaaaggggctgtctattccttgagctagttggcttgctaaagactattgacttcattcttcttttcctatctacctaataaaccagtgttcatacaacccaaaaaaaaaa

SEQ ID NO: 656726 - DNA, 1701 bp, Homo sapiens
  misc_feature (1248)..(1248): n is a, c, g, or t
gcgggcgggagcctcggcgcggactgcggggcgcgtggcggctgctggggcacgcgggcccgagcgggactggccggctgcgagtgggcggcctgcggagctggggctgggaggggacggtcctgccgggaggaggcggaggcaggacagggtggggttgcgggcccggcgccgcccctcccggctcctggctcccctcgcctggtgccccgcgcctggccgggaggcggcgggtctcgatcgcgcgggcctccctggaggggcgcgggctctggcggcggggaggcccctgctcagcgcaatggcgggcttgcatccttgggtgattttttcgggccccttgtggcctttgctcacgcctagagagcaaaccacccgcaccacccaggagcagataaaatcgagaccacagcctgcaagggagcgcgcctccatcctgtttgcccctcgggtcgccgtctgagggcgggcccgtgcccgctcagagcctacatccgagtcgtataaagcgctgacagcagagaaagctgcggctttgctccgtgcagatgagcaggggctgagggaggacgctgtgctctcagtagccgcgcttggcccggggaccctgcaggcttagaaacgtgagtcacgcctgcagcgtggcgaggaaacgccgttgatgtggcatcctcagcctggggttgtggctttaagccagaaggtcaaaaaaagaagtcttcctgagctgagactgccctgagtcgctttaggggcgaaattccgagcatccggttgcatttcctgaggatgacacgcgtggtgggtgtggacggcctacaggggtccatcctcagcggcccctctgcagggcagagtctcgctctcactctcccagctgactcctctcaagcctgttaaccattgtacacgttcccaaggactccaagcaggttggacttcagggaacattgcagtttgggtcttggccattgtttacactccaccttgcataagtgcttgaggatcacacaaccagatacgtagatcatccgtagatcatcgcagtcacatcgaagatttgtttataataggaaaaaaaaaagctgcccactgtcatgcgctgggaaactggtgagctgaaggatgacccatctgtaaatggggtgctccctaatggacagggcacccttcagaagcctgtgctgtgtctccttgaccccactgtgagctccccgtcccgcacgctgatctaaatcaagctgctancctcatggagaggcgtccgcacggcagccccggccctgagatgcggggcagtcacccattcaattaggaaacaccagcaagtgccagaagcttctcattagcagaagggaaagctcttagcgacctatccagctgctctgcactgggctcctgacatcccagaaatcagtacatctgtcttctggggtccaagaggtatttcagtttctctggctttgtttcccgtcatttgtacctggccctgcagactaccccagtatttccatcataatacccctgtgggcaggtgcatacctcatgacaatatttaatattaatagatttctgtgttgtctccagaatggaaaggggctgtctattccttgagctagttggcttgctaaagactattgacttcattcttcttttcctatctacctaataaaccagtgttcatacaacccaaaaaaaaaa

SEQ ID NO: 656727 - DNA, 956 bp, Homo sapiens
ccctgcagtcgtggagctggtgacctcctggttcctctggacaaggaaggaaaggtgcctcttcctctggccatggcctgtgccagtgcttggggcccaaaagaggagctggatttcagcttcacttgccctttagcaccggctctgttccagcccagtgcaatggctgagcaggtgcttgtgtgtgggcacagggaaagactatagcagagtgtccccataccatcttagcacaggaatccagcttgatggcaccatcttagcacagtactctccctctgtgtgtgtactgtgggcccccaccatcttagcacagtactccagcctaatgcacctattgtagaactttctctctgtgtgtactgaaaatcaagtaagctctgcaaagcaatcaatgttccacaaggtgagggggcatttgagacccagtggtgtatgtgcttccgaaagagactgcacatcctcttgccagctcccacatccagaaaagcctggtgttcccaaccctcaaccgtcaaaaatattttattataatctatgtatgggtctctctctgtctctgtctctgtctctgtctctctctctctctctctctctgtgtgtgtgtgtgtgtgtgtgtgtgtgtgtgagcgcgcgccttgtgtgtgtgttgtgtatttggcgcggggggtcacaagaacaattgggggaggtggctctcaaccatcacgtgggtcctgggagaaccacgtgggtgtcagctgggggcgttagcatttggaatgcctaacccaaatttacgggggtgccgacgcgggtggtaaccccggagtgggcactgtgcgacaatacagggcaccccttgattaaagcccaacagatgggattcacaaggcgcttagacacgcgtaatggaaggacaattgtgtacccctttgtctctaggatggagcccgccttcgtcatcgcccgaattt

SEQ ID NO: 656728 - DNA, 92 bp, Homo sapiens
ccctttttttatgggttttttttccggggggggttgcttttttctggggtctttgagccccaaaaaataaacacttcctttgggggggggca

SEQ ID NO: 656729 - DNA, 235 bp, Homo sapiens
tgcagagaatcgggcagagacctctgcagctttgaaaatagttaccgtgaagtcatcgtaaagaaaataacctttgcaaaaatctaccgtgtagctcataaaaccacgaacaaattagaccttgcgataaaggctatttacgaaagaacgaacactgaattaatccacatttacgaattaatcagattaggccattcatacaaaaagaatcttgcacagatagttttacagacag

SEQ ID NO: 656730 - DNA, 338 bp, Homo sapiens
atctctagagcatccccgatcgaggtctttccgctccatatctgctacagcttaggacggcattcacagcaagtctcagccatctgtcgttaataacatagaaccccactttggagcccagcgtggttgtcgctgtctgaatcaggggttcggtgtcctttatgtcaacaaggacgctatcgctgatcttgtccaggtgttcattagcaacgcgagcagcctgctcatagccatcggctattctgatagggtgaatgcctcggtctagcaattgtctccgtcttcttctaacatggcgaccagccaggacaaccactcctgtggttccatctccaatt

SEQ ID NO: 656731 - DNA, 719 bp, Homo sapiens
ggcagaaaaatgggcagccgcgctccggactcacgtgtgagtgaggaagaaaacctgaaaaatgacccaaagaagaagatgacaatgtgtaactggagcctgtagctgtcggtgctggaagacgatggccacaggacacttctgatacgtgacaggacagctgtggcatcgcgacacaagggaccacttttattcttgatgatgacgcaatagaagctgacagtgagcggtgatgctgatgcccctgtgaccaacatgaaacacttgaacatattgattcgggacgaatcaagtagtatggggcacctacatacttggggcttgggcgcagtgacattgctaacttgtgcttaaacatgttccctttcaaaggcaaatggcaacaaaccttccgcttgaagcaccgaggttaaacgaacctttaacgtaattttcctttggggttccaaatcgtaagatttacgcgcgaaaaggcttatggggacaaaaaaacgggggaaaaacaactaaggaataacaagttttaaatagggcaaatgtatagaaggaaccttacgaaggggattacaatttaaaaacaactaggtcgttggaataaaagaagggcttgggaagttgggtgacaaagtgcattgttggcagatgttaagagagcccagatgttgtaccaaggacaagagagacagaaaggaaatcttcggagaattgcaaccagggtc

SEQ ID NO: 656732 - DNA, 175 bp, Homo sapiens
tctccgctcactgcttagaatgagttggtgggatccttgtggaacgccaaactggagcggaagtcttggatcatgtcccatccagtccagtgaatccacgacccgcagaccttgcccccctgcaacatgttataccatggaatgcaggaccaggtgatactctcgcagcttgtgg

SEQ ID NO: 656733 - DNA, 645 bp, Homo sapiens
agagagaattccccccggcccttccctggaaaaatttttggccccctcccccccggggtgggcccaataaatctaaaagcctttgcgcgccccccccaaaaggaacccaggcccctacgttttttgccctagaaaacccaaaattttgacctcccccttccttttacctaaaaggaaaagaataagcctgcggccccaaattccagcccattttaagacatgatggaaattgtccaaaaattcactttccattctgtgagggctggaaccgcggccggggacttctgcttttggcccatcaacgggcggagcaaaaacttcggctcatgttgaaacttcgtgaaggagacaaagcccatatacctgggaatggtcaacccaggagtttctctgaacgggaataaagtatcataacaaggacagccagggggatggttaccgcatcggctttggccagtgtgctgaaaaagtcctgcctgctctcctgccatcatgagattttctctgctcttctgcaaacaaagggctcaagaacccctttaaaccctgtgactggggtcctccctcgggcagtaggcatggccctccattcaataacaaataaagccattgtgctctaaggccggccctgccaaaaaaacaaaa

SEQ ID NO: 656734 - DNA, 427 bp, Homo sapiens
  misc_feature (249)..(249): n is a, c, g, or t
  misc_feature (300)..(300): n is a, c, g, or t
attgcaccattgcactccagcctaggcaacaagagcgaaactccatcttaggaaaaaaaaaaatgtagaatcatccacaactcctctatctctcctaccttacaaacagtccatcaagaattctagttacctcaacttcaaaacatatctagaatccagctatgcctcaccacccccattgccaccattttggtccaagctaccattatctgttgcctggcttggtagcagagtgctctctctgctttnttcccacaccttgtacaatgttgttactctccatacagcacagagactgantttccaaaacaaaatttaattaaaagtcatttatttgcacaaaacccttcagtggtttccatctcaataagagtaaaaagcacactttacaacagcctaaatggccttacaggatctgacccctgtt

SEQ ID NO: 656735 - DNA, 1557 bp, Homo sapiens
  misc_feature (301)..(301): n is a, c, g, or t
  misc_feature (1484)..(1484): n is a, c, g, or t
gggataagcatgaggactgagaatgacagtccaggatacgctacgtgacggtgcgtatgggacgagcgtcgagggacctttgcggcgcccacgggtgagtcattggcgacggtgcaggcttggcgaggcatgtctcggggcctctgagtgagctcgccccaacggatgtgaacagccgcaaggtggcacacctgagcttcttgggatcttccttgggagaatgcttgagcgagaaggtgcagcgtcttgtatgtacacggagcgatttggaaggtgaaagtaggagatcagaggcacgtgnacgatgacgtgaattgatcgatattagttgagagggagttgaaatgacttgtaggtgaatgcgatcgcgtatggaattgtgtggattcgatgcgttgcgctagtggcctcgaggacgtgttggggtgcgagggctcaatgagagttgtaggtatattgtccattagtgtacacagataagtaaccttccgaaccgatcgcggtgtgccctcgattgtgagaagttgatcccgtggctagttacgcaaggaaagcgcgagccatcttctctgccaccaccgttgtgggggccagctcacttggagaatcgttggaagcgctgatgtcgacaattgggttcgaaccctaacacgccgaatagagcaaaccctggaggctaggcgcgactagttgcccccccggggacttggcggccgacatgctttttcggcggattggggggtccgatgcttgtggaggcggactttcttttcaggaaaggcgttccgaggggttcccagccgttgaggtgtgaatccgcaccttcaccccgtccggtgctgaattgggggcggcgcttccgatgtatcccacctgaaacggcaggtgttgcggaggctaacatgggccaacccgcagtggccccccttatggtgttgggcggtattggacacgccgcgattcctcttttctgtggagtcgcgacgaaccgctgcggggcgcttgaattggccaatgttgctccacagcgttccaccccccgtggttaggcaaagttagagcgacacgccgcccatgttcaaataccgcggattacttggtgagggagttcacacgtgggcggcttctcctggagcgcgctggttgtgtgttcgcctttgcgcccaaaaccattgcggtgtgccgccgtagtgtgtacattacctcctctggcgtcgccagacgaagtttgccaccgggggggtgggtaaggacggaagttcgaaaggacacttttgggattatatgtgccacatgaacatttttacttagggacagaatgggatttacatgtgcttacgtgaggaatttacctagtcttatatttactctatatttcgcacagttattattgtgggacaccacgttgggagagagctactctaggtgagttggacaacccacaggcttagtctgttgagaagagacgacgaagaataggaganaagcaagagacatagatggatcaacagcagggaaggaggaatataaagcaaagtcgatgagcgcgggggtaga

SEQ ID NO: 656736 - DNA, 256 bp, Homo sapiens
tgcagggtaaagtcatagtggagagtagagtcagggcatagaagacgtgggcgtgccaggaatcttcagcttccggtcatctgagagaatctgcagcagctcatagtcctccggctcctcctcctccaggtggtgttggtccagggcctcgcggatcacagccggagccttatctgggctggtcacctgcatcgcggcgggggatggaccatcaggaaaaagacccgggagcggctccccctgaagggagcccaaa

SEQ ID NO: 656737 - DNA, 524 bp, Homo sapiens
gcagagcccattcagaatactattggattgtaatgatggtgtaaaagtatagagttatatgcaaagttaagttgttataagcttgaaataggtggttgtaagtataagatgttccatgtaagcctaatggtaaccacaaagcaaaaatctttagaagcacaaaacaaaaatatcaaagcatactactatagaaaacaaaccacaaaggaatacagcaagagaggaggaaagaaatgaagtatgtacaaaacaatcagaaaacaactaacaaaatggcagtagtaagtccttacctagcaacgattgaatgtcaatggattaatttctccaataaaaagacatagagtggctgaatggataaaataagacctaattatatgctacctacaagagactcacctcacttttagacgtagactgaaagtgaagggatagaaaagaatactccacacaaatggaaaccaaaagagagtggggtggctatacttatatcagacaacatagactttaagttaaaaactctg

SEQ ID NO: 656738 - DNA, 780 bp, Homo sapiens
gccgcccgtccgccgcgtcggtcggggtcagagtgcgcgaggaaatcatcgagttccccatcctaaagctaatggccggacatggagattgagtctaactttcacatgtatgtccagcctgtagtccatccacagttaccccattctgtaccagagctcaccgggattattcacagccatggtggatggtcagccaagcctgcagcaagtgctgaagagggtcgatgaatgatggcgaaggaaaggcctcttagatccaaacgtcaagtcaattttggtcacctgtggagactgggacttaaaagtcatgctcccatgtggcagtgccagtcacttgggcttgccaagtgggcggacttactttcaagcagtgcattactcttgaaaaacgacgattgcaagaaccattgccaaccatcatgaagacactcgcctatcgagggcttcatcttcacagcagaccatcgaagccgtctgattggtcgacgccccaggcgctgggcgccggcacaggggtacgctgtttggcccaggcccagaatcctctttctcctctcaccagaggcggacgacggggcgaagtggcatagctcttgtgtccaagagtgtcccatgttgccctgtgggttcatgccttgggttgggttgtgtcttggcaggggtttgcccactttgcccttctggcgcgaaccttttgtggcccgatacgcagcctatttaagcagtttcgcctccattggcgctgttagtggccccgggcacggcctcctcgggaagggt

SEQ ID NO: 656739 - DNA, 710 bp, Homo sapiens
agaaagttgtgcatcattgctggcagaatgtgcgctgagtcttaacatcggctgacttcatcggtatattatcctggtgaccggtcaatcgactgccagctgctgtgccttctgatgtcatagatgatgtgaccttattctgccaaccaagggcactggtctagatcttgatgtgtccttctttcttcatagttgctgtgtctgcattcatctgtatcgatgcacctgtggcgtgttacgtcaccgctcagctggactggactggagcccgagtagataccattgcagccggcctgttggacatgcttgacatatcagattaatcctcatgacttgtcattgaacagccgtgagacagtggtcactgtgactatcgtccacttgttgcacatgactgagatcctgataatcatgcctatgctcgagggagcacgatttgatgccagcctctatgtacatagtgacgacagtcgtgatgtgtgagatcaccactatgagtgcattgcaggcatacatgatctgatcatgactgcggagaatcgatatccctttctagtagcactggccgttgatgccgatgtggatgatgcagctgcatacagggatgatgctactccgaatgacaacgacataattgcttatgcccttggagacgccattacggtgctgaagcaggttaccctcctagtaatctcggggtgcttcttgtc

SEQ ID NO: 656740 - DNA, 170 bp, Homo sapiens
  misc_feature (14)..(14): n is a, c, g, or t
  misc_feature (80)..(80): n is a, c, g, or t
  misc_feature (99)..(99): n is a, c, g, or t
  misc_feature (145)..(145): n is a, c, g, or t
  misc_feature (168)..(168): n is a, c, g, or t
aaaaaaagaaaganggtcttgctctgtcgccagccaggctggagtgtaatggcgtaatcatagcagctcaccacagtctnaaactcctaggctcaagtnatcctcctgccttagcctgctaagtagctacgactataggcatgtnccattacgcctggctcgtttctncc

SEQ ID NO: 656741 - DNA, 318 bp, Homo sapiens
  misc_feature (30)..(30): n is a, c, g, or t
gggaagtcgggatgatcttgaacttgtcancttctgcttggcttttaaaagttatcccaggcccagatagatgcctggttgtcacgcctgtaatccccagtgctttgggaagccaaggccgcaggattacttgagccccaggagtttgagaccagcctgggcaacgtggcgagacccccatctctacaaagattaaaaaaaaatttagccaggtatggtggcgtgcacctgtggtactagcatcaaaaaaatgcaaaaatttgctgggcgtggtggcatgtgcatgtagtcccaactactcgggaggctgaggtgggg

SEQ ID NO: 656742 - DNA, 934 bp, Homo sapiens
  misc_feature (9)..(9): n is a, c, g, or t
  misc_feature (79)..(79): n is a, c, g, or t
  misc_feature (88)..(88): n is a, c, g, or t
  misc_feature (207)..(207): n is a, c, g, or t
  misc_feature (248)..(250): n is a, c, g, or t
  misc_feature (260)..(260): n is a, c, g, or t
  misc_feature (262)..(262): n is a, c, g, or t
  misc_feature (268)..(268): n is a, c, g, or t
  misc_feature (272)..(272): n is a, c, g, or t
  misc_feature (278)..(278): n is a, c, g, or t
  misc_feature (309)..(309): n is a, c, g, or t
  misc_feature (321)..(321): n is a, c, g, or t
  misc_feature (363)..(363): n is a, c, g, or t
  misc_feature (382)..(382): n is a, c, g, or t
  misc_feature (399)..(399): n is a, c, g, or t
  misc_feature (406)..(406): n is a, c, g, or t
  misc_feature (436)..(436): n is a, c, g, or t
  misc_feature (581)..(581): n is a, c, g, or t
  misc_feature (751)..(751): n is a, c, g, or t
ccagtagtngtgtcaagccagagattcgggcagtagattaatgttcatttaactgatgcactttagtttttggtctgtnacctgtttnccagaaaatttgtggcttttaggcgggagttaggcgaccaaaccagtgagagccccaatccctgcagttttgtggcttcaagtgtgggtggacagtcctaatggggatctccagctccntcctgtggctgccacaaacagctacccccagaagggtcaannntgggagtggntntggctntganctgctntacagagcttcagtgtgagaggatcgagccnttgaaagctcantaccagtaggacataatttttggctctccctattcacaaccngtgcacagtttgacacagnggcctcaggttcacagngcaccangtcactgtgctatcctacgaaatcatttgnttctaagttgtgtttattcctggagtgacatgccaccccgaatggctcactttcactgaggatgctgtcctctgatttagctgctgcctccagcctctggcttgaggacttactaaaggcacattccttcctgttaaacccctgntaactctccataaaatttggtgattctctgctaggcctaagattttgagttaacatctcttgaagcccaaactccaccttctgtgctttttgcttgggataatggagtttttctttagaaacagtgccaagaatgacaagatatttaaaaaaaaaaagaaagaaaaaaanaaaaacacctacttttaaagaaaatacctaacagatttttaatatagttatctctaccactttcttttctagtttcttgattttcagctcaggctgcattctaactcatactgtgaagacaaaggtgtttttgattcagaaatatatgaaatctgatataatcggtgtaaataagaatcccat

SEQ ID NO: 656743 - DNA, 357 bp, Homo sapiens
atgtgaggtaaatgacgacacactgaatgccgtgcagcacgctgttgtgaaaatggatgcggttaaatctcaaacagacggactctgcaaggcattgcaacctgtggcgtctgggtcaatatgctttacagacctgggaaaactcggagaaattctcgcattttaataacctttaactggctatggaattactattctcccagatttgcctcaaaatttgggcgtaaataatgcgcatataatatcgccttcgttccctattcatttacatttttgaatcaatagtcttgtgaaagggcacgaatatgggggtactcagtgggtgccacataatttgtcgattcatttaatacccat

SEQ ID NO: 656744 - DNA, 160 bp, Homo sapiens
actggcgggggtaggagaaacccggcccccagagactcccgcagggtggacgccgggagcacggagccccatgacccaggccaggccctgtgaaggattcacctgcatgacagcctgtgtgatgcggcaggcttaacacgtaaaacacatccgtgcttga

SEQ ID NO: 656745 - DNA, 337 bp, Homo sapiens
gtgtggtgtgtgggggggtgtgaggtagtgtgcatgtgtgtggtgtgtgggtgtgtggtaagtgtgcatctgtgtggtgtgggtgtgtgggtgtgataagtgtgcatatgtgtgggggtgtgtggtaagtgtgcatgtgtgtggtgtgtgggtgtggtaagtgtgcatgtgtgtggtgtgtgggtgtggtaagtgtgcgtgtgtgtgggtgtggtaagtgtgcatgtgtgtggtgtgtgtagtgtgtggtaagtgtgcatgtgtgtggtgtgtgggtgtggtaagtgtgcgtgtgtggtgtgtatggtatgtgtgtgctcactgaaaatccatggac

SEQ ID NO: 656746 - DNA, 910 bp, Homo sapiens
gagaagaggacgagagaacagcagacggtaccgataggcggattacgtcctcactgcgtcgtctaatactcgggccctgagtaaatatgaaccgtgtaatttatggactagagcacatttgcgggtcatccccatctagggttctaaatgttctcgaggtctcatttgtttgagacacaagagccctcactttcagcgtatttgttgccccccttcgccgcctgtttgctgcctcctttggttcgccgtcgcccgtcttcaaccgggtggggataggctttcttccaagcctaaaggacgggtggccccgcgtcccttccaggacggagcacaacagggagaacacgggcgcacaccagaggtgggtgaaaaagccaggggtcaaccccaatgccgggacaaccacaagcggcggggggccagactcgcatggaccccctcattgcgagcacccccccatgtcatgatgtcgcccacaagaacgggcagatgtagggcacaccaagcggtgggcaaacaatataccgctgtgtgacgccccctcacagccccccggttaacgaggccggaaatgagaaccaaccccggggggggacctttcataggggggtggtcgtatgacaaagcaccaacccccccatagtatcaggaggtgaacaagttgaaaagattctggcgcaagagtatggcgccacagataataatccgggcggtaccaccgtgagcaaaaaaccccggtaaataaatgggggaaccacgccagaagtataaaccagaccgcgtggggcgaatgccacacgaacgtgacgaccccatgcagccacgagcaagaaaaaaacgcaccagcggaaatgtgcccaaattcttgctccaacattttcccccggggtaaaaagaccccacaaaaaca

SEQ ID NO: 656747 - DNA, 421 bp, Homo sapiens
tacaaaaacacaaaaaatcagtagcatttctatatgctaacagtgaacaatctgaaaaagaatcccatttacaatagataaaaataaaatacctaggaattaacctaaccaaattagtgaaagatccctacaatgaaaactataaaacactgatgcaagaaatttaagaggccacacacaaaaataaagatattccatgttcatgaattagaagaatcgatacattaaaatgtccatattatccaaagcaatccctatcataataccaagcgtattctctatagaaacagaacaaaactatcctaaaacttattttaaaaccaaaagacccagaattccataagctatcctaacccaacagcacaacactggaagcaccacatcacctcacttcaaactctactacagagctatagtaacc

SEQ ID NO: 656748 - DNA, 544 bp, Homo sapiens
tccgagacgcactgggggccggatgtagaatcctgcttatctgtgaaatgcagttaacacatcagctggacctatttcccgaatgcaggtaacccttctgttatttaaagatgtaaaaaatgcgggagacttgagaagaaaggccatggaaggcaccatcgatggatcactgataaatcctacagtgtgtcacgtcttgttgcccaggctgtagtgcaatggcgcgatcttggctcacggcaacctctgcctcccgggttcaagcgattgtcctgcctcagacctcctgagttgctgggattgctggattgttgatccgattgtcagatacttgtggtagccatacaaagcaggttcagctctacagactggacaccatgaagacaagaactctatctactgaaattatgtggcaacctttccccataataacaatatttcagaggcttgtgatcaaccattggtatctcagcagatagtgacacttcgatttctaatgtgtttagcttgaagagggagacaacatcggctaaatgcaagcaat

SEQ ID NO: 656749 - DNA, 293 bp, Homo sapiens
  misc_feature (73)..(74): n is a, c, g, or t
  misc_feature (80)..(80): n is a, c, g, or t
  misc_feature (82)..(82): n is a, c, g, or t
  misc_feature (122)..(122): n is a, c, g, or t
  misc_feature (149)..(149): n is a, c, g, or t
  misc_feature (170)..(170): n is a, c, g, or t
ggggctggagcgatggcccggggctggagctcgcggccgccgccgacgcaaacgactgaaactatttgctgcnntttcgngncgggagcagccgcggccgaagccggagcaggggccggagncgcggctggaggggggcctgcgcgggngagtggccgagagctgcccgngccggagacctcaaactccgggcgggagcgctttcggtcggccgagccgccgcggcccgcgacaccgtgtcccccgggcccccacagcggaacggcgggctatctggcgcggagctgggttct

SEQ ID NO: 656750 - DNA, 992 bp, Homo sapiens
cacctgtgggtttctgaaggctagaagcttccacaactgagccaggaaacaagttctgattggctgggaacagacctctggctccaagattcagagctggcagtattccttctgttctggtggctcgatcttcattgctttcctctggacttgtaagttattccaacaaaccccagctgctctgcgagtgaagactgttccacataagttcaagtaatttcgtgccacggagattcacccttgctaacacacgcataatggtgcgtttctaagctagttgtggcttagttgtgccacaatgtgtattggactaccattttgtaggcgcgaaatttcctccgttcagctgggctcattgtataattttagataaaagtacaaggaaattatgattccataatcataagtgctactttcatgcaatacacgtatcttcagagaatcctcagaccgtccctgcagcatcctcctggtgcacagaaaaactgctgaattctggcaaggatactcaataggaattctggacgggtgaccatctcaggccggagatattgcccaacaattggaaaagcagagacagcacatggacagatctgctgacgctaaagtttatagacatgctgaggtgcaaccatataatcagccagatgttattaggccatgatcattctgtagtaagctaactcccgttctgtgtttcctctcaacctgacagctattgtgggcacgttcaaagccccatggtcaagtaaaacaacacaaagtcacagaagcacgctggtaaattctccccttgggggttcccgtacagcacggaatacccacacactctccgcggcacgattacccccacttgggacaggccgaaaactgtcccggaaaaagggcgcagtaagaaaagcccccatattagggccccaagattagacccgggcagaccaaaagggcccagataaaacaggggagcacaccagggggggaacaagagatcg

SEQ ID NO: 656751 - DNA, 926 bp, Homo sapiens
  misc_feature (481)..(481): n is a, c, g, or t
  misc_feature (907)..(907): n is a, c, g, or t
ttcctgcttactgttcactggatgcaaatttgaggtgtgagagtttttgattcccatcctgaataagcaacttttgctttaattcagactgtgtggggactttatgcttttcaaatgcataaaggttaccctgatttaggaggaaatgaagtaacattcctgttactttatggaaacatgcacttaaaaagtaaccccctaaagatccaatcataggtttgattctacaatccccataggaccccccagtgccccgtggtgctcctcagacaggaacatgtttgctgcaacccctcatgcctccacctctgctcacctcctcgggtcttagtcagaacacatcccactcctccaatattttccccatggttctgtgcctgctctgtctcacctgagctgcctctaattcttaccgtttcccctttcctgtggaagccctaccctagtcctcacctgcctgcctgtgtggccgcagagtcgntcccgggtctccacctccatcttcatgccctgctcaaaagggtcctttgagtcctaccatgttacatttcccaaaatctaatctcttgtactgttcatcaccgaggcacttctctgctcaagaaattttgtgatttcctgatgtccaaaaaaaaaaaaaaaaaaaatcaaacctcaactccaggcagtttccagaccctcttccatcagtccaccagccttcccaacctcatcttgcatcactatccaatttaaggcctttcttttaggtttaaacccacatccagggctttggtttatgcacatggtgacttctgccaaaccatcagcaggttgttctgaaaccccctgcatctcccaaggactaggtctgatggccagagggaccagtaagatcaggtctctgcttcaggtggaagagacaggnagtgctacaaaggtaagcg

SEQ ID NO: 656752 - DNA, 125 bp, Homo sapiens
gggatagcgtacgttgaagacaggtgctcagatgtcttcatccaagcaagacagtataacagcacagactgctcccatccttggcccttttcctttctcactaactaaggctttttgcttcatga

SEQ ID NO: 656753 - DNA, 159 bp, Homo sapiens
cactgatgttgaggtcgatctagagtatcccctgcaggtcttctcctccgctgtctatagtattacaccatggtctcttctcaggagctctatggactgccaggctgtttcattcaggaaggccaaaatcaagagtgagatgttgaagagttgtaaaga

SEQ ID NO: 656754 - DNA, 205 bp, Homo sapiens
  misc_feature (144)..(144): n is a, c, g, or t
  misc_feature (160)..(160): n is a, c, g, or t
  misc_feature (194)..(195): n is a, c, g, or t
gatctctcgagctcaggagttggagacagcctgggcaacatggcaaaaccccgctctaataaaaatacaaaaaatcagccaggtgtggtggcacatgcctacagtcccaactactcaggagactaaggcgggaggattgcccgnaacctgggaaggttgnaggccataagtgagcagtgatcacagccacgtgnncaccccagcc

SEQ ID NO: 656755 - DNA, 381 bp, Homo sapiens
gatgaactcagtaacatcggaaaccataaagaagtagttacttgtcgagataccagctgtccactttcaactaagaggaacatcagctgccaggcacatatctattaacatggtttcgggcagctctagttatctaaagcattcataaccagtataaactgtcggaaaaataccacattatagtcagggttcatgatgctgtacataggaaggcaacgatattagctttcgggtaaaactgcagtacacttaccttggcaaccttgtgcctatgatcttccaacatagtttcttttgaaacaaaaactgtctgatgaggttgcttacatcactagtatccagatcaatcaggtcgatgtgggacaaaccgtcgaattcgca

SEQ ID NO: 656756 - DNA, 293 bp, Homo sapiens
caaaaaaatttttttaaggggcccaaaaaggccctttaaaaaaggtttattttttgaaaaccatggttaaaagggaaaccggtgggtttttttaggaaccaaggccaaaacagcgccttttttcccccaccccccttaaatttccaaatggggggaaaaaaaaaaaaggggtttttaaaccctggtttaaacaaaaaggttaaaccccgggggtttaggagggtttaaacaaggggttcccaaattttttttaaccaaggggggaaaaaggaaaaaaatttttttttccccca

SEQ ID NO: 656757 - DNA, 163 bp, Homo sapiens
ataggccgtatagagatgtctaagtacatagctatttaggcaaatatagacaaaatacttaacttaaccagtgtgagtaaagaacggaatctagcctatcatgcaggaggtctaggagtagcaggtagcaaggggatgcatggcaagtggcacacaagtacta

SEQ ID NO: 656758 - DNA, 195 bp, Homo sapiens
tcggccggtaccaacatctcatcgcgcttccaacatctcatgactccttccaacatctcatccctccttccacatcattccggcatgagatgtccaacatctcatggcgggcaggatagttcagacggtttctatttcctgagcgtctgagatgttaatattagttagttttgttagagatgagatgttggaagg

SEQ ID NO: 656759 - DNA, 414 bp, Homo sapiens
gttttaaaaaaaatagtgaatttggggtaaagttgcttttttatggaaaagcctctaaccttcccttttccttccctctggagatttttctatctttataaaatattggggtttttttttaaggaaaaatagaaaagtagcttgtgaatagctccaactaagctttccaattgcctgtaaaaaagcaaaaaagttatttgggtctgtttatattgcttccctttttgtagcctttggacctggccagggggccagtaagggcccagcaggagaggggtaatccttgtattaaatagggtcccgcgccccttttggatttttttgttttttttttagtccgtcccttcaaaaaaacaaaaaaccaacaaaaaaaagctggccctttttacataaaattaattatgatgagcccta

SEQ ID NO: 656760 - DNA, 1063 bp, Homo sapiens
  misc_feature (12)..(12): n is a, c, g, or t
  misc_feature (70)..(71): n is a, c, g, or t
  misc_feature (82)..(82): n is a, c, g, or t
  misc_feature (86)..(86): n is a, c, g, or t
  misc_feature (100)..(100): n is a, c, g, or t
  misc_feature (109)..(109): n is a, c, g, or t
  misc_feature (125)..(125): n is a, c, g, or t
  misc_feature (133)..(133): n is a, c, g, or t
  misc_feature (138)..(139): n is a, c, g, or t
  misc_feature (147)..(147): n is a, c, g, or t
  misc_feature (154)..(154): n is a, c, g, or t
  misc_feature (158)..(158): n is a, c, g, or t
  misc_feature (162)..(164): n is a, c, g, or t
  misc_feature (173)..(174): n is a, c, g, or t
  misc_feature (181)..(181): n is a, c, g, or t
  misc_feature (197)..(197): n is a, c, g, or t
  misc_feature (201)..(201): n is a, c, g, or t
  misc_feature (204)..(204): n is a, c, g, or t
  misc_feature (245)..(245): n is a, c, g, or t
  misc_feature (247)..(248): n is a, c, g, or t
  misc_feature (251)..(251): n is a, c, g, or t
  misc_feature (268)..(268): n is a, c, g, or t
  misc_feature (272)..(272): n is a, c, g, or t
  misc_feature (276)..(276): n is a, c, g, or t
  misc_feature (279)..(279): n is a, c, g, or t
  misc_feature (297)..(297): n is a, c, g, or t
  misc_feature (301)..(301): n is a, c, g, or t
  misc_feature (313)..(313): n is a, c, g, or t
  misc_feature (331)..(331): n is a, c, g, or t
  misc_feature (383)..(383): n is a, c, g, or t
  misc_feature (435)..(435): n is a, c, g, or t
  misc_feature (480)..(480): n is a, c, g, or t
  misc_feature (955)..(955): n is a, c, g, or t
  misc_feature (1003)..(1003): n is a, c, g, or t
  misc_feature (1029)..(1029): n is a, c, g, or t
tgctgctccggnggctggaggcgatctgatggcagagccataggacagcgccgagttggcggatgaactnngcatggagcancaancggtggtgggcgcngtgaaaagncttcaggcgctgggcnaggtcatngaggnngaacttcngtccaanaaanactnnnagcttaatnnggagggngaagagattgcccggnaggnagnccataaggcacgtatatttcgaagcattcccccagagggcntnnaanaaaaaaaagactatatncgantgcncantggcaaagtgggcttcancaangccatgtccaanaagataggaaagaatacngataacgggccccgggtgttccgagtaggtggacagcatggaggataaagtncagcggcggctccagctggtccggagggggacaggctgaaaaactggggganaaggagaggagcgagctgaggaagaggaagctgttggctgaagtnactctgaagacctactgggtgaacaaaggcagtgcctttagtaccagcatctccaagcaagagacagagctgagcccagagatgatctccagtggctcttggcgggaccggcccttcaagccctacaacttcttggcccacggtgtcctccccgacagcggccaccttcacccgctgctcaaggtccgctcccagttccgacagatcttcctggagatggggttcaccgagatgccgactgataacttcattgagagctccttctggaactttgacgccctcttccagccccagcagcacccagcccgtgaccagcacgacaccttcttccttcgagatccagcggaggccctgcagctcccaatggactatgtcagcggggtcaagcggacccactctcagggcggctacggctcacaggggtacaagtataactggaagctggacgaggcccggaaaacctactgcgaaccanaccacatcagccagcgcccgtgcgctctaccgccttgcccagaagaanccttcactccggtcaagtacttctcnatcgaccgcgtattccggaatgagacctggacgc

SEQ ID NO: 656761 - DNA, 129 bp, Homo sapiens
tactggtaatacgtattttaatttttggtgcatatgagtttaagtgtcgtgtaggtgacatgaaaatcttaggcaaaccgacttgaccattgtcagacccactggattttcaagctgatgtggtctgct

SEQ ID NO: 656762 - DNA, 707 bp, Homo sapiens
  misc_feature (589)..(589): n is a, c, g, or t
  misc_feature (638)..(638): n is a, c, g, or t
  misc_feature (689)..(689): n is a, c, g, or t
  misc_feature (702)..(702): n is a, c, g, or t
  misc_feature (707)..(707): n is a, c, g, or t
tttcatatgcttgatttctcctgaaatgggcaacaattacaagagtttttttcctcttctgaactaagaaaataaatatttaattcacaagtttagaaaagtgaacctgaaaaatcacagggctaggtgggttatgaggcccactggtacatgatagtgttgaatgtggattagaatgaactccgtggattagaatctcagaccataggcaaacatttacttgttttagaataagcacatttgagtctgcaataagtattactgtttttaagttgaaaatgtaattggtttctaataataaccatattggctagcattatttcaatcgtgtttaatgttttccaatgtcatttcatgtcagatatctctcttgattcttagtaacaatttggacaagacagcaaatgctgatgtccaagttttctaaagaagaatctgaagtgaaatgacatcaagagacctatcaagacctgtatccaggaaaaggtaaatctgagctgaaatttgagccctttgaaattacctacgtgacataccagatagtgttcatgatccattcagtactctgttctatgagacaatatccatntattcacttgatcatttatttagtgttagatcagcccttactgcatatnccaggcactactctgactgtggcaggagtgaaccaggcatggatcttactngcatgtttacagnctttn

SEQ ID NO: 656763 - DNA, 193 bp, Homo sapiens
  misc_feature (98)..(98): n is a, c, g, or t
  misc_feature (163)..(163): n is a, c, g, or t
agtagcgctcactgtcttccatccactgctcgatgtcaccccattttgtatccagcccataatatttcttttggacctgatagatctcctttctgtgncgctccagctccttcatgcggatctcgcgagcctccgcgcgggccgcccgttttgcagcggagcncggttccgccagcttctgcgcttccgggct

SEQ ID NO: 656764 - DNA, 991 bp, Homo sapiens
  misc_feature (338)..(338): n is a, c, g, or t
  misc_feature (342)..(343): n is a, c, g, or t
  misc_feature (399)..(399): n is a, c, g, or t
  misc_feature (461)..(461): n is a, c, g, or t
  misc_feature (467)..(467): n is a, c, g, or t
  misc_feature (513)..(513): n is a, c, g, or t
  misc_feature (529)..(529): n is a, c, g, or t
  misc_feature (539)..(540): n is a, c, g, or t
  misc_feature (589)..(589): n is a, c, g, or t
gttcgtcccggggcgatgtgctctcacagacacccatggtcatacgtcccatagaatgcgctcgggattttctgtcaagaagatgtgtgacaaagactattcagtacccataagagttgatcgcaatgtacatatgaagggagcatcggcatatctactggtcaacgcactcagtaggaaaaggtcgtacgatgtaatcgagcattgacagacatgaagtgagcccttagtgcgtagtgggctataacatgacaggcacgcactatgtattcctggaaaaaacaagtgtcatgaaagaactcaacaaatatgcaaaggagtctggtgtgcatataggncatnnatgaggtttggcagttcgtatgcacgcgacatcgtagaccagttagtactcatagnagtacttggcctgggcatatatactgaaggagtagctggacaatctatggaagctagggcgnaagtgnagctagtgtaagagaaaggcacttacaccatgggccgcatgctagnagtgccaaatgtgctnacagatgatnncaattctatttaatttgatagctaatggagctgatgataactcgtgtgnagatatctgtgttgctcaaattaaaattatttctggttaatatttaaagaagacgatgttttcttagtgtactgagcagtttctttgtaaatacagagaataaagtgactactacggacagagagtagtgttacggaggacctggttagagaaatttgggtgacttagtggggtaataatgggtcatgttgaagagtcaaatttgtgtggattttactaaaggtagcgtcagaacaaaggtcggttttcaaaaggattgactattgggcgtggttgaacccagaaggaggccccaatggggaaagcatttgtgggaaaacttattgaagaggaaaaaaagtggggtaacaaggattaacgcagagtggcaagagaccgatagattcaaaaaagtaaaatgtc

SEQ ID NO: 656765 - DNA, 618 bp, Homo sapiens
  misc_feature (38)..(38): n is a, c, g, or t
  misc_feature (62)..(62): n is a, c, g, or t
  misc_feature (70)..(72): n is a, c, g, or t
  misc_feature (77)..(77): n is a, c, g, or t
  misc_feature (100)..(100): n is a, c, g, or t
  misc_feature (109)..(109): n is a, c, g, or t
  misc_feature (112)..(112): n is a, c, g, or t
  misc_feature (128)..(128): n is a, c, g, or t
  misc_feature (134)..(134): n is a, c, g, or t
  misc_feature (137)..(137): n is a, c, g, or t
  misc_feature (146)..(146): n is a, c, g, or t
  misc_feature (162)..(163): n is a, c, g, or t
  misc_feature (209)..(209): n is a, c, g, or t
  misc_feature (269)..(269): n is a, c, g, or t
  misc_feature (379)..(379): n is a, c, g, or t
  misc_feature (396)..(396): n is a, c, g, or t
  misc_feature (434)..(434): n is a, c, g, or t
  misc_feature (459)..(459): n is a, c, g, or t
  misc_feature (485)..(485): n is a, c, g, or t
  misc_feature (518)..(518): n is a, c, g, or t
  misc_feature (521)..(521): n is a, c, g, or t
  misc_feature (553)..(553): n is a, c, g, or t
  misc_feature (569)..(569): n is a, c, g, or t
gtttgcagactccaggcagagcactcctggcagctgtncagcaggagcaggaaggaaacganatgagagnnnctttntcccgagtgtcccagttcaacancgtgcacgntancaaggagaaaaggggnaagggntcnacccacgantgcagagcaggttggnnagggggatctagagctgaaaggcaatacatggataacgcgcacgcnccactcccacttttatttagcaagagtaaatgcagcctaatgatagggcgtgggaagatntcctgctcactagtgtgggcagagtgtagcgtggcttgggctcctaatacaggtaaattgtttccaaaggactagtaaaggtgactgggtcatcctcctgccccaggganactgattagagaaaatncgtctgtgctggcaataaggcagtgctggaaactcggnattcccttgaaggcaaaagcaaggnacagagcgtgattaggtactggacanctgctaagtgctgggctctctccagtttacagntgnggcaactgcggctcctcgagttggagctgggntgccagcccccatggncctggcagaacacgctcttgacagccccacagggcttctccctagggcg

SEQ ID NO: 656766 - DNA, 281 bp, Homo sapiens
ttgtcgagctcaaaccaatcgagaccaccgacttttctactgggcctctgcaagtgctcgaggggtggccttttgacatcaggagggccaaaaactccaccctcagatcataacacaaccattttcttttctttttttttcttttttttttttggaaaccagtgtctctctctctcacccagcgtggatgtgagtaggcaatctcgggtcactggaagctccgcctcccggtttcacaccattctcctgcctcagttccctgagtaactgggaatacaggc

SEQ ID NO: 656767 - DNA, 312 bp, Homo sapiens
ccatctattgggtatgagggtatgctagattttgcgtaggcttgggttggttattgcgagctgcaatcgccagttagtagatggataagattgagtagagtgaggaggaaggttatgcgttgatgtagagggagagattaggtatatgattgagatgcggggataagttgtcgttgtgtgatgaagacgcaggccgtatgtcagaggggtgcctggtgctacctctgtcgactctagaagtgaaagggggctattcctattatttagttgctatagctcttatgattattaatgatgagtattgatcggtag

SEQ ID NO: 656768 - DNA, 437 bp, Homo sapiens
  misc_feature (392)..(392): n is a, c, g, or t
  misc_feature (430)..(430): n is a, c, g, or t
acagacccccggcggcatggtgtctgtacattgtgtttggttgatttgcgtcataaatatcttttagtctactacagatgccctttctctacttttttgatgcaacttcatttttaagaaatcagatatgccaggcgtggtggctcatgcctgtaatcctagcactttgggaggccaaggcagaaggattgcttgagcccaggagtttaagaccagcctgggcaacatggtgaggtgagaccccatctctacaaaaactttttttcttttgctgcaatattttaatgtaaatccaatacatgttatcatttccctgtatatatattaggtgtcttcctaacaggtaagaggctttaaaaaacataatacattatcattaacctatgtaacanagttaatgataattccttaatatcatctaatacccagntcacgtg

SEQ ID NO: 656769 - DNA, 108 bp, Homo sapiens
gtgggcaggccagagcaggaagggttattgagggtcatctaagtgcaaaccgtttactttagagatgttgaaaccaaggcgcagagaggggaagtgacttgcccaaga

SEQ ID NO: 656770 - DNA, 368 bp, Homo sapiens
  misc_feature (45)..(45): n is a, c, g, or t
  misc_feature (73)..(73): n is a, c, g, or t
tggttatttaataatggttattaatactttgaaaaataagtggtnttaactgagtaatagttgcagtttttanaaatactacatacattgccgagtgcagtggctcacacctgtaattccaacactttgagaggctgaggcaggttaattacctgaggtcaggagttcgacacaggcctgcattggtgtaaccccatctctactaaaaataaaaaattagctgggtgtggtggcacgcgcctgtaatccagctaccttggcaggctgaggcaggagaatcgcttgttcctgggaggcagaagttgcagtgagctgagattgcaccatttcactccagcctgggtgacagaatgagattgtgtctcaaa

SEQ ID NO: 656771 - DNA, 240 bp, Homo sapiens
  misc_feature (92)..(92): n is a, c, g, or t
  misc_feature (193)..(193): n is a, c, g, or t
  misc_feature (238)..(238): n is a, c, g, or t
accacgccaccggagaagggctggcggcgagcacgcaccccgtgcatctgatcggggcctcgatcggggcatggcgcatggccaccggggcngatgcatgacgcggcgcggcagttccgccgcttggcgcacgactacatccacgagcgctacgagcccgagcccggacgacgcacgccgagcgccgcgcagngtcagccgccgattctcgcggctctgaccctctccgtgctggcanta

SEQ ID NO: 656772 - DNA, 348 bp, Homo sapiens
agaccctcagcctctgacctgcctcagtataaccctaacaaaagacagattatctttgtccccaagccaagtaagccccgggctcttctggtcccaccgtcccctcccctgccccatgccaacctgtcacctgtagagagacttttataggaagagttgggatttctgggactggacgatttctgataactgttggttacaacagtttccgatggcagcaagctcgctaggtcccctccctcatgtggaactctcccctttgggagagctagcacccgtgcaagggttctccccgcccccccccgcccaggctgctgattaggcacaggggacttccaaggagggaca

SEQ ID NO: 656773 - DNA, 187 bp, Homo sapiens
gtctgtcgctgggacaggtacatcgtctggaaatggagggagggaatggtggtgagatggctggacgcaagggtatcaggtaggcccaggctcctggtatcagtgattcaccgagctatactgacggatcccctgtcccctggacacccagcatgtggcaggggacactgtcgtttgatggcatcat

SEQ ID NO: 656774 - DNA, 159 bp, Homo sapiens
  misc_feature (8)..(8): n is a, c, g, or t
  misc_feature (98)..(98): n is a, c, g, or t
  misc_feature (146)..(146): n is a, c, g, or t
tataatgncatggtgaaatggatatgggcgatatgaaccataaatctcataccgacatgaatatgagccagatgcatcatcattcggataagcaacantcatctatgtccgtaacaaaccaacataaaccacaagctgttcaaggntgggcaaatgcat

SEQ ID NO: 656775 - DNA, 1404 bp, Homo sapiens
gttttttatattctaatgttttttgctctctgagtgttgttccctctctgttcgtctgtttttttttgtgggcgacactcttccttctcttctcgtttttatattgttttatcttggggtttttttccttcccgccgctgttatgtttgttagtctctcttctgttgtggctccgcccctacggcgttgttttgtgctctgtgttgaagagtagtagagaggtagatatatatatattatctcgtggtgtgttgggtcaacacaccctagtggtgtgtccctcttatagtaggtgagacgagagaatattgttgttggtgtgttgttgtttgtgtcggcactactacgcggcgcttgtgggtgtgtgttttgtgtttgtgtctcgcccccttttgtcgcgccttcatcatgtgttgccccccttctttgtgttgtcgtcgtctgctctgctctgttgtccccccactatggatgggtgtttgctccccttttgttttgtgggttttttgagaatagtataaattttatagagccccccactttgttaattcttcccacacattgatgaggagacgacacaacacactcttgtgctctgcgtgtggtgcgcctctctctcgcacactacaaatttttgttctgtggtgtgcgcgcaacactcttgttgataaaaaagaaggggccgcgctgtgtgtgtcgccctctgctgcggggattctctctctgagtttgtgtttgtctgtgtctctcccctctcgagagagatctctctctctctctcgccgccctcttctttctgtgaggggtggctcactcttgtttttctctcttctctctgtgtgatatgtttgtgtctcccgcggctgggtgtgcacacacttgtgtgagagagagataatatactctctcttctccacactgtgtgtttactctctcttttgttgtgaagagccacactcacactatatcgcgacaccctcctctcttttttgtgagattcttgggtgttttctcgcagaggccccaagagaggttttcactctcttctccctagagagtgtcccacagatgtgcgccagcagtgtggagctctctcacagagtgtctaacacacacacacaggcgggagaaattggtgtatctctcgcgcacccacagagagagagagccccacacacccttggtgtgtggagagagatattatttttctctgcggagagaggggcctcttcccccacatgtgtgggcacaaacctctctccaacacaccggcccaatatttttccaatggtaaattatttttccccttcccctggtcccctgtctcccttcccctttaagggaattgggggccctttatatgggaaaatgtataccacttgtgtatataaacaaataattaaa

SEQ ID NO: 656776 - DNA, 383 bp, Homo sapiens
agttacaacagctctcaaaaaaaaaaaaaaatatttttggggggtttttttttaaattagttaacatgcgttctttgctaaaaacctggcgggggcccttttcagccaaggaaaaggcataggtttttacaaggccaaagagaccctaccaacccgggccctttttctttgggccctctttttttatttccctgggccagaaatccattttggacatgcggccctctttgtggttggaatagccaaggggtattttggcagaagggtttttctccccgcagccgtggttgcttacccaagagtagccggccacagggaaatcccttcatttttttaaggtctggcctccagggccatctactcgggggagcctaccatgccag

SEQ ID NO: 656777 - DNA, 273 bp, Homo sapiens
  misc_feature (39)..(40): n is a, c, g, or t
  misc_feature (194)..(194): n is a, c, g, or t
  misc_feature (207)..(207): n is a, c, g, or t
  misc_feature (251)..(251): n is a, c, g, or t
  misc_feature (263)..(263): n is a, c, g, or t
gaggctgaggttgcagtgaaccgagaattgtgccactgnntttcagcctgggtgactgagcgggactccgtctcaaaaaacaaaaaaacaaaaaaaagagagtcagggtctccctcctgtcacccaggctggagtgcagtggtgcaatcatagttcactgcagcccttaaacctcttgggctcaagtgaacctnccacctcaccctnccaaagtagcagggaccacaaggcacttgcaaccaataccccangctaaggggtcntcaattttgg

SEQ ID NO: 656778 - DNA, 626 bp, Homo sapiens
ccctgataatagtaggtcatagatatcgagcatctaaaagatgtcaatagaagatatactagaaagagaagcaatcgagataaattctgaatctacacttccgatgattcaaaataaaggggtaataggttaccggtggtggtggaactatcggtagtgaactatgtagacaaattgcgagaaataatccaaagatgcttatcatattcgatatatatcaaacatcagtcacttatgcagcattgagcaggaattaagcaagcagggggtcctgacattaaattttgtagcattgcattggttctgttcagagcaagctatcaagattggctgcatcatcatttgcatcaatatagcacccagcaaatcagtcatcatccatgctgcagcacataagccatgtcctttcactggcacacccagtcctacatgcggctcattaaaaacaatcatttatgggcacttcataatcactgcatttgcagccattgagcatcataacagccagccacaggttcatattgcatctctcacagatcaagctgtaaacccaacatctatcaggggaactcctaaaagagcttgtgacatgcatcatccatcatgaccacaatttatcggggtac

SEQ ID NO: 656779 - DNA, 318 bp, Homo sapiens
caggcaccactcttagtctgtcagctatgtctctctgtatatcctgctcctgtctctcttgtctcctatctctctctgtctcccatctctttctctgtctcctgtctcccactttctgtctcctgcctctttcctctctctccctccttccaaacaccctccctgcactcattctctccactgctttcataacacctgcaccctctccctattcaattacataagatctcttgcaccatcctgtgctctcaaacatggcctacttcatggttttcgtcctcactcgcctttctccagccccaaagacgagcactcgct

SEQ ID NO: 656780 - DNA, 422 bp, Homo sapiens
gaggatcttgagcttgatagatcagctgtgcaataagcaagcgtatctagcagatgggtcacttgcacgtccgtaagttatggttccaaagtggtctttacagggggcatctgtagtaaggtcgttgcgacatatagtatgaaggcatccgtgccaatagaccatctcacaatggtgacctcttataattagcacttcgggacagatcgttcaataaattcccatgccaggcttatgcctctgtaaacatttccttagatcagcaagtgtgcactaatgccgagtcttacgctgcgatgcctccctatccccgcagcgcaatctctctctcgtgcgcctccaggcctgagctcaaatcggtgtgatgtgatcctctgcataggacacgagagatagagtctaagccacaccctgggacacag

SEQ ID NO: 656781 - DNA, 125 bp, Homo sapiens
  misc_feature (19)..(19): n is a, c, g, or t
  misc_feature (33)..(33): n is a, c, g, or t
tgcggtcgacttagagatnccctgagtttcttnaatcgaagtcaggtggctgtgcgcgcgtttatcagctaccattttcgcaaatgaacattaatgttcgaattccaatacgaaaagatcgcgag

SEQ ID NO: 656782 - DNA, 416 bp, Homo sapiens
  misc_feature (30)..(30): n is a, c, g, or t
ttaaagcccctgcagcgggggttaaacaanctgagtcacccagcttccttgaaaaaaaagtgaagaagaaatttgattggccttttgaccagccagtggaaactgcaattacaggcctgtctactgttctatcaattgatttcaacccttcagaaatagaagttggagtagtgccagttgaaaatcctaaattcaggatttttccaaaagcagagattgatgctccccttgttgctctagcaaaaaaagactaaacattgtggttagtttcccagatccgtgatgccccttacctgtgtgtttggtaacaccaaaccaacatcatgggggtccctggattgaaaaaggagcctttccccctcctcctccccccgaagtggttaggactctatataaataaaaacaaggcttttgga

SEQ ID NO: 656783 - DNA, 266 bp, Homo sapiens
ggataaaatactaattcaaaaatagagttaatctcagaccagatgggcatatcaatatttctattatactattacaaagaaccagcattcaccaggataaaccatatggcaggcaacaaaaaaggctaccctacatttcacaggattaaagcacagagcatattattaacatacaacagaataaaattagaaataaataaaaaaaggaaatttagaatacatacgtatggagaattcagcaatactttactaaataagcaattgga

SEQ ID NO: 656784 - DNA, 200 bp, Homo sapiens
tttggggagactactatgaatgcggaaatagtgcgcgtcaacaacgcggctttctcatggcacccggagcagagcggatgggatacggcacaagttgtatcgcaccgaaatgaaccctggtttacttcagacgactgttttgtggcgctggctcccggcgacggcagtacaacttttggcgatgccggtgccgtgtcggg

SEQ ID NO: 656785 - DNA, 186 bp, Homo sapiens
cggacgtccagctgagatctcctaggcgaaaaaaaaaaaactccaaatcgtagtcagaaattacgacagcgtgaagtaactgatcagtgtgtgaaaccagagtacaaccgtcaccgttgaatgttactcagatttccagactcgtgacctgaccggaggtcccttgtctgtaaacaaggttgaggg

SEQ ID NO: 656786 - DNA, 197 bp, Homo sapiens
aagctcggaccgctctcgtgagactggtctcttcttaaaggaagagcccatatttcacaggggtttccctgatcatttaaccccacagttaatctgaattaatgcattataagaatttctgtagaatagtgtgtactcatttacactttctttggtatttttctaaaaatgacttgaaacagtattaattataaatg

SEQ ID NO: 656787 - DNA, 699 bp, Homo sapiens
gttttaccccggttttttataagcccctagccttctccctaatttaaaaactgtttatttttatttaacttttttggtttagttataccaaaggttgttattttaactttgcccacaatttcccaactgaagggtgtttaagggtatctgtccactctggtataagccagttttcccacgctaacaaaaaacgtccttgagcctggaaaaaaaaaaaggtttacctggccttaactatttccccatggttggggcggcttcagcagcaagagaatataaggaacaagcaaaggcagtatcccttgagaaagccatcagatcccatgagacttatttactatcatgagaatagcacgggaaagactggcccccatgattcaattacctccctctgggtccctcccacagcacgtgggaattctgggagatgcaatttaagttgagatttgggtgggggcacagccaaaccgtatcagcttcctagatttcttaaatatgctgtgtatttgggtagcttagagcagtgctcagcatatgtttaacttccacttgctaccttagtttataataactgtaattttataattttgtttggaatggccggaactgttattcatatatatgttggtgtgtacacatttgtgtatatatgtccatgtgtccaacatggattttttcgcgaataagaattgggtaagt

SEQ ID NO: 656788 - DNA, 306 bp, Homo sapiens
  misc_feature (141)..(141): n is a, c, g, or t
tgccctcaacacgtcttttcttcttgaaaattaaaaacaacccctttcaccccctctactgtccttattccagtttgtgtccgtagttgctggaggaaagaaaatgcctattgctcttttttttattctctttatctgttnactcttctgcctttcttttctctccctgacttcattccatttaaaggccttaaattgcaaataacgaaaaaagtattttctaataatataccctagtgggacgaaaacaaccttctacattttaaatgatattaagttataataaatggttccatgaactttaaa

SEQ ID NO: 656789 - DNA, 320 bp, Homo sapiens
catttgatgccccatgtgtatgccctgaccatgccccacccctccatactacaaggtttgcacgtaccacaccccagcagccatgtcagggcctccagttacattcatcattgagggctccttactcctcctccttcccagcctccccggcagcccggcatacggccgctcccagtagccatccacaccgcgacctgacctttaacccctcctcagccttagagggtcaggccggagccgcatgtcgtgtccgagatgccggcagccttcgctggatctctcttcccgaaactcacaggtcctgacgaggctcctgtctg

SEQ ID NO: 656790 - DNA, 493 bp, Homo sapiens
agcctgatccggatatctcaaccaccagagcctcgcggctccatgattatgaatttggctttcacttgcgacagcgcatcagcgatgctgggggcccgggcgtgactgtgacacacctctcaccctgcgggccagggtcctgtcgccaccacttccagagccagaaagggtgccagttgggctcgcactgcccacatgggacctggccccaggctgtcaccctccaccgagccacgcagtgcctggagttgactgactgagcaggctgtggggtggagcactggactccggggccccactggctggaggaagtggggtctggcctgttgatgttttacatggcgccctgcctcctgggaggaccagattgctcttgccccacttgccagagcagggtcctgggcctgggcacctgacttggcttgggaggaccaggccctgggcagggcagggcagcctgtcacccgtgtgaagaccaagggaacacccgggt

SEQ ID NO: 656791 - DNA, 649 bp, Homo sapiens
agagcagactgctacgctcaggcggagaacgccaggaacgcgattgcctagggctcgtcgcagcaagtcttgaattcccgaggcgcgcatgccctacagaaacaaggtctggtacgctgtacaggatgtagacaattgcggtgcagtacattgcgattgtcgacatagaactgtgcactcaggagcagcagcaagccaacaggcaaaatccataggaccagtgaagtcgacaacgcgatttgacccagtagctaggctcgtttgtggtgcatacagtaaagccattccagaaatagaaagccgaccatcttaagctagtggctaagtaatgtcgccggtaggatccaaccgggccgcggcttacgccgggtgcaagtacaacagagaagctgtgctacagtcagcctcctttttcaaaacgccgcgtgatatgaccgactccagtccgagcgcaagcccttcgagcttgacaatatacttccgcctgctcagttacgttaagccctatatgggcttgttcgcgttgagtatccttggatttctgattttcgcgtcgacccaaccgatgctgggttacatcctcaagtactttgtgacggtctctccaatccgaagctgtgctatcccgaccgtgcctttttggcgactg

SEQ ID NO: 656792 - DNA, 243 bp, Homo sapiens
ggctctctacatgctctgtaagaaaatatcttctggcctggagcgttggctcaatgcctgtaatcacagcactttgggaggctgagagcaggtggatcacctaagcccaggagttcaagaccagcctggtcagcatagtgagacccagtttctacaaaaattagctggtcatggtggtacgtgcctgtagtcccagctacttaggaggctgaggtaggagaattgcctgagcttggggaggtt

SEQ ID NO: 656793 - DNA, 154 bp, Homo sapiens
agaagccatgagcagcaaagatctctcgcgacacccctgtacggaggcggtgcgggaagtacctacacggggacaccaaccgcaaacgctcgcaagattactcgagacagattgagattgcagaatcaagctttagagaacctatgattcccca

SEQ ID NO: 656794 - DNA, 403 bp, Homo sapiens
ctcagttctactagaattaggactagagtgacgtgccctctagggatatgactagcttacctacctctctgatacaacaagagctctattaccaaccctcatacacacaacagttcccttgctagatgtagactctactgctacagctggactcatctagctctggactcccactagatcacacaggggtccctgcgtgtcagtaaactctggatgaccttgggagaccaaatgatgcgactatcatgatatgatctaaacgtagtttcctgagccaacactgaccagtaaggtgcgctgcaccataagtctctatgtgccatcatgggttacacatgatatcataggactcatatcagtctgattcttatgagacgtgcatactgtgtttacctgtggggcc

SEQ ID NO: 656795 - DNA, 413 bp, Homo sapiens
gcaccagctctctctctgtctctctcgctctgtacatctctatctatgtgtcgggatcgacgagtgcttactaccctgccacgccaatgatactatgagccccatttaagtgtttgcgaaatagattgattcctcacgctcatgatttttatcctactggtacatgaggacaaattcagccaatcttcatatacttaggtcttgcctgtatgcctacgcctttatgtgtcttctatcaagaactatgtcatgtgtgacactgattatacctatgatcactgacgagctacctgtgatcgatatcaaggctcactcctttctgttgactatggataggctgatgactatatgcttgcggcaccgaccggccctgtagattttagcaggtctctgagagactcttgctgggctct

SEQ ID NO: 656796 - DNA, 171 bp, Homo sapiens
gcgtggatgttccgggcttgctctacagaaatacggatgcatcttgggttgcaatagggtatatcccataaacccatggtaaggtgaaaatattcccaaggccgaacattttatttaacctttaaatttaaaatatgtttaagtctaaagacaatgtaaagagtacataca

SEQ ID NO: 656797 - DNA, 273 bp, Homo sapiens
tatctgtagggtcgctattgtaaacaataactttgtaaggcatcaagtacaaagttggtgggaaagctctctgcaggtggcccagggaggaaggctccctgctcacatcattacagtgactcatccccagaactcatacttgatcactatgccacaagactcgatcccttctcctgccagtgtggactctagacatcaatgatcacgagcttcctgacaggtgtgaaatgaacatcagtccatactgcacaggctagtctctcgcgggacttc

SEQ ID NO: 656798 - DNA, 316 bp, Homo sapiens
acatgcaaatattatcttaatttaaaaaaacatgcaggtcagcacagtggctcatgtttgtaatcccagcactttgggaggccaaggcaggcggatcacttaaggtcaggagttcgagaccagcctggccaacatggtgaaacctgtctctacaaaggtacacaaattagccgggtgtgggggcaggcacatgtgatcccagctatttgggaggctgaggcaggagaattgcttgaacctgggaggtggaggttgcagtgagccaggatcgtgcctttgcactccagcctgggcaactaaagcaaactccatctta

SEQ ID NO: 656799 - DNA, 1910 bp, Homo sapiens
  misc_feature (115)..(115): n is a, c, g, or t
  misc_feature (296)..(296): n is a, c, g, or t
  misc_feature (448)..(448): n is a, c, g, or t
  misc_feature (544)..(544): n is a, c, g, or t
  misc_feature (1052)..(1052): n is a, c, g, or t
  misc_feature (1059)..(1059): n is a, c, g, or t
  misc_feature (1168)..(1168): n is a, c, g, or t
  misc_feature (1498)..(1498): n is a, c, g, or t
  misc_feature (1541)..(1541): n is a, c, g, or t
  misc_feature (1858)..(1858): n is a, c, g, or t
gggacagttaggtcagtttctgtctcggcctggagttcttgcagtgcctggacttacttctatcactattatcccactctaagaggctagtgcatggcctgtcaagatgatcaanacttggagacgcgagtttacagggcactgccgacattgccgcggacgaacagtctattgagccctctgccgatagaatcgcgcattattgcaatgtgtcaatccgtttgtggcgatatctgccacaaactcattgatggtgcaagtggcattgcactagggtggacaccatcattgtaggngctttaaccatgtgataagcaaagcattgggactattacagatggtcttggtatatatgagatggataaatactaaaaacaatagagcgtcaaaaggacgtactaacagacttggatgaaaattgcatactgaattttgcaaggagatattntactccaatgcgatgtgtcatatcttttacagttggccgagaccatattaataggggataaggactgcaaaaagagatatggctcgttgtggaaanttggttataacactggggtggaaaaagaaaacgatgggaatggattggaccaatggggtatgttgtgggaaacaagtgtaaagagagacctttaggcatgcgggatggcaataaccataatatcgagggaacaatgttattacaacaacgttatgtttccatgttatttggtaaaaatgttgtaggtaatgcacaatgggggatggatgagaggagtatagaacgcaggaaaagggcttaaatagctagagaattggtgctaaatgacattaagaggggtgagaggaccaatggaagaacacaagtgaaaaaaggtcattttgaggcaagaggattcaacttatttatcatattggtgtgtttaccacatttatatgtgacattatagtgaaaaacacaaggaaacatgtatataaggaaaggcaaggtgcttaaggggggcgaacaatggtaccaacaagaatgggggtaggagtagccagaggagtctgaagggcaacacagtggntgccaanggtatacatatgtataagacatatataaatggtggacaacaatttgatggacaagaacaatagaatatcaaattggacaatttagtgagtaacttatagagaaaaaacngtggtgactggacatttaagttatgtgagaattgttcacgggtgatatagaagcattgtattggttatggatatcgatagcttggtggcagagaatgtgggggtaccaagtagcagggatatcggagaaattggagagaattattcaagtgggagaggaaaaaacaaggatagacatacattatggagcttaagatagtacatatcataaccatcaaaggagggaaaagagtataaaagagtgagtaaacgcatggtatgtggatcacggaaatccacaagtgaaatgtttaggaggaggaccatataaaaggggatacgttgtgtgatnggagagacaaaaatagaatagtcagaagacaaaggtggacaangtgggtgaacataggatcatcaatccaaactcgagagtggaatcttaggtctttttacttatcagggtatgtcttttgtctctcctatggatgatgtaaagtatgagtgggcatgatgagaatatgtcaatagacaaacgatagatgaataacaaaagatggtagtcagcaagatcgaagaatatgaaataatgagtgagatgaatatcaggacaactgattgcatcacgcaaaagcaagataagaagagaaaagacagagtagaagacagcaagcatgaatgagatcaagataacaacgaaaagattgaaaatagntagatgtagtaagagagtgtgatgttagatcgataaatacaatattgctact

SEQ ID NO: 656800 - DNA, 519 bp, Homo sapiens
  misc_feature (62)..(62): n is a, c, g, or t
  misc_feature (146)..(146): n is a, c, g, or t
  misc_feature (156)..(156): n is a, c, g, or t
  misc_feature (193)..(193): n is a, c, g, or t
  misc_feature (211)..(211): n is a, c, g, or t
  misc_feature (215)..(215): n is a, c, g, or t
  misc_feature (227)..(227): n is a, c, g, or t
  misc_feature (244)..(244): n is a, c, g, or t
  misc_feature (247)..(247): n is a, c, g, or t
  misc_feature (280)..(280): n is a, c, g, or t
  misc_feature (285)..(285): n is a, c, g, or t
  misc_feature (300)..(300): n is a, c, g, or t
  misc_feature (311)..(311): n is a, c, g, or t
  misc_feature (382)..(382): n is a, c, g, or t
  misc_feature (384)..(385): n is a, c, g, or t
  misc_feature (402)..(402): n is a, c, g, or t
  misc_feature (419)..(419): n is a, c, g, or t
  misc_feature (440)..(440): n is a, c, g, or t
  misc_feature (455)..(455): n is a, c, g, or t
  misc_feature (468)..(468): n is a, c, g, or t
  misc_feature (477)..(477): n is a, c, g, or t
  misc_feature (490)..(490): n is a, c, g, or t
  misc_feature (495)..(495): n is a, c, g, or t
agatgtataaagggtcccaagccttaggggatgccgctaacatcgtgtttgtctcacccccnccatggagagtgtttgcggatacttccacaggtcccacaacgcagcgaggagtttttcattgctggaaaactgcagatggactnttgcacatcnctacctgcagtttgtggctccctggaacagccttagnttagctcagcgccggggnttcnccaaaacctacnctgttggctggaggaangcncagtgtttccctgtttatccatcccctgcaaantgcanagtggcactcattgnttgtggacggnccagctcctccaaggcttttaaaaggggttccagtcccgtccccttgcctgcctgcctcgggaaccagggntnngcccctggcagtccctncggtcccaaatagcctnaatcctgcccggagtggaaanttaagcctgcccagngtcccccctgttncccctcccnttttttttccggncaatnaaataaaaagtttcccccccgcca

SEQ ID NO: 656801 - DNA, 183 bp, Homo sapiens
  misc_feature (93)..(93): n is a, c, g, or t
ccgtgaatatctctatgatgaattccactggtggcagtagcagtggcggtggcattagggctgaccctcgaggggaaccatgggcaacaatgncctatgtcctagaatggtattgccaaggttttcttctagaggtttttataggttttaaggtctagcactttaacgtctttaataccatct

SEQ ID NO: 656802 - DNA, 356 bp, Homo sapiens
tgactctacaggatcttaaaacctactaaagatacaaagttagccaggcatggtggtgcatgcctgtagtcccagctgctcaggagcctggcaacaagagcaaaactccagctcaaaaaaaaaaaaggaaagaaaagaaagctggagctgggggcttaggccatcacccttcccttggttggaactactggacagaccctttggagatgtgcctgtggtcgctgtggagatgtgtgtaggggccttagctcttggtggagcttgtgtgtgtgtggtgtagtctaagctgtatgctgaaatggggcgtgtgtggaagggcttcttagctcttgggtgagattgcggggtagggggac

SEQ ID NO: 656803 - DNA, 238 bp, Homo sapiens
acacgatctttgctcccaatgttgtggatgcttcacagaacttgtaacagagacaatctaggaaatcgtgaaagagattgtgaatatgtgagaaaggcaggggtgaagggtttcaagatatggattttggagaaattcaagagttgctagacaccacaccaggagaattaacagaagacaaattgatgaagagagtgcttccgaaccaggaccagacgactgtcccagaaagaagatg

SEQ ID NO: 656804 - DNA, 101 bp, Homo sapiens
atgcccagtagttagagctctgtaatgtcgcggtcggagtagcgtatcgatggcgcagttgaggtggcgcatatgatcctaggcctataaatattcggagt

SEQ ID NO: 656805 - DNA, 140 bp, Homo sapiens
gaaggagtgacagtacaattttgtgacatagctatattgaatagtggtgaagtctgagcctttattgtaaccatcacccagatagtgtacgttttacccattaatttctcatcatccactcccctcccatcgtcccgccg

SEQ ID NO: 656806 - DNA, 1125 bp, Homo sapiens
ggggaagtccggacgcagattagctccctgaagcggaggcgaaggggagtttaagccccagcggacggcaatggcggagaggcccgaggacctaaacctgcattaatgacatcggcacacaaacaaagagcaagcctagatgagcagtagaataaaagaaagaaagaagcagaacgaggaaaagagaaaagagaaacggagaaacaaacagaacaaagacagaagaaaaaaaacaacacaaggagagaaaaaaaaacagaaaaaaaaaagacaaaagaaacgaagaagaaagagacaaaaacaagaacgagaacagtaacaagaaaaaacaaaaaaaacaaaacaagaaataagacaacactaataaaacaaacaaagaaacaaaaaaaaaaaaaaaaaaaaaaataaaacaataaaaaaaataaaaaaaaaaaaatcaaaaaaaaaaaaaaaaaaacaaaaacaaaataaaacaaaaaaaaaaaataacaaaataaaatacacaaaaaaaaaacaaaatatataaaaaaaaaacaaaaaaaaagaaacaaaaaaaaatcaaaaataaaaaaaaaaaaaaaaaaaaaaacacaaaaaaaaaaaaaaaaaaaaaaaaacaaaacaaaaaaaaaactacaaaaaaaaaacaaaaaataaaacaaaaacgaaagctataacagcaaaaaaaccaacaactaacaaaccacaaagcagcaaacaatacataacctaaagaacaaaaaacacaacacaaaagagaaaaaaaataaaaaacaaatacaaacaataacatacacaataaagaaaaagaagaaatcaaacataacaacaaaaacgcaaaaaacaaaaaacaaccaaaacacacaaaacataaaagtaacaagaaatataagaacaccaaataaaatataaacaagacaacagaagcagcaaaaaaactaatttaaaaaaacaaagaaacgaaacaacaaaaaacaattacaccaaacccatatatatacaaaataaaagacatacacacaacataaaaaaagcaacatagaacaaaataaagaaacacaaaacacaaatagactcaaacaagaaaacaataaaagatccataatcaaatattaaaacattaac

SEQ ID NO: 656807 - DNA, 201 bp, Homo sapiens
ctgatctctgctcactgcatcagcattactcccaggttcaagtgattactcctggcctcagtcctcctgagatagctcggattacaggcgtccgccaccatgcctggcaagtttacgtatttttagtagacacggagtttcatcattttggtcacgctggtcttgaacgtactgacctgaggattatctgcccgcctgggc

SEQ ID NO: 656808 - DNA, 310 bp, Homo sapiens
agcgcgatggcaggtccgacaggagcaaagcagcctcactcgcgcttccaggagtgctcgttaaagggaccagagtgacatactgatgcctacggaggcatctgagatgcactgtgttggaggttagcctcaagtgccagcctctggattgtctagcgtgagtgacatcacctataaaatcacattgtgtaccattctggacacaggatcacaaaggcagaggcaagcaatcttttttttttttttttttttaaaaccctcctctataaaggattctgtggcgtgctggctcatactcaggggtagcccg

SEQ ID NO: 656809 - DNA, 235 bp, Homo sapiens
  misc_feature (74)..(74): n is a, c, g, or t
ggttaagatacaacgacgacatcagaggattggggtgcggctgccggcacataagcgcattgctacagctgctnggactcaaggaccaggtgaacactgtgggactcccatctgagcctcgacagggcctggagccccatcggccaagaatacttgaagaaacagagtggcctccctgctgtgccatgctggcgcactgcgcgactttatttatttcaagtcgtgttgccggggt

SEQ ID NO: 656810 - DNA, 913 bp, Homo sapiens
ataatactgtttattgtccacggaccgagcgatttttcaagaatgatacaaagcactcagagacatgcgcagtctgctagtcaactgtgaatcattgcctggtggctgtgttcagatattacccattggtaggtatcaagacttgcactgtacatcaaagaagcaaggtttactggcatacgtggagacagcatctgcgacccaagaagtagagaacagccgtagcgccctcacttgcaggcgtgagattacctatcagtgtactcttacactatatcggttcctattcgaaccactcttttgacatcttacacctctcgatcgtcccacgcattcatcacatgaggtatcgtaccaaggtcttaccaacaatttactctgccacgaggactacacacgcgaattccttacagcacgcctagccgactatcaggctacatgcacaacagcgtgctagcgtacatagcacaagttaactacacacaggaaactaccaaaacaacgcagccagaatcagagccatcacccattacataaaacgcagggatagcccactgaaaagccaaagccaagaagaaagccaaagaaaaccaaggcgcgcatcaaacgaacacagcaacgccccgacgcgcatggagccaacgcacaagcaccaacgacaaccagcacaagaccccgcgccgaacacaaagacaataaccgcacgtaatccagaccaaagctgaaaacgcctaacgcatggcgccaaacattagctacagtctacttagcctaacgcacaccgcacaacagaaaaaggggactagcacccccaaagagctgcggcggagaaactacggcacacacacaaaacatcatcactgccacctcgcatacacaaccggtataaactaagaccgggcagcacccggcc

SEQ ID NO: 656811 - DNA, 1709 bp, Homo sapiens
  misc_feature (529)..(529): n is a, c, g, or t
  misc_feature (531)..(532): n is a, c, g, or t
  misc_feature (534)..(535): n is a, c, g, or t
  misc_feature (537)..(537): n is a, c, g, or t
  misc_feature (539)..(540): n is a, c, g, or t
  misc_feature (545)..(546): n is a, c, g, or t
  misc_feature (552)..(552): n is a, c, g, or t
  misc_feature (554)..(554): n is a, c, g, or t
  misc_feature (1442)..(1442): n is a, c, g, or t
  misc_feature (1491)..(1491): n is a, c, g, or t
  misc_feature (1499)..(1500): n is a, c, g, or t
  misc_feature (1534)..(1535): n is a, c, g, or t
  misc_feature (1575)..(1576): n is a, c, g, or t
  misc_feature (1580)..(1580): n is a, c, g, or t
  misc_feature (1593)..(1593): n is a, c, g, or t
  misc_feature (1601)..(1601): n is a, c, g, or t
  misc_feature (1603)..(1603): n is a, c, g, or t
  misc_feature (1608)..(1608): n is a, c, g, or t
gcagtaacacgccaggatcttacacagatgtcagtgcctcgtctggctaccatctgttccagtgaccgagaaccactgcgaggacattgatcagtgtgacttccctgcagactgcgtagggggtgacggcatcaatatcaatggctcctacagatgtctgtgcccccaggggcgatcggctggtgggtggcatgaaatgcctacacatagatcagtgcagcctaggtatcctgagaccatgttgaccgttcccctatgggggggcttgtcaagaaccattcgatggtcatccatatgatgtgtgtctagctcatgagggcttcgatcgtaccctacccgaggtaccagcacgtgttgtgagagaggtggaagcagtcccgaccacatagacggagtgctacctgaacttcgatagactacagtggttctttgcgagctaggcagtaattacggccacccgaagcgtgacacccaaacgaggagtgctgcgtgctctctgggggccggctggggcgaccactgcgaaatntnncnntncnnagtcnncactcngncgagttcacagcctctgcccagacggaaagggctacacccaggacaacaacatcgtcaactacggcatcccagcccaccgtgacatcgacgagtgcatgttgttcgggtcggagatttgcaaggagggcaagtgcgtgaacacgcagcctggctacgagtgctactgcaagcagggcttctactacgacgggaacctgctggaatgcgtggacgtggacgagtgcctggacgagtccaactgccggaacggagtgtgtgagaacacgcgcggcggctaccgctgtgcctgcacgccccctgccgagtacagtcccgcgcagcgccagtgcctgagcccggaagagatggagcgtgccccggagcggcgcgacgtgtgctggagccagcgcggagaggacggcatgtgcgctggccccctggccgggcctgccctcaccttcgacgactgctgctgccgccagggccgcggctggggcgcccaatgccgaccgtgcccgccgcgcggcgcggggtcccattgcccgacatcgcagagcgagagcaattccttctgggacacaagccccctgctgttggggaagcccccaagagatgaggacagttcagaggaggattcagacgagtgtcgctgcgtgagtggccgctgcgtgccgcggccgggcggcgccgtgtgcgagtgtcccggcggcttccagctcgacgcctcccgcgcccgctgcgtggatatcgacgagtgccgagagctgaaccagcgcgggctgctgtgcaagagcgagcgctgcgtgaacaccagcggctccttccgctgcgtctgcaaaggccggcttcgcggcgcagccggcccgcacgggggcctgcgttccccagcgccgccgctgacggcgcgncgacgccgccctcggcccagacctcggtgatcactggagggatttccgngagctcgnnctcacttctgcccgacttgtggtcggacccaggnnccttcagggcccgagaccctcccgggccttgagaccgagnngccnctacgggcccccntccccggntnagcgngcggttgtaaggtctccggagggacgctgctggctttcctcccagagggtggtttcctagaaactgataatcagatcgtgctctttaaaacaaaaacaagg

SEQ ID NO: 656812 - DNA, 631 bp, Homo sapiens
cgcgcgcgacgtgtgtcttctgtggcacagattcctctcatggagagtagccctgtcacatcatttattatagctcccatggaggagcaaagcatcgggtccctgtgttgatgtcgaataaggtaactgtccagtcatcaatacatacagaacaattccaaatgcatatacatctgacggaaagctgtatggctttttagtactgagcattcgggatgacttctggtgccgtccacaaaatgggtccagacaactgttcaaacggatgggacccactccatggagatttcacggtagccagaccaaaatcagctatgtctacagggaggtcttcatgaagaaatatatgagttactctggaggtctcgagtggatgattgacttggggtgtaagtgatccatgcgctgtgcaggcggtcgggcaatatctataagttagatgatctcaaatttggtctcaatgatatggagatggtgatacaagctggagccctcagaccactggggtaacaagagccaggtgtggcttcgtggaatagcccatgaagagtaggcgattcacctgtcggggttgcctgaaaaatccgaagtcagtggtgacgtaggaatacgcgggataacacgttcgcga

SEQ ID NO: 656813 - DNA, 280 bp, Homo sapiens
tatctagtcttacattttagcgtacaccctttgatgaaggttattgtagaagacgctcctgtattgggtaggagattgggaacaatgtcagctacgatcacttcccgctctacttttccaaatagcttgcattgtatgagggcagataaggataagactgggactcatgtgctctctctgaatacccacacactctcacactctgtctctctacctctgtctctgtttctctgacacacacacacacacacacacacacacacacacacacacacacaca

SEQ ID NO: 656814 - DNA, 1142 bp, Homo sapiens
  misc_feature (875)..(875): n is a, c, g, or t
  misc_feature (924)..(924): n is a, c, g, or t
  misc_feature (932)..(933): n is a, c, g, or t
  misc_feature (967)..(968): n is a, c, g, or t
  misc_feature (1008)..(1009): n is a, c, g, or t
  misc_feature (1013)..(1013): n is a, c, g, or t
  misc_feature (1026)..(1026): n is a, c, g, or t
  misc_feature (1034)..(1034): n is a, c, g, or t
  misc_feature (1036)..(1036): n is a, c, g, or t
  misc_feature (1041)..(1041): n is a, c, g, or t
ggtgcgcccagcccacgcctccgggctgcagctgcgggaccggagcggccagtgtttgtcaccccgcagacatcgacgagtgcatgttgttcgggtcggagatttgcaaggagggcaagtgcgtgaacacgcagcctggctacgagtgctactgcaagcagggcttctactacgacgggaacctgctggaatgcgtggacgtggacgagtgcctggacgagtccaactgccggaacggagtgtgtgagaacacgcgcggcggctaccgctgtgcctgcacgccccctgccgagtacagtcccgcgcagcgccagtgcctgagcccggaagagatggagcgtgccccggagcggcgcgacgtgtgctggagccagcgcggagaggacggcatgtgcgctggccccctggccgggcctgccctcaccttcgacgactgctgctgccgccagggccgcggctggggcgcccaatgccgaccgtgcccgccgcgcggcgcggggtcccattgcccgacatcgcagagcgagagcaattccttctgggacacaagccccctgctgttggggaagcccccaagagatgaggacagttcagaggaggattcagacgagtgtcgctgcgtgagtggccgctgcgtgccgcggccgggcggcgccgtgtgcgagtgtcccggcggcttccagctcgacgcctcccgcgcccgctgcgtggatatcgacgagtgccgagagctgaaccagcgcgggctgctgtgcaagagcgagcgctgcgtgaacaccagcggctccttccgctgcgtctgcaaaggccggcttcgcggcgcagccggcccgcacgggggcctgcgttccccagcgccgccgctgacggcgcgncgacgccgccctcggcccagacctcggtgatcactggagggatttccgngagctcgnnctcacttctgcccgacttgtggtcggacccaggnnccttcagggcccgagaccctcccgggccttgagaccgagnngccnctacgggcccccntccccggntnagcgngcggttgtaaggtctccggagggacgctgctggctttcctcccagagggtggtttcctagaaactgataatcagatcgtgctctttaaaacaaaaacaagg

SEQ ID NO: 656815 - DNA, 1850 bp, Homo sapiens
  misc_feature (529)..(529): n is a, c, g, or t
  misc_feature (531)..(532): n is a, c, g, or t
  misc_feature (534)..(535): n is a, c, g, or t
  misc_feature (537)..(537): n is a, c, g, or t
  misc_feature (539)..(540): n is a, c, g, or t
  misc_feature (545)..(546): n is a, c, g, or t
  misc_feature (552)..(552): n is a, c, g, or t
  misc_feature (554)..(554): n is a, c, g, or t
  misc_feature (1583)..(1583): n is a, c, g, or t
  misc_feature (1632)..(1632): n is a, c, g, or t
  misc_feature (1640)..(1641): n is a, c, g, or t
  misc_feature (1675)..(1676): n is a, c, g, or t
  misc_feature (1716)..(1717): n is a, c, g, or t
  misc_feature (1721)..(1721): n is a, c, g, or t
  misc_feature (1734)..(1734): n is a, c, g, or t
  misc_feature (1742)..(1742): n is a, c, g, or t
  misc_feature (1744)..(1744): n is a, c, g, or t
  misc_feature (1749)..(1749): n is a, c, g, or t
gcagtaacacgccaggatcttacacagatgtcagtgcctcgtctggctaccatctgttccagtgaccgagaaccactgcgaggacattgatcagtgtgacttccctgcagactgcgtagggggtgacggcatcaatatcaatggctcctacagatgtctgtgcccccaggggcgatcggctggtgggtggcatgaaatgcctacacatagatcagtgcagcctaggtatcctgagaccatgttgaccgttcccctatgggggggcttgtcaagaaccattcgatggtcatccatatgatgtgtgtctagctcatgagggcttcgatcgtaccctacccgaggtaccagcacgtgttgtgagagaggtggaagcagtcccgaccacatagacggagtgctacctgaacttcgatagactacagtggttctttgcgagctaggcagtaattacggccacccgaagcgtgacacccaaacgaggagtgctgcgtgctctctgggggccggctggggcgaccactgcgaaatntnncnntncnnagtcnncactcngncgagttcacagcctctgcccagacggaaagggctacacccaggacaacaacatcgtcaactacggcatcccagcccaccgtgacatcgacgagtgcatgttgttcgggtcggagatttgcaaggagggcaagtgcgtgaacacgcagcctggctacgagtgctactgcaagcagggcttctactacgacgggaacctgctggaatgcgtggacgtggacgagtgcctggacgagtccaactgccggaacggagtgtgtgagaacacgcgcggcggctaccgctgtgcctgcacgccccctgccgagtacagtcccgcgcagcgccagtgcctgagcccggaagagatggacgtggacgagtgccaggacccggcagcctgccgccctggccgctgcgtcaacctgccgggctcctaccgctgcgagtgtcgcccgccctgggtgcccgggccctccggccgcgattgccagctccccgagagcccggccgagcgtgccccggagcggcgcgacgtgtgctggagccagcgcggagaggacggcatgtgcgctggccccctggccgggcctgccctcaccttcgacgactgctgctgccgccagggccgcggctggggcgcccaatgccgaccgtgcccgccgcgcggcgcggggtcccattgcccgacatcgcagagcgagagcaattccttctgggacacaagccccctgctgttggggaagcccccaagagatgaggacagttcagaggaggattcagacgagtgtcgctgcgtgagtggccgctgcgtgccgcggccgggcggcgccgtgtgcgagtgtcccggcggcttccagctcgacgcctcccgcgcccgctgcgtggatatcgacgagtgccgagagctgaaccagcgcgggctgctgtgcaagagcgagcgctgcgtgaacaccagcggctccttccgctgcgtctgcaaaggccggcttcgcggcgcagccggcccgcacgggggcctgcgttccccagcgccgccgctgacggcgcgncgacgccgccctcggcccagacctcggtgatcactggagggatttccgngagctcgnnctcacttctgcccgacttgtggtcggacccaggnnccttcagggcccgagaccctcccgggccttgagaccgagnngccnctacgggcccccntccccggntnagcgngcggttgtaaggtctccggagggacgctgctggctttcctcccagagggtggtttcctagaaactgataatcagatcgtgctctttaaaacaaaaacaagg

SEQ ID NO: 656816 - DNA, 340 bp, Homo sapiens
  misc_feature (4)..(4): n is a, c, g, or t
ctcngcagatcatcacttcgacgatgtcggcctgctggtagaccatcgcgcaccaggcccctcccaccaccatcaggccgttgccgagcaggaaggcaacgatgctggccaccaccgccacccgtccgctgcgcgacaaccgggtccagttggtggcctgggtggcaccactggcaaaggtgccaaagaccatggtcactgctgccgaaaaggtcatggtttcatgcggcaccaccgccgccaggccggcaaagccaccggcatcgcgggtgtcggtgccgctgatgttcgcgttgcttggtggtggcgatggtcatcgacacccgcgatgcgggtaccg

SEQ ID NO: 656817 - DNA, 961 bp, Homo sapiens
  misc_feature (22)..(22): n is a, c, g, or t
  misc_feature (389)..(389): n is a, c, g, or t
  misc_feature (455)..(456): n is a, c, g, or t
  misc_feature (462)..(462): n is a, c, g, or t
  misc_feature (703)..(703): n is a, c, g, or t
  misc_feature (712)..(712): n is a, c, g, or t
ggactttgcgcggaggtagganggggaagtggaggcgggagtgaagtctcgcgagaagagtcggttgccgtagcagagccctctagctgtgtgtgtctgaggctcggcgctgagccgggacggtttgctgagcccgttagtgcgcccggccgagacacgccgccgccatgtccgctacctgcgtcccccaacacgtctctgttcgtcaggaactggccgacgacaccagtctgaagattgcggctgaatttggtcttatgtctatattgatgtgtatgttccattgattctacatcgcgtccaagagattgctatgttcaattgaggatgttcgtgatgctgaagacgcttacataattggacagaaatggattgtggacggcagatgnaatacatttgccaggggatcaagacacaaatcagtgaaagccaggaaggagaagtgtttctcacgnnatatgnttatgacagatacagacgttctagaagccgaagttatgaaaggaggagatcaagaagtcggtcttttgattacaactatagaagatcgtatagtcctagaaacagtagaccgactggaagaccacggcgtagcagaagccattccgacaatgatagaccaaactgcagctggaatacccagtacagttctgcttactacacttcaagaaagatctgacaagcggaaaaacgaaccacaagnaagggcagnttcaacgcgaacaaaggtggggtgtggaagtgctgcagtatgaatatgttcgaatcttttggctctggtctggacaagatttcgaatgttttctgacttcttgggatattgaggccttcattttgaacgtagcttttggcattaagggattccttttgctggggactcatcccaatgaatgggttttgtgagggccggccacaatttggcacggtgctttggaagcttttgccttggtcacactgtggg

SEQ ID NO: 656818 - DNA, 644 bp, Homo sapiens
  misc_feature (22)..(22): n is a, c, g, or t
  misc_feature (389)..(389): n is a, c, g, or t
  misc_feature (455)..(456): n is a, c, g, or t
  misc_feature (462)..(462): n is a, c, g, or t
ggactttgcgcggaggtagganggggaagtggaggcgggagtgaagtctcgcgagaagagtcggttgccgtagcagagccctctagctgtgtgtgtctgaggctcggcgctgagccgggacggtttgctgagcccgttagtgcgcccggccgagacacgccgccgccatgtccgctacctgcgtcccccaacacgtctctgttcgtcaggaactggccgacgacaccagtctgaagattgcggctgaatttggtcttatgtctatattgatgtgtatgttccattgattctacatcgcgtccaagagattgctatgttcaattgaggatgttcgtgatgctgaagacgcttacataattggacagaaatggattgtggacggcagatgnaatacatttgccaggggatcaagacacaaatcagtgaaagccaggaaggagaagtgtttctcacgnnatatgnttatgacagatacagacgttctagaagccgaagttatgaaaggaggagatcaagaagtcggtcttttgattacaactatagaagatcgtatagtcctagaaacagtagaccgacttcttgatctcctcctttcataacttcgcttctagaacgtctgtatctgtcataatcataatgtgggc

SEQ ID NO: 656819 - DNA, 350 bp, Homo sapiens
tggtaaaatcctgtctctattaaaaatagaaaaattggcaggcatggtggtacatgactgtggttccagctgctcaaaaggctaagccaggagagtcatttgagcctggtaggcagaagttgcagtgagccaagatcgcaccattgcactccagcctgtacgacagagggagattctgtctcaaagaaagaaaaaaaaaagacaaatgggactatattcaaactcaaaaatcattctgcccagccaaagggaaccaatcacacagcagtaaagagcaaacctcatgaatgggagaaagccatcctgcaagctattcatctgatggaaggttgatatccagcatatacaag

SEQ ID NO: 656820 - DNA, 375 bp, Homo sapiens
cctctccgcctgtctgcagcttgccttctgccctctggatatcatccttctcccgcaggcctgacatgtccataacccctgcaggacacaccttcttcatctccttttggagccacctgctcaagcaggtggtaataagctttagagtccttgatgtcagtactgaagttgccaattttgttgcagcctgcatatgccaggtggtacttagcccacctcaggaagagctcttcaggggagagtttcatcaaatcctccaggcactcaccttctctcaaaagagcaatcagagctacatatctgctgagttcaatgtcagcaaacaacccaatcttgatgacttgccacagaagtcccaggaccagataaggcttc

SEQ ID NO: 656821 - DNA, 137 bp, Homo sapiens
ctggggggaaactgactggagggggaactgactgactgggggataactatctggagggggcactgactgactcggggagaagtgacttggggggcactggcagactgggggccgggtctgagcggcgggcggccgct

SEQ ID NO: 656822 - DNA, 452 bp, Homo sapiens
  misc_feature (2)..(2): n is a, c, g, or t
  misc_feature (14)..(14): n is a, c, g, or t
  misc_feature (84)..(84): n is a, c, g, or t
  misc_feature (93)..(93): n is a, c, g, or t
  misc_feature (117)..(117): n is a, c, g, or t
  misc_feature (325)..(325): n is a, c, g, or t
  misc_feature (354)..(354): n is a, c, g, or t
  misc_feature (360)..(360): n is a, c, g, or t
  misc_feature (399)..(399): n is a, c, g, or t
tngcggggtggccngctccgggtgtggacgggcggtccccctttcacctgccgcctcgggacaagcgttggggaaccgcatcgncgctgtcgncgcttgtggaggagtccgcgcagncgttctaacaggtgatccgcgtcactcccaggccataccgaagcggctgaacgctgtgccagggctccttatgctcttctgttctgggacgtgaaaacgtctttccgccttattggtcgtccaaaaaggtgcaccggttcacagtataagagtcaaaaaccagtattaccaaaaaggacactacgaggcgtcaggggttgcaggagtnggctttctttcggatttaacggaaccggncagganccattcgttaggtcttcttaaaaattcggggtttcttgncagtgggtgggccgaaaacgttaggttaaagttttccaagtttgttaaagttg

SEQ ID NO: 656823 - DNA, 122 bp, Homo sapiens
ggggagattcgtggggacacggggggagaggacatgtgtaaattaatataaaaagtaatagaatagataagatgaagagaataaatgaagaaaatgatataattgagagaaataagttattt

SEQ ID NO: 656824 - DNA, 1075 bp, Homo sapiens
atccgcgccgctcctgcgtgacagggcgacaacctgcagcacagcggtgactgtggcccggggctgtggcatggtggccccccaggcagcactctgatcatctgtccacgcacacccaccctgcagcggggctcacgccatgccctctctcgcacgttccctgccgcatggcagtcccctcacagcccgctgcaactggccgctctacggctccctggctccacgggccacctgctctcttgccccgcactggtccccctgcagccacgcaagcacacgcacgctgcgctgcttgcgacgcctaccaggaacgccttcacgctacctagcgctgcgcgccactgctcgcgcgacgaccgcgctgtccaacttgacctgctgcgcgcgcccgtgcacgcgccgcgcctgcactgcatcggcactcctcgccctgctcaccacgcgccaagcaacgccctccagtaggctcctcacccgctatccaccgtcgcacgccacttggcccacgctacttgcagctgcagtgcgccactggctcactcacgcggcacgggcgctgcgtgcttccctcttgcaacaccttcgctctccagcgctccttcacagctaccacttggccctctgctaaccacgccctgcaccccaagctctcaatcctcccgtccctgcactccctctaccaccggatccaacaccacacctggcgttgaccctgacacgtctccctggccccctcgcaacctgaggtcatcacccaccccaccgccgcgcacctcctccctgagcccgcacccggggccacacgccctggctcctggcgcacccggtaccccgccacctagcggagcccgcctcctccagcgttgtcccgcgggctccgcggccctgactgtcctgccccattgcgtccctgttgaaacgccgttaaactaatagggcacaccttcctcactcctctaccccaccaacaatacctcacccctatacaaactacacacccaccacacaacaacactaccaccacaaacaacacacaccaacccactacacccaccccccaccccacccctccccg

SEQ ID NO: 656825 - DNA, 171 bp, Homo sapiens
  misc_feature (20)..(20): n is a, c, g, or t
  misc_feature (72)..(72): n is a, c, g, or t
  misc_feature (107)..(107): n is a, c, g, or t
tgatggccaaactgaaacancagagttatgagatcaacgtgactgtacaaccgcatcagccacgcccacaanttccggaagggggcaaggtaacggcctcgttggangccgctggaagtgaggatgccgccccggacagtggcaccagggaaagcctgggattgtatgtcc

SEQ ID NO: 656826 - DNA, 710 bp, Homo sapiens
tggggcaaacctaccggaggtttattttgggcccaaaaaaaaaaccaatggattggtttggaccggggggtggggcaggggggtctccccaaggttaaaacccccccgaggggggttgggggtaagggttgaccccgggggggctcctcgggtgtcccgagtgcacacccgggcaataggggccctccttctcccgacgctcgggggcagcgcaggagaggggttacgcgggagaaaggcgcgtgccgcagagctgtgccatgtgggccgaggaacgctcagggagggcactcgaaacaccagctcccaatacaggtgtctcgacctctccacaaccaacggcccgggaaggaagctgggtgcggaatgaaaggcagtggacagcccgcgccaagagccaaggtgggggagccccaagggctggtaacttgcagcggcgccggggttggaggggaggcccccaaaggggcgcgagtctcacaaaccatccctgatataacccgcgggggggggttctcccggatgacataactccatggtctcggttataccacgaaatctacagagcgcgggttctctcccctgcccaccacacagcaagtcttccggtagaggggggcacacccccaggtccggggccagtttggacgtcaccccacgtgcggggtcaccacgcgctgccggccaagttctgttggcccgatgaggag

SEQ ID NO: 656827 - DNA, 425 bp, Homo sapiens
cccttcgggcatgatttgcaatcacaagccccctgaaacaagtgagttccaagcccacaggagcctatcaattcaagtcttaagtggtcccggaaatgcgtgcaaagcccccatatatagcccttttcacggcttttataagccttcaagctcttactatactcaatccttctcagtcgcgatatcaacacacctaagattctctaaggcacagcaatagcatgcgtgatctagtgggtagcgcagtgtccacactgccacatctatctacagatgtgatatatagctcgtcttatatacacacccacacacgctacaacacataacacactccgctgatgtaacacgagcgcgtgctctgtgagcccacgatagagacacgcttgtaaacacatctcctcgcgtgccgaattcgtacagcccgg

SEQ ID NO: 656828 - DNA, 641 bp, Homo sapiens
attggtggagagtagacagcagaactcatacggctgtgctggctaagcagagactgtagtatgctggctgacagcgacgatcagtgcagcgatggctgtggtgctggggccagccccgggactcccgtggtgcagtgaggacccgtgtgtcccggtgtcctggctgctggcatccctggtgcaaaatgcgggcgatggaactgcttgaatgtgaaatggagtgcggagatgtgccctgtttgatgcaggaagttctggggtgctccatgtacctgtgaatcccaacttgctgtgcctgcggtgtgcccactgtcacccacggtccccacagtagaatgcgatgcatggtcccagcggctcctgtgatcctgcccaattatctgcgacacaacacataccatgcaggtccagcatgactcttggaggcccgatgcatgactgcatgcaagccacaggtagttcctcccatggtgggatggccctcacttttgtagggcccatgattggcatttggcccgtggtgatcggagtcacctggacagcgccagagggctcgacgaagccatgttcctgcggcggagcaagcatgtgagcccaccaagagggcccctatccttgcgtccaagcactactgtcccacc

SEQ ID NO: 656829 - DNA, 293 bp, Homo sapiens
tatatcattacctttgggaagacaactcatatcagctgagcttcttttgatatgcctattttccatatgtatatcttcttgggtgaggtgtccttttcagatgttggtacatttaaaaatcagttattacccactcccaccacttctattcaacatagtactggaagtactatcaagagagagcaattagacaagaaaaagaaattaaagatatctaaatgggaaaggaagaagtaaaatgatctctcttggcacatcatatgatcctatgtgtagaaaactccaaagactcc

SEQ ID NO: 656830 - DNA, 106 bp, Homo sapiens
tcgatacgactttttttttttttgaactaagtggcttttttattagagaaagccagaattacaaaagacttaagagttggcattggggcccttctgtcgtcttctc

SEQ ID NO: 656831 - DNA, 1021 bp, Homo sapiens
aaggtctctctatgcaagcagtaccgttggggccgcgcgtaggaatcatgtaggataagagtgaaccaatggatcatgggtctgttatcctagtgagaatcctgggtcatgacgtaggtgctctggagtccatcagacaagtaaaatgaacgcaccggacggctcaccgatgctgtactgacacaacttcccagatggatgttctgtgacggtctattgacattggcatgctgatcgaaaacgaagagatgatctccaatgactgacgcatcggtatgatcctaacagtgtacggcaccactgtcactggaccaagcgattggacagtgagtcggatcttcgacaacgaatgtgcgggccagaggtagccgcaagaagaatggactcgggaagctgacaggggcatgcttgttacctgtatcgcataaagtttccataaccagcgacacgtaaaacctagccggcgtaccgcgattgcctggcgtaaaagatcacggtcggcacgcttaaggtctgacacatcggccgtcaattgcacacccttagttgacgccagacttacaacacattttcgtagattaacttgactagtcttcaacgtgggccctgaagagagtactaactcacaccgggaacttggagcccgagcgacaaatactaagaacgtccgcgacgcaaaggaatcaagggagacatacctacagaagcgacgagtacggctaaaaagaacgtaacacctccacccacacgcagaactacaccccccttaagtggaccgtacccggaaaggcgcggcaataggcagagagacggactacacaacagggcccgcctggccattactgcgccaaggcggacggaaaaggccctcctgtgccaacacttacacgcccagaggaatgggctgactaacgtaacggccgacaacaacctgctgttcctcggacgccccatagaacgaagacatcaccaagaaggccgtatggacgcgttacgcatggcagaaaccgcgccgcaacga

SEQ ID NO: 656832 - DNA, 303 bp, Homo sapiens
aaatgggcgacatgccagcagcctcacaatgaaggcttgactattgacctgaagaattttagaacaccatggagagaagaccttcaccctatcgtaagccgtctttttgtgggacatcttcctcccgacatcactgaggaagaaatgaggaaactattttgagaaacatggaaaggccggcgaagtcttcattcataaggattaaggatttggctttatccgcttggaaacccgaacccttgcggagattgcccttgtggtgctggactatctgcctctccgtgtacagcatgataggtggtg

SEQ ID NO: 656833 - DNA, 240 bp, Homo sapiens
  misc_feature (1)..(2): n is a, c, g, or t
  misc_feature (9)..(9): n is a, c, g, or t
nnatagggncagggggccgagagaggagaactatttgaacctgagaggtggaggctgcatagagccaagatcgcgccattgcactcaagactgggcacatatttagactccgtctaaaaaaaaaaaaaatattagacaaaataactttatgacaaaaactggaattataatctaagaatattttataatgatcaatgtgtccgtcctttaggaggcatttaccatttttaaacacgcatg

SEQ ID NO: 656834 - DNA, 1288 bp, Homo sapiens
ggtcgctgctactcctttggattatgtctacaggattccaaagtagtctcttattccggagagaaggacgatctgcatcttgcagacagttattggcattgacccatttgaaattgtgtcaccggtccgttataatcataacgaagggagcatgtcagagtcaacactcgattgttagaacttctaaccatggcgtagggtattgaacaatctatgaggctccacttgtggacaaatagatggagtgtgcagtatcgatgcctcgcttatccggagagtctctgacttctgttccgcccatgtgcatgatagcaagtcgagtcggcggcaaagtcatcaggctgtgcgacatccctcgagtcacatccgcatagataggtctggggattttagcatacaacattttaaaccggccaaaaatcccacaaaaaccgggccctccccgaaattgtcaacctccccccttacacgagacgtttaaaagcaccaatttaccttggtgtggttgcgtcttttaccatttaaccaaatgtctggtttcgctggatgaagagccaaccctgtgtggtttttctccctcgtgggtgagggagccaaatgtgccaataacgatatggtgggttcccgttgggtcagcggtgagaaggtacactaaataacttgtcggctctataattcccctctccgagaaccaaaggggggggccctttattagcgcggcgggggcaacacagctgtttctacgtcgggaggagcaccccaaattttcggtcgttgcaagggattcccgtttacaccggtggtctgaaaaacattcttggcgccccacgagactctaataatatttcccctctttcacttaatatagccaaaacccccccctttagcctggaaaatatttacatccccggaaaaagttttatggccccccatacttttttcttcaaaccacacgctgtaaacacacaaccttccgtgggaaaccaaaacagggcggtaacgacaaacgcgctctctttgggtgtataggcgcaacctctcccccatacttgttgcgcgccgggaaatattggtgggggcagggtcacctccggaattggaactcaccggggggcacgatccaacccagtgggggggggcttatagggggggagggggtccatttacctttaaagcacaacggtccccctttgtggagcagataaatatcagagcgagaatataccctaccagtggagatccatttgtggccctctcaagccgattgtggaagaaacattttcctacg

SEQ ID NO: 656835 - DNA, 357 bp, Homo sapiens
acacctctagggatacacttctgcttacacccattagatttggtgtgtgcattctgggggatacacttctgcttacaggcagtggattttggtgtgtgcattctgggggatacacttctgcttacacccattagattttggtgtatgcattctgggggatacacttctgctcacacgcattagattttgctgtgtgcattctgggggatacacttttgctcacacgcattagattttgctgtgggcattctgggggatacacttttgcttacagacattggattttggtgtgtgcattctgggggatacacttctgcttacacccattagattttggtgtgtgtatggtgtgtggtg

SEQ ID NO: 656836 - DNA, 533 bp, Homo sapiens
gaggattaactgcgttgactgtaattctgaacatccctctgcttttcactgaagccccaattgttcagatttatttctaatcacttttaagatttcagttggtcttgacaatatgacaccgtacaggtacacggccctttgtgtccatattttcacgaggtggcatctattgcctgtcatatatttcctctttgtattcacctgaagtaaggctggatgagtttttcttaagtcaaagggggtatcatgagaatttaaatagttgctttgttgccacagcagttgtcatgagaatgaacttgtagttttatctatgagaaatgcaagaggaggccaggcacagaccactgcacgatttttttgtgtccaccgcactctgcacaaaactgacacacagcaggtggacaataaacaactgtgaacatctttgagctttaccaaatttattcttatgttctatgagtttcctacaaccaaaacaaatttcatacatttttaggaaactacaactttagacctttttcttcctgagt

SEQ ID NO: 656837 - DNA, 878 bp, Homo sapiens
ccaaactaaggctaggtggaggccggtgtttaatcggcgaggccgagaggccggttctttaggccgctgcccgcctccagctctcggggtcggctctaggaggcgccctcaggagaggggtgggcgctctattccagagaccgagtggcaggcggcactgtggcggggctctttccccgtttcgcctcagctacccctcagctccggtagtcgccagtccggggtcgtcgccgtttgggcgggagctgtcggcccgcgcgtcccgtcgccgcttccgggtccaggccctcgggccgctgccgtcgtcatgaggctgcgggtgcggttctgaagcggacctggccgtggaggtgcccgagacggaggccgactgctggggcatttgcgctcgcacctgaggcagtccctgttgtgcaccttggggggtacagttctaatacccgatttacaaattacatgtgaactacaaggatcccctcactggagatgaaagagacctgtggttcatatgggatggtttcctggggacttgatatgtggattcttcaagatgacattccagcggcctaatataccttcatccaccagattcagagcattcttcactccagaaataatgagcaaacctcttgtgggccaccagctccaatcaagaactagcattaccaggatggaacaacacaaggtgattccattccaaggacaaggcagccccagatctgtttgtgttggaactgacgaccagtatgttaagggcctagtcaacaattttgaagctgagtcaactgcaagatacatgcggcatattggcagcagtgcacacggtttactatacctaagaaccatgttctgtacgggaatcgcggcgaagggcccag

SEQ ID NO: 656838 - DNA, 724 bp, Homo sapiens
  misc_feature (665)..(665): n is a, c, g, or t
  misc_feature (691)..(691): n is a, c, g, or t
cggcgccaacaatgcaccatccagtggtttattcttcctgggggttcggcccccatgggaacagcccacagagcaaggcagcaaacctgagaccagagaccacagggccagggcagctgagaagtccacctggcggcacagcaggtttggggtgttggggccacaggcatggaggcagatgaggtgggaggaggctgttgtctgttcacatctgggcctaggaaagctgatggggccagcaagggtttgcaagggctcaagaaggcagccgagagccacttcctaccacctttggcacctgtttccctcgctgtccagccattgccgccagggagtcctcctgggcgcggaccgccccgagtaaggacaggcctggcttgctgcgggccggtgtggctgaccgggccctgctcgtcggtgcagcagctgatccattcgagaggcacgtccttccatcctggcccggctctcggagctgaatcgcacccgcccagcagctttccatgccaattacacagagtgtgggtgggaggctcattaacccccagaagtggaactggtccagggagtggtgaggatggacaggggcccttcagccgacgatggggggttaagcgtgccaggtcaggggttggggagcttgctcagcaccatccctgtggtcntcactgcagctctaattgcataattntgaaagtgattggcctggcaacttggtttcacg

SEQ ID NO: 656839 - DNA, 211 bp, Homo sapiens
ggctcttccaccaggcgggggcgggtctccacacctcccgagggtgttttgctgcgccctagggccgggcgggcgcctcctccgcgggtgtacaccgatcgccttcgaacggctgagatttcatcaccctgttcgaggatcttcgctctggtgccagcgcgggctcgaggctctgtacaccagcgccagtaggaggcagcccctcgggcag

SEQ ID NO: 656840 - DNA, 1484 bp, Homo sapiens
  misc_feature (185)..(185): n is a, c, g, or t
gcaacatgccatcctatgactgagtgaagactccggaaacttaggggccacgttgatgccatcggctcacggccgctagtaggcaacgcaccggagagtcgacccccgagcggtcgcggctaagttgctggtgtgtctgcactcacgcagcgcgtgattcgaactttctgaccgaacattaccanctccatgtgcttaacttttgcggtgaacgtttggtactgtaaggcatttacccatctctaaaggaaggaatccacgagtctatcgtgctcacatacattgtacaaaacgcttgcacacatagtcgtaggaactatatggatgcagctgaaacatgagccacggtgtgcaattggctcgctcaaaaatacacaacgaacattgggggccttgcgtccctatacaatcgcaatgctcgtgctgtcgcaaatcggcgccctaatgtaattacatatgcttccctgggggaccaagcgcgatacacgtccatctcaccaacaggccacgaccttgatctattccgcttgacatggatccaacattttcttttcagcctagcacagaagcctcgacggcacgaaccgcattgaccggatgctgtaaggccgggcggtgcccttgttgctcctcctgcgtcgagcgtgtgcctatgctcagacttcgtgacgtggcgccgatctcacattccgactcttggcttgactcgtacacttccctacgccgaacgcccctccgcctaaaccccctcgacgcctagaaaccccacactcaacttaacctaaggcgcataacaggcgcaccagatcttcctccttggcatgaccaagtacaagcccaaccgcattcgctcccttggactccacacgctactccaacatcctccgcctaacctctcaacccgacgaccctccgattccacatacctaccctccatgaggcccccgtagttatcattccccatcctaagacactattttatacaacacaaaacccccaaaacggggagctctcaaacctagaaacacaagcccaaatttataacgactctgcttaacaacccgcttcaatcttacaacggcagtaaagaacgacccctcacatgggcgtcactacaacccatcgcaccaaatatcccacttatatcgacaaaaccccgaccccgacacacgggcgccacccctagtcacagaagcaaaacaaagcacacacacggcgccatcaccgcagcgcccacagacgacaaagaccgcacagagcaacaacgacaagaacacacaacacaacccaacaagcgaaatgaggcccgcacaacaaagcacgcagcccagcgcgccaccccacacaaccccgacacacacccagtcctacacacacaacatccgaccaaacagcccccgacactcgccacaagagagcacaccagacacagcaaaccagcacgcaaagagcgagcatagaggacagaacagggcccccagacc

SEQ ID NO: 656841 - DNA, 600 bp, Homo sapiens
  misc_feature (45)..(45): n is a, c, g, or t
  misc_feature (58)..(58): n is a, c, g, or t
  misc_feature (81)..(81): n is a, c, g, or t
  misc_feature (85)..(85): n is a, c, g, or t
  misc_feature (137)..(137): n is a, c, g, or t
  misc_feature (149)..(149): n is a, c, g, or t
  misc_feature (151)..(151): n is a, c, g, or t
  misc_feature (167)..(167): n is a, c, g, or t
  misc_feature (190)..(190): n is a, c, g, or t
  misc_feature (194)..(194): n is a, c, g, or t
  misc_feature (201)..(201): n is a, c, g, or t
  misc_feature (208)..(208): n is a, c, g, or t
  misc_feature (211)..(211): n is a, c, g, or t
  misc_feature (224)..(226): n is a, c, g, or t
  misc_feature (232)..(232): n is a, c, g, or t
  misc_feature (235)..(235): n is a, c, g, or t
  misc_feature (249)..(249): n is a, c, g, or t
  misc_feature (257)..(258): n is a, c, g, or t
  misc_feature (261)..(261): n is a, c, g, or t
  misc_feature (264)..(265): n is a, c, g, or t
  misc_feature (326)..(326): n is a, c, g, or t
  misc_feature (344)..(344): n is a, c, g, or t
  misc_feature (347)..(347): n is a, c, g, or t
  misc_feature (352)..(353): n is a, c, g, or t
  misc_feature (355)..(355): n is a, c, g, or t
  misc_feature (357)..(357): n is a, c, g, or t
  misc_feature (365)..(366): n is a, c, g, or t
  misc_feature (375)..(375): n is a, c, g, or t
  misc_feature (377)..(377): n is a, c, g, or t
  misc_feature (382)..(382): n is a, c, g, or t
  misc_feature (388)..(388): n is a, c, g, or t
  misc_feature (391)..(392): n is a, c, g, or t
  misc_feature (398)..(398): n is a, c, g, or t
  misc_feature (411)..(411): n is a, c, g, or t
  misc_feature (418)..(418): n is a, c, g, or t
  misc_feature (421)..(422): n is a, c, g, or t
  misc_feature (594)..(594): n is a, c, g, or t
cggcactgtccccgaggcgggaggagcccgagggggcgcgagcgncactgaatcattntagtcaatcattttccatttctnagcngctcagttgtgatcaagggacacgtggtttccgaactgccagctcagaatangaaaataacttnanatgggatctcgttctntctcccattctttatttcatttntatnatcatanctcactncancctcaaactcctnnnctcaancantcctcccacctcancttcccanntanctnngactacagggattttatattggaagacatggatcttgctgccaacgagatcagcatttatnacaaactttcagagactnttnatttnntnanacagaccnnccatcagtntngcatntcaganaanncaattnaaaaatttatcanacagctnctnnaaaagaatgaacctcagagaccccccccgcagtatcctctccttatagttgtgtataaggttctcgcaaccttgggattaatcttgctcactgcctactttgtgattcaacctttcagcccattagcacctgagccagtgctttctggagctcacacctggcgctcactcanccatca

SEQ ID NO: 656842 - DNA, 224 bp, Homo sapiens
ggtgactctagcaggatcctttattgagacggggtctcaccatgttggtcagtgcgggctggaactcgtaatgtcagatgatccacctgcctcggctcctaaagtgctgggattacaggcatgagcgaccacgccatctttttttttttttttttaaacaaaacccagttttagaattagagcctcaaggggggggtgcagtggggctcacacctttaattccc

SEQ ID NO: 656843 - DNA, 901 bp, Homo sapiens
gggggggtcgcccaaagagaggcgcgccaaactgtgggccccggcaccgaacgggcgaaattttgggggacaaagaaccaggtaatggaccagtagtggggcggcgagcctatacccgggaaaaggcggtgttcccccccggcgaggaaaccataaggcgcccgcgcaagtagggtataacccatgggaccgccatctccaagctcccccgcaccacaaaggtggggtgcggccgcccccgaagttcatagacgcatgccagcggtcctccaaagccgctcgtagtgtgtgcagaacaacgcatggggtgcccagagtcaagacagcatgggcacgaaaggggggcctaccacactcgaaaaaaataatttcaaacgccccttgtcgcacacatcctgacagcaccaggaaggggcgttctgcgcacacacatacaggggggacaacctctgcgggtgatacccccctttttataagaaacacgatttttttttatcaaggaaacgtcacgacacacacgtcgttgttgtagacaatgagcgcgatcaagacaatacttagggccgggaaatcagggccctcgtcacccaaagcttgtcttgtggaagattcccgccgcatacgccgaaagcccgggtggctattatcccccaggtggctctgtgtcaccccagatggttcccgtcaaccaatgcggtcgcgtcggacaccacgaggaaacatatgttttctttcagtgttaacccgcatttttgctaataacgagtgctagtaacgccccactacaaatctttgctttcctgcgcgcacccgatttggcccgccagcacccgacctgccccagacctgccgaaactttgctccccaccaaacaaaataccacttccgtcccacaaacaaa

SEQ ID NO: 656844 - DNA, 197 bp, Homo sapiens
cgctgatgctctcacccacccctgaaccttcccatacttttccagcaacacaaagatatcaaccccaatgccaccttctggacaaagtgatgtggcagccactgttgtggggccaggccaggtaggccacgactgctcaccacgctgaactgggtcagggagaagagcagcagcaggaaggggtgggtggagagcgg

SEQ ID NO: 656845 - DNA, 245 bp, Homo sapiens
gttctgcctctgcctggggttttggcccccttggagaaaaacaggctcaaagtggggctggggcctggtgggtgaacctgagctctcccaggaggcaacttagctgccagtccccccctatgaggctcttttaccccgtgcctgcccctcggccagcatttcctatgctccctgggtcccccagacctctttgtgttgtgtgggtggcagcctccaggaattaaccttcttgttgtcctttgtta

SEQ ID NO: 656846 - DNA, 237 bp, Homo sapiens
gaaaggccaagggccatttaatttccctagcccccttaaaaagggagcccccaactactctttcaaaaaaaatcagccttaaaataaccagacataatatttgatatcctaacttgggccatgttttccaagaccagggcatatttttagacatcttttattcgcccagccatcggcatgacaggggtttttattagtattcccagtgggggctcaaagccaaacaaaaatatttta

SEQ ID NO: 656847 - DNA, 227 bp, Homo sapiens
gtgccaggtaatgtacacatgctgtaccccaaggaaggcaggagaaccgcattctgctctacgcgtgcgggaactgtgattaccagcagggggccgacaacagctgcatctatatcaacaagatcacgcacgatgtgaacgaactgacccagattatcgccgacgtgtcccaggcacccacgttgccgcggaccgaatacctaccaaatcaaggggtaccgagctcg

SEQ ID NO: 656848 - DNA, 167 bp, Homo sapiens
gtgaatggtgttgcatccctacccacatcagaaacacaacttaattcacaatggatgaacttccaaaatgtaagatctcacactatataactcttcagaagtacacataggcataaatctacctgcaccagggattagactgtgttttcttagattaataacaaaag

SEQ ID NO: 656849 - DNA, 303 bp, Homo sapiens
ggtcgaacggggatttgctgaagattttcattcccatgtggcagtagatatttcagaaccctgcatcatggtgtccacagaagtccccagagttgtatgagagttcatctgggcacctttcccaaaggcaggcccccagtgcagcttcaactattcactctatttataatgttgttcctggatatagggcttgcttccacttgtggccaggagaggatatttcttactccagatcaaagagttgagacattgccttcccacaattcccagtgagcccaactccttaccacaatccccggtcga

SEQ ID NO: 656850 - DNA, 172 bp, Homo sapiens
  misc_feature (87)..(87): n is a, c, g, or t
  misc_feature (108)..(108): n is a, c, g, or t
tagccggtccgaggttggcaaggggagtggtcatgagcttgccctcaggcctggcagaggaagtcgcttcacaataagatattccantgtcccagtactcaaccatgntccaggagaggccgctcagtgtcacttgcaggaacacaagccctggtgacctgccacaacctct

SEQ ID NO: 656851 - DNA, 697 bp, Homo sapiens
  misc_feature (99)..(99): n is a, c, g, or t
ggtttccttcacatctttggagtagttatgacttctcagtttttccccccttaaactgcattgcctgttctcttttcctgacatgttatcaggtatcangtgtgttgaatacatactgcttgtgtgtcaaaaaaacaaaaaaaggatttaaaattttggattagctgggcgcttgggggcttgtgcccattatgtcccagcttactcaggaggctgaaacaagggcggggtggctggagctcggggaggctcaagggctgcagtggagccataatcatcactggcactccagcccaggcaacagagcaagacccggtctcaagaaaaaacaaaatcttaaatctttggatttggggacgaaaccttaacccttttaaaagatagacattttgtggacattttttgcatggcccgtggttcggaaacacgggtttttttatcttaaacgatttttttcaccaacctcagttatttacaacttaactccggcggtggtaacaaattcgcgcagggaccttgaccggcaagaaacatttttttttttctaactacaggtgaccccggtttcaacctttcttaaccttaaaggtttccctttaacccacgaggcttttttccatagcctttaggagaacttttcaaaggccctagttgcaagctttggcagggcctctcttagcggtgcacccatatggtg

SEQ ID NO: 656852 - DNA, 758 bp, Homo sapiens
  misc_feature (7)..(7): n is a, c, g, or t
  misc_feature (61)..(61): n is a, c, g, or t
  misc_feature (63)..(63): n is a, c, g, or t
  misc_feature (70)..(70): n is a, c, g, or t
  misc_feature (84)..(84): n is a, c, g, or t
  misc_feature (94)..(94): n is a, c, g, or t
  misc_feature (100)..(100): n is a, c, g, or t
  misc_feature (112)..(114): n is a, c, g, or t
  misc_feature (118)..(119): n is a, c, g, or t
  misc_feature (121)..(122): n is a, c, g, or t
  misc_feature (129)..(129): n is a, c, g, or t
  misc_feature (131)..(131): n is a, c, g, or t
  misc_feature (135)..(136): n is a, c, g, or t
  misc_feature (183)..(183): n is a, c, g, or t
  misc_feature (200)..(200): n is a, c, g, or t
  misc_feature (230)..(230): n is a, c, g, or t
  misc_feature (281)..(281): n is a, c, g, or t
  misc_feature (365)..(365): n is a, c, g, or t
  misc_feature (426)..(426): n is a, c, g, or t
  misc_feature (444)..(444): n is a, c, g, or t
  misc_feature (475)..(475): n is a, c, g, or t
  misc_feature (513)..(514): n is a, c, g, or t
  misc_feature (528)..(528): n is a, c, g, or t
  misc_feature (542)..(542): n is a, c, g, or t
  misc_feature (563)..(563): n is a, c, g, or t
  misc_feature (608)..(608): n is a, c, g, or t
  misc_feature (615)..(615): n is a, c, g, or t
  misc_feature (657)..(657): n is a, c, g, or t
  misc_feature (664)..(664): n is a, c, g, or t
  misc_feature (674)..(674): n is a, c, g, or t
  misc_feature (681)..(681): n is a, c, g, or t
  misc_feature (697)..(697): n is a, c, g, or t
  misc_feature (752)..(752): n is a, c, g, or t
attaggntatcttatggaactgtattttatatccaactgtgaataacaggtaagttgaaancnaattgcnaagtttcatttatngtcatttttnaattcnattacccatttnnntccnncnnccaagcngnttcnncagactttctacttggggggaaaataataacactacaaacatatggnagggcttcgtacaagcntttcactcacagaggggtttatgttttcgnggatgtaggaaaagattttccaagtgtgaaaactaaatatatacaaaagcnatacattttgttattagttaaataaaatgtgtctttaaatatggaattctttgaaaaactcacttcatcgtccaaaattatggngactatttcacttttttaatcaaagatggaatattcatcacagttccccaagggattttcnaactggcctgggcaaggngttcacttgtagagtgtagttagtgaaaacntccagtggccaagcctcatcaataactgtatccaaaanntgacgctgcttggngtgtacccagaganaacaccaagctttcctggctncccggccctccctctccccattagtcttttgtgtgcatacataanttttgtntgaagtctcttggggtttagaagatcttgcactcattgttgnagaagancctccttctntttcttntcctggcctggttganggcagttcggacggtgcactcaaacacctgctgtactccccgattgctaatgtcngagcac

SEQ ID NO: 656853 - DNA, 195 bp, Homo sapiens
atgcctggtcgatgagcacactgatactgacaaattaccagacgcaatatctacagtcaaccagcaagtcattattaccgctcagtgtcaacccaactacaggcatgctcatcaaggaaaggttaaaaaaagtaagatggaactcggcaaatcttactccgcctgtgtaccagaaacatcatctctagcatcacc

SEQ ID NO: 656854 - DNA, 190 bp, Homo sapiens
tctctccacactggttttttcctagtgtccaagagctgtacctctttggactaacagttacatttacaaggggatttagagggttctgtagggcaccatttaaagtttgcactaacgattctatcttggaccaccagctatcaccaggctcggtagataaagtcgcctctacctataaatcttcccacta

SEQ ID NO: 656855 - DNA, 725 bp, Homo sapiens
  misc_feature (8)..(9): n is a, c, g, or t
  misc_feature (44)..(44): n is a, c, g, or t
gaaaaagnnaaaaaaaaaaaaaaaaaaagagaaaaaaagaaaanaaaaaaaaaactcagattggatttgtcctgtatccccccagtggaggtcctgcatgggatctgatggatcatgaaaatattttgtttctcaccatatgcttttgttggcattatgcagtaaccattgtcatcgttggaatgaattatgctttcattacctggttggttaaatctagacttaagaggctctgctcctcagaagttggacttctgaaaaatgctgaacgagaacaagaatcagaagaagaaatgtgactttgatgagcttccagtttttctagataaaccttttcttttttacattgttcttggttttgtttctcgatcttttgtttggagaacagctggctaaggatgactctaagtgtactgtttgcatttccaatttggttaaagtatttgaatttaaatattttctttttagctttgaaaatattttgggtgatactttcattttgcacatcatgcacatcatggtattcaggggctagagtgatttttttccagattatctaaagttggatgcccacactatgaaagaaatatttgttttatttgccttatagatatgctcaaggttactgggcttgctactatttgtaactccttgaccatggaattatacttgtttatcttgttgctgcaatgagaaataaatgaatgtatgtattttggtgcaga

SEQ ID NO: 656856 - DNA, 184 bp, Homo sapiens
tgggacttggggtctggttgagtaaactgaggtgatctcatagcccaagctggattgagaggccgctcttctagcgctcacttgtcctctggaaggtggtcagccagagcagcagcaagcacatcctcagtcaaagacatggcctgggccacctggactatgcggcggacaatgatgttaaagg

SEQ ID NO: 656857 - DNA, 1846 bp, Homo sapiens
  misc_feature (17)..(17): n is a, c, g, or t
  misc_feature (30)..(30): n is a, c, g, or t
  misc_feature (37)..(37): n is a, c, g, or t
gcggccgccgagccagngccccgcgggggnaacagangaagcacatctggacagctgtgcggcctcctcgcgggccgacgtcagccgagcacgtcccccacgtcctctccttctcgccacttattatttattcgttttcccaaagaagcgactagggacccaagtttaaaaattcctccccccacccaatgcgagacgtggccagatcccatccaacacacggtttaattttcatggggctctgggatcaaaagaacagaaacagcaacaacaaaagcccagccgctgtctgattttaagctggcaaagtgggaaaaataaagtgttgagtaaacagaccaagttggaaacttttcagcattacctaagaagcaaaggctcaattttggctgcttcattcttatctcttctgccacagttctaacgtgcctgatctactgagaccaaggatgaccaatgactcagaagggaaaatgggatttaaacacccaaagatcatggggaatttcagaggtcatgccctccctggaaccttcttttttattattggtctttggtggtgtacaaagagtattctgaagtatatctgcaaaaagcaaaagcgaacctgctatcttggttccaaaacattattctatcgattggaaattttggagggaattacaatagttggcatggctttaactggcatggctggggagcagtttattcctggagggccccatctgatgttatatgactataaacaaggtcactggaatcaactcctgggctggcatcatttcaccatgtatttcttctttgggctgttgggtgtggcagatatcttatgtttcaccatcagttcacttcctgtgtccttaaccaagttaatgttgtcaaatgccttatttgtggaggcctttatcttctacaaccacactcatggccgggaaatgctggacatctttgtgcaccagctgctggttttggtcgtctttctgacaggcctcgttgccttcctagagttccttgttcggaacaatgtacttctggagctattgcggtcaagtctcattctgcttcaggggagctggttctttcagattggatttgtcctgtatccccccagtggaggtcctgcatgggatctgatggatcatgaaaatattttgtttctcaccatatgcttttgttggcattatgcagtaaccattgtcatcgttggaatgaattatgctttcattacctggttggttaaatctagacttaagaggctctgctcctcagaagttggacttctgaaaaatgctgaacgagaacaagaatcagaagaagaaatgtgactttgatgagcttccagtttttctagataaaccttttcttttttacattgttcttggttttgtttctcgatcttttgtttggagaacagctggctaaggatgactctaagtgtactgtttgcatttccaatttggttaaagtatttgaatttaaatattttctttttagctttgaaaatattttgggtgatactttcattttgcacatcatgcacatcatggtattcaggggctagagtgatttttttccagattatctaaagttggatgcccacactatgaaagaaatatttgttttatttgccttatagatatgctcaaggttactgggcttgctactatttgtaactccttgaccatggaattatacttgtttatcttgttgctgcaatgagaaataaatgaatgtatgtattttggtgcagaaaaaaaaaaaaaacaaatggccctctttggcctcagcggtggaagctctgccggccgctttccttacacgaggggtaaatacatgacacctcact

SEQ ID NO: 656858 - DNA, 256 bp, Homo sapiens
actaaccagaatatccaaggagctttaacaacaggtataggaaaaaaaaaatctaacaatctgcatcaaacaaggggtgaaagctttgaatatgcatttctcaaaagaaagatatcacaaatgtcaacacacacactatgcaaagggtgaaacaggtgctcaaccatcattgacccatcagcagaactgcaaaccacaacctcaaaatgagcatagatatcatctacaacccccggcaagtatgtagtcagtatca

SEQ ID NO: 656859 - DNA, 1847 bp, Homo sapiens
  misc_feature (17)..(17): n is a, c, g, or t
  misc_feature (30)..(30): n is a, c, g, or t
  misc_feature (37)..(37): n is a, c, g, or t
  misc_feature (1755)..(1755): n is a, c, g, or t
gcggccgccgagccagngccccgcgggggnaacagangaagcacatctggacagctgtgcggcctcctcgcgggccgacgtcagccgagcacgtcccccacgtcctctccttctcgccacttattatttattcgttttcccaaagaagcgactagggacccaagtttaaaaattcctccccccacccaatgcgagacgtggccagatcccatccaacacacggtttaattttcatggggctctgggatcaaaagaacagaaacagcaacaacaaaagcccagccgctgtctgattttaagctggcaaagtgggaaaaataaagtgttgagtaaacagaccaagttggaaacttttcagcattacctaagaagcaaaggctcaattttggctgcttcattcttatctcttctgccacagttctaacgtgcctgatctactgagaccaaggatgaccaatgactcagaagggaaaatgggatttaaacacccaaagatcatggggaatttcagaggtcatgccctccctggaaccttcttttttattattggtctttggtggtgtacaaagagtattctgaagtatatctgcaaaaagcaaaagcgaacctgctatcttggttccaaaacattattctatcgattggaaattttggagggaattacaatagttggcatggctttaactggcatggctggggagcagtttattcctggagggccccatctgatgttatatgactataaacaaggtcactggaatcaactcctgggctggcatcatttcaccatgtatttcttctttgggctgttgggtgtggcagatatcttatgtttcaccatcagttcacttcctgtgtccttaaccaagttaatgttgtcaaatgccttatttgtggaggcctttatcttctacaaccacactcatggccgggaaatgctggacatctttgtgcaccagctgctggttttggtcgtctttctgacaggcctcgttgccttcctagagttccttgttcggaacaatgtacttctggagctattgcggtcaagtctcattctgcttcaggggagctggttctttcagattggatttgtcctgtatccccccagtggaggtcctgcatgggatctgatggatcatgaaaatattttgtttctcaccatatgcttttgttggcattatgcagtaaccattgtcatcgttggaatgaattatgctttcattacctggttggttaaatctagacttaagaggctctgctcctcagaagttggacttctgaaaaatgctgaacgagaacaagaatcagaagaagaaatgtgactttgatgagcttccagtttttctagataaaccttttcttttttacattgttcttggttttgtttctcgatcttttgtttggagaacagctggctaaggatgactctaagtgtactgtttgcatttccaatttggttaaagtatttgaatttaaatattttctttttagctttgaaaatattttgggtgatactttcattttgcacatcatgcacatcatggtattcaggggctagagtgatttttttccagattatctaaagttggatgcccacactatgaaagaaatatttgttttatttgccttatagatatgctcaaggttactgggcttgctactatttgtaactccttgaccatggaattatacttgtttatcttgttgctgcaatgagaaataaatgaatgtatgtattttggtgcagaaaanacaaaaaaaaaatggccccgcttggccctagcagtggaactacgcgcccgttccctgtgcagggggcgaatacccgcacttctctccctgct

SEQ ID NO: 656860 - DNA, 308 bp, Homo sapiens
gggcgaaatctgcaagtgtgtctgtaagacttcaactgcctgggctgggcgtggtggctcacgcagtgagtcccagcactttgggaggccgaggcaggcggatcacctgaggtcaggagtttgagaccagcctgaccaacatggaggaaccctgtctctgctagaaatactgaaaattagccaggcgtggtggcggcaacctgtaatctcagctactcaggaggccgaggcaggagaatcgcttgaacccgggatgcggaggttgcagtgagccgagatcatgccattgtattccagcctgggtgaca

SEQ ID NO: 656861 - DNA, 1821 bp, Homo sapiens
  misc_feature (17)..(17): n is a, c, g, or t
  misc_feature (30)..(30): n is a, c, g, or t
  misc_feature (37)..(37): n is a, c, g, or t
gcggccgccgagccagngccccgcgggggnaacagangaagcacatctggacagctgtgcggcctcctcgcgggccgacgtcagccgagcacgtcccccacgtcctctccttctcgccacttattatttattcgttttcccaaagaagcgactagggacccaagtttaaaaattcctccccccacccaatgcgagacgtggccagatcccatccaacacacggtttaattttcatggggctctgggatcaaaagaacagaaacagcaacaacaaaagcccagccgctgtctgattttaagctggcaaagtgggaaaaataaagtgttgagtaaacagaccaagttggaaacttttcagcattacctaagaagcaaaggctcaattttggctgcttcattcttatctcttctgccacagttctaacgtgcctgatctactgagaccaaggatgaccaatgactcagaagggaaaatgggatttaaacacccaaagatcatggggaatttcagaggtcatgccctccctggaaccttcttttttattattggtctttggtggtgtacaaagagtattctgaagtatatctgcaaaaagcaaaagcgaacctgctatcttggttccaaaacattattctatcgattggaaattttggagggaattacaatagttggcatggctttaactggcatggctggggagcagtttattcctggagggccccatctgatgttatatgactataaacaaggtcactggaatcaactcctgggctggcatcatttcaccatgtatttcttctttgggctgttgggtgtggcagatatcttatgtttcaccatcagttcacttcctgtgtccttaaccaagttaatgttgtcaaatgccttatttgtggaggcctttatcttctacaaccacactcatggccgggaaatgctggacatctttgtgcaccagctgctggttttggtcgtctttctgacaggcctcgttgccttcctagagttccttgttcggaacaatgtacttctggagctattgcggtcaagtctcattctgcttcaggggagctggttctttcagattggatttgtcctgtatccccccagtggaggtcctgcatgggatctgatggatcatgaaaatattttgtttctcaccatatgcttttgttggcattatgcagtaaccattgtcatcgttggaatgaattatgctttcattacctggttggttaaatctagacttaagaggctctgctcctcagaagttggacttctgaaaaatgctgaacgagaacaagaatcagaagaagaaatgtgactttgatgagcttccagtttttctagataaaccttttcttttttacattgttcttggttttgtttctcgatcttttgtttggagaacagctggctaaggatgactctaagtgtactgtttgcatttccaatttggttaaagtatttgaatttaaatattttctttttagctttgaaaatattttgggtgatactttcattttgcacatcatgcacatcatggtattcaggggctagagtgatttttttccagattatctaaagttggatgcccacactatgaaagaaatatttgttttatttgccttatagatatgctcaaggttactgggcttgctactatttgtaactccttgaccatggaattatacttgtttatcttgttgctgcaatgagaaataaatgaatgtatgtattttggtgcagacaaaaaaaaaaaatggtctcttgtggcccacccgtggaaatatacggaccgtatccctttaaaggaggcg

SEQ ID NO: 656862 - DNA, 1855 bp, Homo sapiens
  misc_feature (17)..(17): n is a, c, g, or t
  misc_feature (30)..(30): n is a, c, g, or t
  misc_feature (37)..(37): n is a, c, g, or t
gcggccgccgagccagngccccgcgggggnaacagangaagcacatctggacagctgtgcggcctcctcgcgggccgacgtcagccgagcacgtcccccacgtcctctccttctcgccacttattatttattcgttttcccaaagaagcgactagggacccaagtttaaaaattcctccccccacccaatgcgagacgtggccagatcccatccaacacacggtttaattttcatggggctctgggatcaaaagaacagaaacagcaacaacaaaagcccagccgctgtctgattttaagctggcaaagtgggaaaaataaagtgttgagtaaacagaccaagttggaaacttttcagcattacctaagaagcaaaggctcaattttggctgcttcattcttatctcttctgccacagttctaacgtgcctgatctactgagaccaaggatgaccaatgactcagaagggaaaatgggatttaaacacccaaagatcatggggaatttcagaggtcatgccctccctggaaccttcttttttattattggtctttggtggtgtacaaagagtattctgaagtatatctgcaaaaagcaaaagcgaacctgctatcttggttccaaaacattattctatcgattggaaattttggagggaattacaatagttggcatggctttaactggcatggctggggagcagtttattcctggagggccccatctgatgttatatgactataaacaaggtcactggaatcaactcctgggctggcatcatttcaccatgtatttcttctttgggctgttgggtgtggcagatatcttatgtttcaccatcagttcacttcctgtgtccttaaccaagttaatgttgtcaaatgccttatttgtggaggcctttatcttctacaaccacactcatggccgggaaatgctggacatctttgtgcaccagctgctggttttggtcgtctttctgacaggcctcgttgccttcctagagttccttgttcggaacaatgtacttctggagctattgcggtcaagtctcattctgcttcaggggagctggttctttcagattggatttgtcctgtatccccccagtggaggtcctgcatgggatctgatggatcatgaaaatattttgtttctcaccatatgcttttgttggcattatgcagtaaccattgtcatcgttggaatgaattatgctttcattacctggctgacttctgggcctcatctccttaggggctggaaagccttcaagatcagtgccagcatccaaggaaatgctcttcctcatgtcagctcccctccagagccaaaagaagactactgtctcttcctgtttcaaaacgcttcatacccctaatgggcctcttatccacttatagtactctggatactggacactccattttttattttccaaccttcccctctacccccaacacataatatcctaatctttgtgaccatgcagttccctccacctggcatattcacattaaatgcacgtcttttctatgaaaacacaactactggcctccctggtcctaacccccgacctttccccccacttacctctactgagggccaatcgactgatccctggtcactgacctcgttcacctctgtcattacgacgcagcgcatcccattccccaaccccgttgttggttcccgctttcccccacaaccttacgataaccctatatcccccccaccaccagtacgttaacacaccccccccccctactctaggtacggctcagccgctttgatatataccgcgccgcccctcgcaggagcccaatatatcctctcacttcgtccaccccccca

SEQ ID NO: 656863 - DNA, 1539 bp, Homo sapiens
  misc_feature (17)..(17): n is a, c, g, or t
  misc_feature (30)..(30): n is a, c, g, or t
  misc_feature (37)..(37): n is a, c, g, or t
gcggccgccgagccagngccccgcgggggnaacagangaagcacatctggacagctgtgcggcctcctcgcgggccgacgtcagccgagcacgtcccccacgtcctctccttctcgccacttattatttattcgttttcccaaagaagcgactagggacccaagtttaaaaattcctccccccacccaatgcgagacgtggccagatcccatccaacacacggtttaattttcatggggctctgggatcaaaagaacagaaacagcaacaacaaaagcccagccgctgtctgattttaagctggcaaagtgggaaaaataaagtgttgagtaaacagaccaagttggaaacttttcagcattacctaagaagcaaaggctcaattttggctgcttcattcttatctcttctgccacagttctaacgtgcctgatctactgagaccaaggatgaccaatgactcagaagggaaaatgggatttaaacacccaaagatcatggggaatttcagaggtcatgccctccctggaaccttcttttttattattggtctttggtggtgtacaaagagtattctgaagtatatctgcaaaaagcaaaagcgaacctgctatcttggttccaaaacattattctatcgattggaaattttggagggaattacaatagttggcatggctttaactggcatggctggggagcagtttattcctggagggccccatctgatgttatatgactataaacaaggtcactggaatcaactcctgggctggcatcatttcaccatgtatttcttctttgggctgttgggtgtggcagatatcttatgtttcaccatcagttcacttcctgtgtccttaaccaagttaatgttgtcaaatgccttatttgtggaggcctttatcttctacaaccacactcatggccgggaaatgctggacatctttgtgcaccagctgctggttttggtcgtctttctgacaggcctcgttgccttcctagagttccttgttcggaacaatgtacttctggagctattgcggtcaagtctcattctgcttcaggggagctggttctttcagattggatttgtcctgtatccccccagtggaggtcctgcatgggatctgatggatcatgaaaatattttgtttctcaccatatgcttttgttggcattatgcagtaaccattgtcatcgttggaatgaattatgctttcattacctggctgacttctgggcctcatctccttaggggctggaaagccttcaagatcagtgccagcatccaaggaaatgctcttcctcatgtcagctcccctccagagccaaaagaagactactgtctcttcctgtttcaaaacgcttcatacccctaatgggcctcttatccacttatagtactctggatactggacactccattttttattttccaaccttcccctctacccccaacacataatatcctaatctttgtgaccatgcagttccctccacctggcatattcacattaaatgcacgtcttttctatg

SEQ ID NO: 656864 - DNA, 244 bp, Homo sapiens
aaatagctggagataaaccctgtaccattccatatatatgagaccttaaggcaaaaggcagaggctgatcagaacgacaagtctgtgaagggatcttggtcatcttgctttattgaaacttgcgctccatgtacttcttggcttcagtacttgaagatccccatgacacatagctaacagtgatctaccaggatgatcaatacttggtcttgggtatttgatgacagatatgaccctacttgct

SEQ ID NO: 656865 - DNA, 570 bp, Homo sapiens
atgtatcggttaatattatttcacatgtcacttccccagggccgcggtgcgttggttaaatctagacttaagaggctctgctcctcagaagttggacttctgaaaaatgctgaacgagaacaagaatcagaagaagaaatgtgactttgatgagcttccagtttttctagataaaccttttcttttttacattgttcttggttttgtttctcgatcttttgtttggagaacagctggctaaggatgactctaagtgtactgtttgcatttccaatttggttaaagtatttgaatttaaatattttctttttagctttgaaaatattttgggtgatactttcattttgcacatcatgcacatcatggtattcaggggctagagtgatttttttccagattatctaaagttggatgcccacactatgaaagaaatatttgttttatttgccttatagatatgctcaaggttactgggcttgctactatttgtaactccttgaccatggaattatacttgtttatcttgttgctgcaatgagaaataaatgaatgtatgtattttggtgcaga

SEQ ID NO: 656866 - DNA, 394 bp, Homo sapiens
gacctcaaagactttagggaggggggtcctttttataaaaatggttttttgggaaaagcagattcaaaaataaaactttttccccggtttcctcccaaatttttccttttcccaaggaaaggttcaaagttttttcccgaaacccccccttgaggggcaaaaggtggggttttttttttgaattttttttgcccccaagtaggggccctttaaaaaaaaatgcgggggtttaaattaaaaagcggtaagtcggcatcccgtttttgttggcccccaaaaaattttggcccaaactgggggccttttggatttcgggggttccaaactttttttgggggtcccctaacagttggaaatatgggccctttggtttttttttgttccccccccccca

SEQ ID NO: 656867 - DNA, 322 bp, Homo sapiens
catgaaagtggatagaggcctacggtttataagttagagtagatagacagctccatgattaccttccagatggccctgcagcccctctatcccccagctattagaccgctactcccagtggggcaggaggagcttccattgccatctggagaccctggcagggacttgcccatccgatccacacaccagcagggacctcggagctgcccctgggaggagcggcactgccgcttccggtagcagcctcgatggtcacaattgggcacgtagagtgtttgagcccctcggtagacctctggactcagtgctgcagcaactccag

SEQ ID NO: 656868 - DNA, 1265 bp, Homo sapiens
  misc_feature (17)..(17): n is a, c, g, or t
  misc_feature (30)..(30): n is a, c, g, or t
  misc_feature (37)..(37): n is a, c, g, or t
gcggccgccgagccagngccccgcgggggnaacagangaagcacatctggacagctgtgcggcctcctcgcgggccgacgtcagccgagcacgtcccccacgtcctctccttctcgccacttattatttattcgttttcccaaagaagcgactagggacccaagtttaaaaattcctccccccacccaatgcgagacgtggccagatcccatccaacacacggtttaattttcatggggctctgggatcaaaagaacagaaacagcaacaacaaaagcccagccgctgtctgattttaagctggcaaagtgggaaaaataaagtgttgagtaaacagaccaagttggaaacttttcagcattacctaagaagcaaaggctcaattttggctgcttcattcttatctcttctgccacagttctaacgtgcctgatctactgagaccaaggatgaccaatgactcagaagggaaaatgggatttaaacacccaaaagattggatttgtcctgtatccccccagtggaggtcctgcatgggatctgatggatcatgaaaatattttgtttctcaccatatgcttttgttggcattatgcagtaaccattgtcatcgttggaatgaattatgctttcattacctggctgacttctgggcctcatctccttaggggctggaaagccttcaagatcagtgccagcatccaaggaaatgctcttcctcatgtcagctcccctccagagccaaaagaagactactgtctcttcctgtttcaaaacgcttcatacccctaatgggcctcttatccacttatagtactctggatactggacactccattttttattttccaaccttcccctctacccccaacacataatatcctaatctttgtgaccatgcagttccctccacctggcatattcacattaaatgcacgtcttttctatgaaaacacaactactggcctccctggtcctaacccccgacctttccccccacttacctctactgagggccaatcgactgatccctggtcactgacctcgttcacctctgtcattacgacgcagcgcatcccattccccaaccccgttgttggttcccgctttcccccacaaccttacgataaccctatatcccccccaccaccagtacgttaacacaccccccccccctactctaggtacggctcagccgctttgatatataccgcgccgcccctcgcaggagcccaatatatcctctcacttcgtccaccccccca

SEQ ID NO: 656869 - DNA, 949 bp, Homo sapiens
  misc_feature (17)..(17): n is a, c, g, or t
  misc_feature (30)..(30): n is a, c, g, or t
  misc_feature (37)..(37): n is a, c, g, or t
gcggccgccgagccagngccccgcgggggnaacagangaagcacatctggacagctgtgcggcctcctcgcgggccgacgtcagccgagcacgtcccccacgtcctctccttctcgccacttattatttattcgttttcccaaagaagcgactagggacccaagtttaaaaattcctccccccacccaatgcgagacgtggccagatcccatccaacacacggtttaattttcatggggctctgggatcaaaagaacagaaacagcaacaacaaaagcccagccgctgtctgattttaagctggcaaagtgggaaaaataaagtgttgagtaaacagaccaagttggaaacttttcagcattacctaagaagcaaaggctcaattttggctgcttcattcttatctcttctgccacagttctaacgtgcctgatctactgagaccaaggatgaccaatgactcagaagggaaaatgggatttaaacacccaaaagattggatttgtcctgtatccccccagtggaggtcctgcatgggatctgatggatcatgaaaatattttgtttctcaccatatgcttttgttggcattatgcagtaaccattgtcatcgttggaatgaattatgctttcattacctggctgacttctgggcctcatctccttaggggctggaaagccttcaagatcagtgccagcatccaaggaaatgctcttcctcatgtcagctcccctccagagccaaaagaagactactgtctcttcctgtttcaaaacgcttcatacccctaatgggcctcttatccacttatagtactctggatactggacactccattttttattttccaaccttcccctctacccccaacacataatatcctaatctttgtgaccatgcagttccctccacctggcatattcacattaaatgcacgtcttttctatg

SEQ ID NO: 656870 - DNA, 1532 bp, Homo sapiens
caacccaccaaaaatagatagcctctaccccctaccagccctagccgagctggtacctaggccccgcctagtgccgcgagacactatagaaagcaggtggacccaaaaacagcacggatgggtaacgaggacggcacagatgccgaggcataactaggcagcgacaacactacacgggaccaagcaagaaaaaagaaaggctgagaaacagcagcaaagacaagagaacaccaccggagcggaaagcacataaagacaggcgcgcacatacacaagaaaaatacaaaaaagaataaaaacaaaagacaacaaacaacaaaaacaacaagcaacaaaagaaaagacaaaacaaaaaaaaaacaaaaccacagacagaaaaagacacagacaaccaaacaacacaaaccagacacgcacaaccacaacccaaacacccaaaagaaccacacacgcaccaccaaccaaaagaacgaacacaacaacaacacacagaacaccacaacacacaaacgcaaacaacaaaaccagaacacgcacacagcagaagaaacacaacaaaaaaaacaaacacaaaaagaagacacagaagaacaaacagagaaaaaaaaaacaagaagcggaacaaacaaaaaacacacaaaacaaaaaacagaaacaaaagaaaaacagaagaaaaaacaaaaaacaaatgaacaaaagaacaacaaacaaagaaaaaacaaacaaagaaagagacaggagagcaaggccgagaaccaagagagaacaacaagaaagagcaaaccaagaaacagaggaggccaccgaggcgacagcaccgaaacacgagacagacacgaaaaagaaagaacaaaccaacagccacacacacaaacagaaacaccaagacaagacacacaaagaaacaacacacacaaaagaaaaccaaaaacagaacaaacagaagaaagcacaacgcacggacaagacaaagagcataacaacaacggaacaaaacacaccaaacaaaaaaccaaaacccaaaaacaacagaccaaacaacacaaaaaaaacaagaagaaacaaagaaagcaacaacgagagcgaaaacccacagaaaaaacaaacaaccacacacaaacgagcaaaagcggaaaacaaaacaaagacggcagagagacacaacacaacagaaaaacaaaaaacacaacaacaaaaaaagaaaaacaaacaaaaaaagacgaaaacaaaagaagagcaggacaaccacagagaacacagccgaagaagcgagagaaaaagagaagaaaagaaaagcagagaaacgaaacacacaaaaaagaaaaagaagacacacaccacagaagcacacaagcaccaacaccaccaaaacacacgccaacacacacacacacgacctacacacgcaacaaccagaacacaacaaactcgagagaccaacaacaaacacagagacacaccacgcacgaacaacgacacagaacaaagagtagcaggcaaacgaagcgagagcaacaaacacgagagcaacc

SEQ ID NO: 656871 - DNA, 361 bp, Homo sapiens
agacactggccaacatggtgaaaccctgtctctactaaaaatacaaataaaaattagctgggaatcatggtgcacgcctgtagtcccacctactcgggaagctgaggcaggagaatctcttgaacacaggagttttaggttatggtgagctatgatcgtgccactggactccagcctggatgacagagtgagacccgactccttaaaaaaaaaaaaaaaaaaagcacatctcagttcaaactactaattattccaggtgccaaaggccacaatgtggtaagtggctgctgtatggcataggacagatctaaaccaatgatcattgtgaattaagattcctgtaatggtctctatgacgtat

SEQ ID NO: 656872 - DNA, 82 bp, Homo sapiens
gtgaaccctcttgcacacttgcttttgcacacgcgccccccccccccagcattttcagtgctctccggaagccttgtttctc

SEQ ID NO: 656873 - DNA, 895 bp, Homo sapiens
  misc_feature (83)..(83): n is a, c, g, or t
  misc_feature (165)..(165): n is a, c, g, or t
  misc_feature (282)..(282): n is a, c, g, or t
  misc_feature (375)..(375): n is a, c, g, or t
  misc_feature (381)..(381): n is a, c, g, or t
  misc_feature (415)..(415): n is a, c, g, or t
  misc_feature (432)..(432): n is a, c, g, or t
  misc_feature (453)..(453): n is a, c, g, or t
  misc_feature (511)..(511): n is a, c, g, or t
  misc_feature (516)..(516): n is a, c, g, or t
  misc_feature (532)..(532): n is a, c, g, or t
  misc_feature (543)..(543): n is a, c, g, or t
  misc_feature (570)..(570): n is a, c, g, or t
  misc_feature (794)..(794): n is a, c, g, or t
  misc_feature (812)..(812): n is a, c, g, or t
  misc_feature (872)..(872): n is a, c, g, or t
tcggccggaaccccccctcccccggcgcctcaagcggaagaccattcctcaagaattttgtatccaaggcccaaaagtttgtnacccaagatgatgaatgccgacatggatgcagttgatgctgaaaatcaagtggaactggaggaaaaaacaagacttattaancaagtgttggaactccaacacacacttgaagaactctctgcaagagtagatgcagtaaaggaagaaaaactgaagcaaaaaacagaaaaccaagttcttggacaaaaaaaagaaaancccatgtcagcttcaagggtataacaaacaacagacacaaaaagcaaaagaaagtaagggaatgacacccttctgttttaaggaaatgctgcngaacantttttctttaaaacttggaaagaatccaaaaganacagaacctttggggcnacaaagaaaatttaggaaganaaagtcagaagtagacaaaaaaaacacaaaaacaggagacatccaaaagtgtgggganaaagnaaggcaaagaaaacgngcaaaagaaangaagagacattaagaatagaattgcanaaatttaagaaactaaaagaagaaagtattaatgaaatagaaggtttagcactgtcttttattataggattagtaagatatacaagaaaataaccaccgtgttgtgaaaaagtgaccaaaatcatgtactaaatgcacagctttatgtaccctgtccaccatcttgtgcctcttctccatttgcctcttccttcctatttcccttccgctaaggaaaaaaattngtgtcacatttgtaaaantaattttaatagttaatcatctctgagagtaacctgtatttttaattgttgaaacttaancaaaataagatactgtctcagct

SEQ ID NO: 656874 - DNA, 169 bp, Homo sapiens
  misc_feature (79)..(81): n is a, c, g, or t
  misc_feature (132)..(132): n is a, c, g, or t
agtcggtccctgtttctgcgcttctgcttcctgcttctgccgcttcgcttcctgcttctgccgcttcctgcttcctgcnnntgccgcttcctgcttctgccgcttcctgcttctgcttcctgcttctgccanccacgtaagatgtgacttgctcctccttaccttccac

SEQ ID NO: 656875 - DNA, 1792 bp, Homo sapiens
  misc_feature (1365)..(1365): n is a, c, g, or t
gagggttcaccggcatactggagtctctagagcggccatcgcactccctcactactcaacgacacacctcctgcaccgagtggttccgaacggaacagagctatccagaaatggctatgccaggacatctatcacatttccagctgtgagcaattaaggggagtgggtaggacgtagatccgtggactgacctagctgacacatacatgtgacaggaaagctaatagtacacgtagcacgtctgccggaaggacaacgaacgtatcatggagcgcaccatgcatatgacgaaagagaccatatagccaaggctacagataggacaagactaacagagagaccccaagatacagagggaagagccagacaacacaatccaagaaacggcgacaatatatagcacagagaacatatccaacaaggggacaggagagggaatatacgaagagagaatgagatataccagcaaggcataggcagagcaaaagggcgatcaccacaaagagtgaacaccgtacaataacaccgatgaatgttcaagtctcatacaacaggggccagccctaggagaaagaagacgaagacaggacatatcccaccaatagagtagggagaggcatggacatcccccctaaataaaggaaaccaagatacaaacacacaaggaaggcattatccatcaaggacaccaatgtagggaacggggaccacacaatcgacacaattataatccacaatcagaaaaaaggataatgcgactagaaaaatgagtgcaaccaatatgcaccaatataagctacattgtaatagcacaccagaaggtcagtacacccaaaagacacaaggagtgattgacagagatatgaaccaccagaaagcggacacgcacgagaaatagggaaatgcaggaccccatatgatagaactcccacgtgaacaactaggcacgatgatacacaacacacccaacaataagagtgtgaacccgaaaagaagagagcagaacaagaatggtgacaaccagtgcgaaacacagcaccacccattaggaagcataggaccgcaaaaacacagagcggaaatatgcaccacatcccaaaggaataagacatgtgagatgaaactaccaacgcagaataggaaccaacgcagccacaattaagtgtaacacgacctgagcgagaaaaaccaaacggaacacatacacaggagacgatataaacataacaactagaagaaatcagagaaagccgatgtagaacaaactagtatacacttgtgaggtagtaatagcttacagatgtaatccagcagacgtagaaacacaaataacacatattagcgtacgagaagaggatataatcnagccgcacacaggtagacaattgaagagagacaaataccgttgcactaagaccttcgacaagacaaccctggaaggtagaccagacatcaacaaaagaacgagccagggcaacccaaacaatacaccgacaacaaagattgggataacaaaaccacagaacagcacatcactaaacacaacaaagggcaacacccatggagagagaagacgggagatgaacaccacacagacaagcataggagagagcaaatgcaacagctaagaaacaatacccgacagaaagaccaagacaaacatatcagtagggagtatgtagacacagccaacgaacaatcaagcacaagaaaacacgtggagatggtgaaatggagagaaaaggaagaaatgaagacacgcgaactaaaacgtaacaagagtgagcaacgc

SEQ ID NO: 656876 - DNA, 153 bp, Homo sapiens
  misc_feature (116)..(116): n is a, c, g, or t
ccttctaccagcctgatagatgggcagaagcaggaagcagcagaagcaggaagggcagaagcaggaagcgcttcctgcttctgccgcttcctgcttctgcttcctgcttctgccanccacgtaagatgtgacttgctcctccttaccttccac

SEQ ID NO: 656877 - DNA, 1251 bp, Homo sapiens
  misc_feature (322)..(322): n is a, c, g, or t
  misc_feature (631)..(631): n is a, c, g, or t
  misc_feature (654)..(654): n is a, c, g, or t
agcggggcagaacggtcggccaggacgctagacttgcgggacttgcaggggatcaggcgaggaatcgtccgtggccgctatcgcgttgttctccagggctggattcgcgacgtgtgaacgagagtggtagtttcgcgaaggagttggcctggttgactcgagacgcagagatacctacttctccgtacatgtcgtctgcgcactgtactgcaaccatggtttgactcctgtgcggtcggactggctcaccctggactctcattattgagttgaccgacgactctcggtcaagacattatcagacgtgataaggagtccacanttgctctagtgggactttgccatcaacgagtcgcggaatcgcgcggcatggaacttgtcggggaatacgtcaagcctccgcgagatcggaagaggtgctaaagatgctgcacttgactacctatgattcgcgtgtcggtccgtacgaatcgggtacacatatcaagtatcatgtctttgtcgtgccatgaaatagccaccacggaattgcactgtgggcattcgggcgcctggggatagacttttgaccgaacctcccaaagtagtttcgttaaggagggaagacacgatgcggtacttgttgtggcgntctagcgatgatccatcgacgcngaagtcgaagacctggtcactcgtggggcttctcacgatccagaccatcgcgactcggattacccatctggggcccttactgccatgctagctctgggccacccatgaaggccaggggcattctaacttgggacttaacttgggaggcgccacttcacggagcgttgagctttggctgtttacgcctgtcccgatgggaagagataccaaaagagctcgcggtaccgttacctgtgccataggcaggactacttgtgcggccaacgggggcggctaagtggtcgctgttgacctcccggtaaacacacagtcgttcatgcccaccaagtgtgatgatgcgcgacggcaaagcaaacggccgagattaccgcgttcacgatttcggtaaacctatgcggcgtcactactctttacggcagaaaccatctggcaccacaggtgcatttccgccgaagcaggtcagcacaccttttgtctacctggaggggacacatgacccaaagcgcccctgtgtgctttaggacaccgcacaatgattgccacttcccacatttaccgtgacggcaaagaccgggcgttaattgccagaagggacct

SEQ ID NO: 656878 - DNA, 840 bp, Homo sapiens
tcaatctgtggcttccaccaggaggtcttcctagtgcaatggacctgggtggcttatgatgagtgacgcggagccgcgtgcggagcctggagtgaagctgatgtgtcatcttttcctaatggtgtgatgtgaacactgacctgtcaagatcatgtgccaatggatgatgcagctgcatgtgatctatggagaatgacgtgcctgagcacttccagtgaggccatggagtggcgagccatgaaacaacattctccgcgcccgctgtgaccacctcatcaagcggacgagctcgtcatcgtctgttcttgacgaactatctatcagcacgtggaacctggctgggcagaagttaacagtgccactagcgaccacattgaccgttgcccgaacgaccaatcagggcctccgacccgacgagaatctcaaccggatgacaccgatggaaccccccatgggaaaagtcctgggtattgtagaccctcgataactggacccctgcatgtggtaaccacgcggccggcaacaagagccacccctcatgccaagaaaccttgtcttggcttgaacctggggaggccgaaggacgttacccttggtccggttcacttcacaagcgcccctggatgacaaccatgaacctgaggtggaactcgctacacgtcggtaccactgggtgaaatccggacgatcctgtcccaggtgaccctttgcgaacaaggtgaacaggctgaaccaacgccagggcgttactcctagttagccccacgaagtttcattcttcccacattagacccccggtaggagacacccagcttggcaacgaacaccgatggcatgggc

SEQ ID NO: 656879 - DNA, 193 bp, Homo sapiens
gcacccggctgtttgcgggcacttagggttcaaggttttgagttccgccccttaggggcgggatccgcctagtcatgtctgaaatttcacattacctatcagcgatggtcgctgatggatcgctcatggtctcgccctcgttgaattccgcgcgcacgctggtgctggacgtcgccaattcctcggggctgga

SEQ ID NO: 656880 - DNA, 160 bp, Homo sapiens
cacagtggctcacatttgtaatcccagcaattttttggggaatgccatgtggccggattgcctgagctcacgagttcaagaccagcctgggcatcatggcaaaaacccatctctactaaaaatacaaaagacagccaggtgtgttgctgcacacctatgg

SEQ ID NO: 656881 - DNA, 436 bp, Homo sapiens
atctagatagctatgttaaggacacttaaataaactcaagctaacacagagaaggaattcagaattctatcgagcataatttaacaaagagattgaaataataaaaaagaacctagcagaaattctggagttgaaaatgcagttgaaagactgaagaatgtgtgttttttaatagctgaattgatcaagaagaagaaagaattggtgagcttcaagacaagctatttataagagacaaaataatatagaatgaagcatgcctagaagactctagaaaaatgcctcaaaagggcaaatctaagagttattgaccataaagaagtggtagagagaagtagaggtagaaagttttttcaaaaggaaagtaacagagaacttctgagacctagagagagatatcaatatctataactttctaagaaagttatggaactcc

SEQ ID NO: 656882 - DNA, 115 bp, Homo sapiens
tgctcgtcgttagaggacccccacacagtcacatgtctataacatatcaaaacaatagctggacatggcgattaatctgtacaaaaaggctttataaaaatactcccggccgggc

SEQ ID NO: 656883 - DNA, 632 bp, Homo sapiens
  misc_feature (36)..(36): n is a, c, g, or t
  misc_feature (74)..(75): n is a, c, g, or t
  misc_feature (156)..(156): n is a, c, g, or t
  misc_feature (626)..(626): n is a, c, g, or t
ggaggcagagtgagaatggatgggtgtgtgggaggnaggcagggggtgacgtgggagagctgggaggagggggnnaagagagtggaggaggttggtggtcagagtggatgtgagggatgggggtgggtgggagggggttgggcatgggccctgagnaagccctgtggaggaaagagcagagtgaggtcagaatggggggagagagggaaggagtggtagagtgagggggaagggagagggaggggggggtggagagtggaggggaggagggagcattaggtgtggggaggagggaggtgagggggagaggatgtggaaagaggagtgagggggagaggagggagggaggagatgggtgtgcgaggggaggtgaggggagaagggggcttgggagggggtttagagggtaggttggggggagtaggtgaggagggggaggaggagggcatggtggagggaaaggtatgggaaaaagtgggggtgggtgttggtgaggtgaggttgagtggtaaaagtgagggggtggggtgaagcttgagagccggaagctgttccaggaggagggaggggcctcggtttctcccggggcatgtgggcaggaaggccctcgggatcccgcatcagtnccacgg

SEQ ID NO: 656884 - DNA, 350 bp, Homo sapiens
  misc_feature (20)..(20): n is a, c, g, or t
  misc_feature (75)..(75): n is a, c, g, or t
  misc_feature (78)..(78): n is a, c, g, or t
ccccaaaaaaaccttttttntcccttttttcccccccccccaaccccaggggggggggggggggccccggggacncanggggtttttccccggggggtttttccccgcggtttggttgatttttttgccccggcaattttaaacccgggggggttttttttgggtttccccttttaagggggccccttgggggttccccaaaggggggcacccttttttttggggggggtttttttggggggggggcccccattttttaagggggggggtttgggggccgggggggaggccccccctttttttttttgggggggctttttttttttttaggggggcccccgggggcccca

SEQ ID NO: 656885 - DNA, 280 bp, Homo sapiens
tgtatatatagtatacatgaagcagattaaataatttgtgttaaaaagttttattattaccttgtagggctttgatgggggaattgggcttattggaagatatattacagtggaaggggctggtaagggactcttttctcctgggggatgctgaataaactgaattgtgcatctagccttttgactgtgacatatcacatgagggacaggtttgtggaattttccattcatagtgtcatgttggcactcatatttttcatcttatatttctagttgacct

SEQ ID NO: 656886 - DNA, 197 bp, Homo sapiens
acaggaaaattacatcaggatgctagggggaacaggattgctggcatgaattttaattgaattttgacggggcaagctacgttacattatggcagaaaaaaaagtgcaactgacatgctacaaagagattttttaagtttaaaaaaagttgggatcttttggatttcttttttttttttggggtaacttggacgcgt

SEQ ID NO: 656887 - DNA, 1095 bp, Homo sapiens
  misc_feature (162)..(162): n is a, c, g, or t
  misc_feature (274)..(274): n is a, c, g, or t
gtgtggaactgcctaagataaagaagcggagactggagtaagcaaggctccagtatggaacgctggtggtgcctagactctcacaaactaagatgtgggacgatagcgcctaggagagcgattgtctacttggggcttcttctagtcgttcgcgtcctcatntcggagagacgcgattgcacagacgatgccgatggatctcgatagagctcggtatcatgttaaagcggaacccacctagggccatggaccgctatttgatgaggaatctaangcaattcggagtgcctaaaatcctccatgtggagatgctagatgactggatgttgttagccatctatatcttaactagaagctccatgcttcgaataactcatgttacaaaatagcgttgctaggagccaatcgatagatccttacggaaaaaagatttctttggctagactatttcaaaattctgtaaagatacgagatatagggagataaataccgaatatgtatatttttctcttattaactttgtgctaagggtttataatcctacatctaatagggataggttcttcggtatcttgacggtttatttaaacagtattaccaatttttcattttatttataggattgaagattgttacatgggtagggctaaagaaacgtcttagtaattttttcacatagattggtagttttgaaaggcaacacgagaagaggaacgatttaactttaaaaaggcgatggtaactgggtttactggagaatccttgccttttttcttatcctttgggtggatttaggacttacacttaaggaacttggaatcggtgttcactatacttatttaattacggtgtagaactcactggaaattggttcggagctcacaggataaccttatctggaataacgtagctggtgccgagtttcacataataggggtaaattggacacctttgtttttataacccctttttttcctccttaggagtctgttggtatcttcacccgatcttattgttggcgtttaaacacactaatgtgaaaaggagcacgcgaatttttaagttgggactctcaagacggtttaaattgagttg

SEQ ID NO: 656888 - DNA, 360 bp, Homo sapiens
  misc_feature (279)..(279): n is a, c, g, or t
atccaagacacacccttaagcatgtccctttcatctctgacatggccattctaaagtctctctcgaacagaatccatctcacagagtattcgcttaacccagagtctcataagctttatgagttatgataaaaagagtgtccctcattccaaatccagggagttcccatagataagccctcctttgcgtggctcatattcacaccagtttgtgattgtgtcttcttcgctgccttctacgggaagttttttaaaagtatatccaagtgtgtttcctaanaatgggcacccactacatggtgaagaggcactgtctgaagagcgcagaggtttcactatagacatatgctctcgcgtgccg

SEQ ID NO: 656889 - DNA, 355 bp, Homo sapiens
  misc_feature (303)..(303): n is a, c, g, or t
ggctgcgctttcctgtccccaagccgttctagacgcggagtctcgctcttgttgcccaggccggagtgctgtggtgcgatcttggctcactgcctgcaacctccgcctcccgggttcaagcaattctcctgcctcagcctcctgagtagctgggattacagtcatatgccaccatgcccggctaatttttgtatttttagtctagacagggtctcaccatgttggccaggctggtcttgaactccctacctcaggtgatccacctgcctcggcctcccaaagtgctgggattacaggcgtganacgcgcacacagccgacaattctaatattattgccgagcttgttttcttgtc

SEQ ID NO: 656890 - DNA, 161 bp, Homo sapiens
cccacaccacatattgagaaaactagaagagaatgaacttggccagaggagaatgaaatgtgcttgatataggcatgaagcatgcacgctcgccattaagtagatcgggaaacacactagtgtcctatcgttgacatgaacacagggtatctactagttgt

SEQ ID NO: 656891 - DNA, 369 bp, Homo sapiens
tgctgactatttctagcatctcataacgtaatggttgtagtgttttgtctttagtctccggatatttaaaaaatttctttgtaatattctttgacccataggtatgggtaagagtaagttttaacatttccacatgtgtggatattctatgtttccttctgttattggtgtttagtttcctttccatgtgcataagcgcacgcatagttggtcatgcatttccagtcttcaatttcattcagcataagtaaagtgcactaaccttttatcatcattttccatgtgtttctgcaacttatcggcagtaaattctgcaagcacttttctgcaattgtccgtgtttcagttttctcaaacatcatgtccata

SEQ ID NO: 656892 - DNA, 924 bp, Homo sapiens
  misc_feature (47)..(47): n is a, c, g, or t
  misc_feature (67)..(67): n is a, c, g, or t
  misc_feature (84)..(84): n is a, c, g, or t
  misc_feature (103)..(103): n is a, c, g, or t
  misc_feature (105)..(105): n is a, c, g, or t
  misc_feature (108)..(108): n is a, c, g, or t
  misc_feature (110)..(110): n is a, c, g, or t
  misc_feature (122)..(122): n is a, c, g, or t
  misc_feature (124)..(124): n is a, c, g, or t
  misc_feature (136)..(136): n is a, c, g, or t
  misc_feature (147)..(147): n is a, c, g, or t
  misc_feature (156)..(156): n is a, c, g, or t
  misc_feature (162)..(162): n is a, c, g, or t
  misc_feature (177)..(177): n is a, c, g, or t
  misc_feature (183)..(183): n is a, c, g, or t
  misc_feature (192)..(192): n is a, c, g, or t
  misc_feature (198)..(198): n is a, c, g, or t
  misc_feature (217)..(217): n is a, c, g, or t
  misc_feature (228)..(228): n is a, c, g, or t
  misc_feature (240)..(240): n is a, c, g, or t
  misc_feature (242)..(242): n is a, c, g, or t
  misc_feature (248)..(248): n is a, c, g, or t
  misc_feature (287)..(287): n is a, c, g, or t
  misc_feature (293)..(293): n is a, c, g, or t
  misc_feature (311)..(311): n is a, c, g, or t
  misc_feature (318)..(318): n is a, c, g, or t
  misc_feature (325)..(325): n is a, c, g, or t
  misc_feature (339)..(339): n is a, c, g, or t
  misc_feature (355)..(355): n is a, c, g, or t
  misc_feature (361)..(361): n is a, c, g, or t
  misc_feature (367)..(367): n is a, c, g, or t
  misc_feature (373)..(373): n is a, c, g, or t
  misc_feature (376)..(376): n is a, c, g, or t
  misc_feature (379)..(380): n is a, c, g, or t
  misc_feature (382)..(382): n is a, c, g, or t
  misc_feature (384)..(384): n is a, c, g, or t
  misc_feature (389)..(389): n is a, c, g, or t
  misc_feature (391)..(392): n is a, c, g, or t
  misc_feature (395)..(397): n is a, c, g, or t
  misc_feature (400)..(400): n is a, c, g, or t
  misc_feature (408)..(408): n is a, c, g, or t
  misc_feature (411)..(411): n is a, c, g, or t
  misc_feature (415)..(415): n is a, c, g, or t
  misc_feature (418)..(418): n is a, c, g, or t
  misc_feature (422)..(422): n is a, c, g, or t
  misc_feature (427)..(427): n is a, c, g, or t
  misc_feature (445)..(445): n is a, c, g, or t
  misc_feature (447)..(447): n is a, c, g, or t
  misc_feature (458)..(458): n is a, c, g, or t
  misc_feature (475)..(475): n is a, c, g, or t
  misc_feature (478)..(478): n is a, c, g, or t
  misc_feature (480)..(480): n is a, c, g, or t
  misc_feature (509)..(510): n is a, c, g, or t
  misc_feature (513)..(513): n is a, c, g, or t
  misc_feature (756)..(756): n is a, c, g, or t
  misc_feature (807)..(807): n is a, c, g, or t
aatcctattctgaaagacaaattttcatttaaaaacaaagcaaaaanaaaaattcacaaccttaatnacctaaatttgtcattnaaaggtttaaaaaaaaaangnagnanctttcttacaancnttttcacaagtntcacattttcnccttaaaangaaagnatttcaaaaaaaagnagaaanaacttaaanaaaaanattcataaaaaaaaacttnacaaaattganaacaatattaananaaaatnaactaaccagtttcacccccccatccccccccgcccccncccccnccccctcccccccccctngcccccnctttgcnttcagccagagatncttcagaatcccagtnaaatgnattgtnctaaanccncgnnangnatctncnntgnnntcnccccattngtntttngtnattntctancccagtttctaatctctnanaggggctaaanctgtgaggggggaaggnccntnccctagtgtggccaccctatatataattnnatnttgtatcgttaattgctggcctttcttctgcaaattatgattttggaaaatccaacccatgcagagggataaaaaactgacatcccttgggtaacttttttttttgcaacattccaagccccccccggtcccctatccaaggacaaatgtagggcctctaggatgtcccagacccacctcggagggccagtcagttcaggtaggtcaggcccagttctcttccctcccgacagaccccgggcncgggaagcaccgaagaccatgatgctggctggagtgaagacactcgtttcngtatcaagagctgagcctaagaaatgctcatcgtttggtcaggctgggtctgcaggccggctgcttgctgcactcctggaaagccagggcccatcttctcggactctgcagtctctt

SEQ ID NO: 656893 - DNA, 221 bp, Homo sapiens
cgggggggggggtaacccaatttctctttcccccctccccttgggggaaggggcccccctgggtttggccccccaatgggggtggtgcccccccctcccctttgtccccggttttggggcagggcccccctgttttttccccggtacctctcccctttttgtttttccccttcgggcttttgggggggggtcccccttaacctgttgttccccctcgccta

SEQ ID NO: 656894 - DNA, 100 bp, Homo sapiens
ccgcttcaccaccccatctgcattattaatacatcactagtttggaaaaataaaacttttttaaaaagaaaacatgattaccggggtgggtggagagcgg

SEQ ID NO: 656895 - DNA, 236 bp, Homo sapiens
tcaacaaatttcgggttaaggatgccccagacccagggctttacccttgtatgcgggcaggcccagggagcaggcaccagtgtttttcccctcagagtgacttggggagggagaaatagggggaggcgtccagctttgtccttttttcctccctcctcccttcagggtcctggggaccaggcctttttccccattgttttgttttgcccccttttgccttaaaaggaaaatcccca

SEQ ID NO: 656896 - DNA, 188 bp, Homo sapiens
  misc_feature (99)..(99): n is a, c, g, or t
tattagtagttggaaaaattaactggacagaaaaaaagtttagtcagctggagagagagagactgagtgacccatgagactggtggctcctctgggagnaactggatacagtgaggagaaagagcactgtgaattagagcagacgctagtcagtaacgtatgcatctcaagctatgctagctgacatc

SEQ ID NO: 656897 - DNA, 435 bp, Homo sapiens
  misc_feature (313)..(313): n is a, c, g, or t
  misc_feature (317)..(317): n is a, c, g, or t
tgccctttactacaggacagaaaccacttagtttttaataagtggctcagtattacaattgcagcgatgcctggcaaattgaagttgcaagcctttgtcttactctttcagtcaggacctatttcagactgttgatgacattgacatttcatggattcggatgatgcaaggagacacatgccaccccagcagtacacaaagcacttaccttgactggtgaagtcagccagccatctcagcagggaagaacaaccttctcaaccaaaactgcaatcaggaaagcagcagcccactccttcccatggaatctagnaaancccaaaaggggggccaaaatttttttttttgaaaaattttggcccctggtgggggaatctcacactggctactgaatggacgctttgtattcatgagatggcttccaggcaaggaagt

SEQ ID NO: 656898 - DNA, 111 bp, Homo sapiens
agcagcctaaaataggcctcaggtgtgcatcacactgcatcatgcagggcatgcaggcacagcaggccaggttccaaggttttggctccccatgcattccaacacatgtgc

SEQ ID NO: 656899 - DNA, 422 bp, Homo sapiens
  misc_feature (13)..(13): n is a, c, g, or t
  misc_feature (36)..(36): n is a, c, g, or t
ccctaaaaaatcnagtgttaccccaaaacttgaccnatgcttgcccccaagctgtgccttttttcctttcccttggggtattttggttggctaaaagtattttaattaattactgttttaagagacagggcctcactccctgtcaccccaggctggagtatggtggcacagtcacatctcactgcagcctcaacctccctggctcaagccatccccccaccccagcctcctgagtagctgggactacaggcacacatcactgcgcccagctaatttttaaaaaatttttgtggagacaggttctcttcatgttgcccaggatggtcttgaattcctgggctcaagcagtcctcctgtctcagcctcccaaagtgccagaattgcagcatgagcctgggtgctagagcgaggcccttttctca

SEQ ID NO: 656900 - DNA, 398 bp, Homo sapiens
  misc_feature (196)..(197): n is a, c, g, or t
  misc_feature (203)..(203): n is a, c, g, or t
  misc_feature (205)..(205): n is a, c, g, or t
  misc_feature (208)..(208): n is a, c, g, or t
  misc_feature (223)..(223): n is a, c, g, or t
  misc_feature (227)..(227): n is a, c, g, or t
  misc_feature (232)..(232): n is a, c, g, or t
  misc_feature (235)..(235): n is a, c, g, or t
  misc_feature (254)..(254): n is a, c, g, or t
  misc_feature (270)..(270): n is a, c, g, or t
  misc_feature (319)..(319): n is a, c, g, or t
  misc_feature (357)..(357): n is a, c, g, or t
gcgcatatgcttcaggttccatgatcccgactactgttcacagcagcggatatctgggctgcgcacccagacagaagccttccagggctgagagcgcaccatagcttcgctacccctctgtctactattaaggctttgcactcagtcgggctccaggacctgaaggcctcaataccagctaccagtcccagtcatnnaacccngncgnatgcgcaagtacccnaacnggccnagnaagacgcccccccacgaangcccttacgcttgccnagtggagtcctgtgatcgccgcttctcccgctccgacgagctcacccgncacatccgcatccacacaggccagaagcccttccagtnccgcatcccggtacccagggccggggatgggtaccgagctc

SEQ ID NO: 656901 - DNA, 656 bp, Homo sapiens
  misc_feature (426)..(426): n is a, c, g, or t
  misc_feature (487)..(487): n is a, c, g, or t
  misc_feature (520)..(520): n is a, c, g, or t
  misc_feature (618)..(618): n is a, c, g, or t
ggcatgtagtgatataaatttccctcttaccattgctttagcaccatcccagagattctggtacattgtctctttgttctcactgatttcaaagaacttcttgatttccaccttaatctcattattcaccaagatatcattcaggggcaggttgttcaatttccatgtagttgtgtggtttttagtgggcttcgtaatcttgaattttaatttgattttgctgtaagccgagagactttgttatgatttcacttcttttgcatttgctaaggagcattttacttccaattatgtgatcaattttagagtaagtgccatgtggcaccgagaaaaatttatattctgttgttttagggtggtttctatagatatctatcaggtccacttgatctgtagctgagttcaagtcctgaatacctttaattntctgttcagtgatctgtctaatactgacagtggggtatttctcccactattattgtgtggnggcctaagtctctttgtaggtctttaagacttngttttatggatctgggtgctcctgtattgggtgcatatatatttagaatagttactcttcttgttgaattgaccctttaccattatgtggaccttctnttgcttttttgaccctttgatggttggtctatttgtcc

SEQ ID NO: 656902 - DNA, 391 bp, Homo sapiens
ccccaaattcccgctctgtgggaggccaagacgggtggatcacgaggtcaggagttcaagaccagcctggcctagatggtgaaaccctgtctgtactaaaactacaaatattagctgggcatgaggatatacgggaggcttctggaatactcaaaactatgatgcaagagaattgatggaaccgaggagggagaggttgcagtgagccgagattgcaccactgcactctagcctgggcgacagagcaagactccatctcgaaagaaagaaagaaagaaagaaaggaaattccccagggaaaatcctcagatgatatgataaacaggtaccgaaggaagcagaggcatgtggaggacgacccacacctcatgcatctatttgccccgcgcca

SEQ ID NO: 656903 - DNA, 129 bp, Homo sapiens
aaggtactttctagttggctcataaaaatataccagcattcatgatagcatttcatgcattttccaaggtaccaagtgtacttatttatgtggtagttgttgttgttgtatattagaaggaatacagct

SEQ ID NO: 656904 - DNA, 381 bp, Homo sapiens
taatgccaactactcaggaggctgaggcaggggaatcacttgaatctggggaggaggaggttgcagtgagctgagattgcaccactgcactccagcctgggcgacagagtgggactccatctcaataaataaataaataaataaataaataaataaataagtgctggtgaggatgctgaggcactagaacccctgtgcaccgtcggttggaatgcacaatagtgcagtcactatggaaaacagtaaggcaagtcctcaaaaagttaaaaatagaattaccatgtgatccagcagttccgcttctgggtatatgcccagaagaattggcgggatctcagatctttgcaagcccatgttcacagcagtattatatttactgcc

SEQ ID NO: 656905 - DNA, 931 bp, Homo sapiens
tctctattcttcactttcttccaactcctaaagaaacattcctcccaaagagctgaaagcaccatggacataagtatgagcttaagatatttaattttttttaatttcattattattattattattggagacggggtctcgctctgtcacccaggctgagtgcagtgtgtgcaaacctggctcactgaagccttgacctcctggctcaggcagtcctcctgcttcggccttacatatagctgggatcacaggagtttgagaccagctgaacaacatagtgagagcccgtctctacaaaaaaataataataatgagcatgatgtttgtgcatctgtgcttctagcttcttgggaggcttaaaacacggaggatcaacttgagcccaggagtccaaaggctgtagtgaactgtgattgtgccattggtactcccaactggaggacagaagcaggcccgtctctcaacaaatatgatgaaccaaccaggtgggagactgggcacagggtcaatggctgtaattcccagcaactttgggaaggccaagggtgggagaaatccttgctccaggagtttgagaccaggtctggagataggtaccaccctatttgttcgaaataaaattaggccagtacggtggtaataagacctgtaggttaggtcctcaagaggtgagggcggaagatcattgagacctagaggtgagttgctgggccaatgtgcctgtctcggctaagaaggttggaacttttccaaaaaaaaaaacaaaagtggcgcgcgccgaaatttcaaccttttgggggcagagtgaaggtacttgtccagaccgcgaatgggtccaaaacgcggggttgaccagtgttttgttggtctctcacgtcgttcgttctctcctttttctctctcgcttctctcatagtatcataacaacacc

SEQ ID NO: 656906 - DNA, 392 bp, Homo sapiens
  misc_feature (9)..(9): n is a, c, g, or t
  misc_feature (44)..(44): n is a, c, g, or t
  misc_feature (47)..(47): n is a, c, g, or t
  misc_feature (63)..(63): n is a, c, g, or t
  misc_feature (116)..(116): n is a, c, g, or t
  misc_feature (119)..(119): n is a, c, g, or t
  misc_feature (121)..(122): n is a, c, g, or t
  misc_feature (249)..(249): n is a, c, g, or t
  misc_feature (355)..(355): n is a, c, g, or t
  misc_feature (389)..(389): n is a, c, g, or t
cagagcgtnacctgtcaccctccccaagcgcctgcaccgcggtnaangagcccagcccagggngcttggacgtgaccatcatgtacaagggccgcacggtgctgcagaaggtggtnggnannccgagctgcacgttcctatacggccccccagacccagctgtccgggccacggacccccaggctccgcagcccctccaccccagcctgcctgctgcctcggaactgtgacacccccatcttcgacttnagagtcttcttccaaggtcagtgaggcccttgcctggggggctgtctccagggggtccttgggagcacctggcttgccaggtacttaagcaagagtccccttcttnagaagcttggtgggatttcgggggaaggaagcgntgg

SEQ ID NO: 656907 - DNA, 271 bp, Homo sapiens
tctgaagtagtcctgaagacccctgataagaatgtcatcttctccccactgagcatcttcaccgccttgctttcctgtctctgagggcccataatactatcatgacagagatcctcaaagacctcaagttcaacctcacggagacttttgaggcagaaactaacaaaaacttatggcatctcttgtgcactcttaatcagtgaagctgtgagctgtacctgagcatgggaaatggacagccaagatcaagtgcacttaaagtgtgccggct

SEQ ID NO: 656908 - DNA, 204 bp, Homo sapiens
tccgggtgatcttgatgacccggtcatttgctatgcaaagatgaaatgaaaaggcagccattaaaataaatggatcagttgtataccaagaagtatttggctcatggcaattaaaacacggcaactcagggtatgttaatacgccagaggcttgagtcattacatgagtatattacagagaacgatagccagtcccagtatgac

SEQ ID NO: 656909 - DNA, 263 bp, Homo sapiens
accaactggcttcaaattgggttcccatgaccccctttctgggctcaattaatttgctggaagggctcacagaactcaggaaaacatatttactggtgcaaaggatacagatagagagatgcgtcgttggaggtatgggggaaggggcatgctaccctccaggaacctccagtgctcagctatctggaagctcttccaacccagtcttatggaagcttcctgacatcagcattccttttcccagggtacagggtaggaccctc

SEQ ID NO: 656910 - DNA, 1075 bp, Homo sapiens
agcgggctgggcggctggcagtgtggcaggagcgcaggggcgcgagccggcgatcagccttcccggctgagcgtgccgcgggagctcgagcaactcggactagtgggaccctgggccggcccccaagatgccggacgatcgcaggtgttgtgcaggcgggccgccgcgtgagctgtgtgcattccatccaatgtcgaagagcccgagccccctggacgcgactcgaccggagagacggcagggcacccaaagcaaggaaattatcctaagaccaactgaacacgtggcgttgaagcaacgcggtcgtcgcacagtataacgaaccagggaccaaagctacctgagcaaacccgtcttttcacgagacgcacatgaactgtatctacagtacaaccttgcgacactcaccaaaccgaacgggacactatatgcagacacaagggctgctgggaaacaccaagtcacaaagtggagacagcctgcatccttggagaggtgttagcgacattagccagtgcacccctcaaaccaacaggttgtaggttgatttgaaccccacacgggaacttaacgccaaggaccgcgtgcacgactagactgagtttcgtccacagacaccctggcagaccgcaacacattagcgtttcgagcacaaggtggcacacacaacgaaaccgggcggggatatcggtttgtgcacccgcacacaaaaaacgacccatcgaggcgtttgtgaaccccgtttactggaacagaattacacgcggtcacgacagcgtatctgccagaaaaagcccccgcctgattgggttccccgcccaggatatgagcactcaaaacgacgcaaatgcgcaccatatcagcgctccatcagagatcggaggcattcatgcgacaattagggaaccacacagtccccctatcaccgcagcaaatttccacacacgagatcagcacaaaaagattacgtgggaccactctgtctgcccaatttcgacatctgaggttaacccgtaacagcatggtggcagacacacaacagctcacttcagcgacatcaatgcacccatgacag

SEQ ID NO: 656911 - DNA, 102 bp, Homo sapiens
accgtgtactcagtagccaaggagcgcgccgcctgcagctggagctgaccaaagtgcgtgaggagtttaaggagctgaaagcgcgcaataccaaggaggagt

SEQ ID NO: 656912 - DNA, 207 bp, Homo sapiens
  misc_feature (1)..(1): n is a, c, g, or t
  misc_feature (5)..(6): n is a, c, g, or t
ntaanntagatgatccatggcagctatcttcaaatgctgaaagctgctcatgtagcaggagtctgtgctgttttagaaaagaaagggtattacaatcagtgatggtggggatgtaatttttttacatttaactcccaaggtaatgtattaattataaatcagttgtactgaattatgctaaggaatagcttggtttattatttgttt

SEQ ID NO: 656913 - DNA, 1842 bp, Homo sapiens
  misc_feature (277)..(277): n is a, c, g, or t
  misc_feature (363)..(363): n is a, c, g, or t
  misc_feature (761)..(761): n is a, c, g, or t
gctcgtgttcgcagtgctatggtcgcgagcgcgaggagtgtaccatgtgtgcgcggcctctggcgcacgcctgagcacgcataggtaatagctgcacgggtagcagctgtaggatgaggctccggtgggcaagtgtctcgctgctcgtgggcgcgcccacaggggtacgagcacgccgcctggggctcgtgatcctgccgacacatacataagggttcgtgttgacttcacgattcgcccacaggggataccgcaggatgcaggtgcggacatcggnacctgaagacgacctgtagcaggatgagaagcgtgtatccatatgtacagaaatcgagacacatgggacacccaagcacttgacgngatgtgttgtccatttcatgaactcgatgactctgtaaatgcattcagagaaagcaccttcacccaggtatatacctaatgtctaatatgcatgaaactatgcaattagagtaaaccccccggaagataaaattcattttatacaccaatctagcctggggcgaaaactaatttcgagaatagttccgtatctggaaacacttgtgtgtccacacttcattcgtctttccggaatcggaaatttgccttagattggacgtggacatcttctatttagggccccaggggaaggaaaactcttcctttcttggggggaaatccccccttaaaagaaaggtaagtcaatgcctttggcggaggaacctttgtacctctcaaggttcgaagtttggtgtggnacatgaactcaaaggttgggttgggtaactggctgtcccagggggcttactcccacatctccagtggacacccatttggaatctcggttatagtcatgggctcccacattcgaacgagtttcggcctagattggaggaaaagtggttctcccaagaagtcgattggtaaaaataggactacagaacgaattggaggcatcggattctttcgaaatttattagaaggggtcacttccatttatcggaaatcaaatccattgcgtttgggcacaacaattctcttggggagaggccttccacagtggggcttcaattcaggggatgaaattggttggccaacaaaacaaggcactcggatagagaggacgtttgtggccaacagcgatccaaagaggatattattttcgaaccgagatatgggggaaggcccaagaacacgtttaaggattattggcacaggcaagagtactgcattggtagacaaaaacgagattgcagatggccttatatgagaatttaataggcatgcatataaatatgaagggagattggtaccacgtgaaagggttataatataaagcaacaggtgcaatctttgtagaaataggagaaagagaaaagagctcaacagagaagtggtggtatatgccagcatggggcgaagagccaccataacacagtggcgggggagcccacaccaatggtgcagacatatcgaacaccgtaccaaacatgcatatacaccgccgagcagtgagacaagacacccaacacgaagcagagaactaggagactcagaaaccaataggaagcataccgcgggggaaacgaacaagtatgaaacgtggaaggtagaagagatctatagaggaggtaaggtaacgcaaggaaggagagtaagcaacgacaggacataatcgagcaaggtaagaagagaaagaacggaagaagagatatgaagataaggaagtcagatgggtagtaacaactgaagacataaagagcagtaggagcaggcgaacgagagagacagagattgaagtagataaagagatgaggagacgttggagagaggagggag

SEQ ID NO: 656914 - DNA, 182 bp, Homo sapiens
tcgtctcagcgactactcaggagagttgaggtgggagaacctgcttgagctcaggagttcaaagttaacagtgagctatgctcggtaccatatgtactccagcctgggtgacgaaagcaagaacccaactcaaaaataaaacaagggtttctacgtcctgttaggacccactcctgtaagtc

SEQ ID NO: 656915 - DNA, 145 bp, Homo sapiens
ggcacgaggcgcaagatcaaggggaaaaggagaaccccatgcggaactgcgcatccgcaagactctgcctcaatatctgcgtcggggagagcggagacagactgacccgggcagccatggtgtttgagcagctcaccggccatga

SEQ ID NO: 656916 - DNA, 931 bp, Homo sapiens
ctatgaagactgacgaattgccgccgcgatgtgctacacagcaagggcgcccccggtgggtgcggcccccccccccgcccccgtcttctcaagggaatactcgccgcgacgaggggccgcgcgatatcgcggccgtctcgatgggagcacgccgtgtgaacaaacaactccccgggggtgctcttggtccgcagagagaaaactctcttagggcgacaaacatctttccactaactcccctggtggtgatatcccctggccaggccgctccgtggggtacacgcagcggacttctttctctacattgggggctccgccgctgtatttttaatggccgcaggccggcttcccgccacccacccggggacgggttccacacgcccccacacccgccggcgcccccctgttgaaaacaaatgtagtcgccacgcgaacacacgtgggtctgggaaccttccccacaagtggccccccccagggtgcgctggtcccgagtgggtaaaccctcccacagggtatactcccacacgaggcttatctcctcaataaagaggcgcttggagtaaagccgcacgcatcggcccctcctttccacgcgcaattacatacatggctcgtgctaaaagctcattcgagctctggcgtagtttatttgttcagccgcacgatgctagtttcgcatggagagatcaaagatgatcacgccaactcgcctcatatcacgccttgtagcccccctcaagagacattcgaggtgtggggaagagcggactaagaacgaggaagagtcttaagaaaacatagatactacgatttttgggggaactattagactttcaagattaattgtcataccccgcggcttttccggaaaaagtccccccttcgaatataaaaaaaacatttttataggaattcaaaaaacaaaaca

SEQ ID NO: 656917 - DNA, 453 bp, Homo sapiens
gtagcggcgcaagaggctgaatggacagctatgtagaaatgtgactggacaacaaggggtatgatctaatgttgatggacagagaggggaagcacagtaaggcccgtctgtttggattcttcctggtctctctgtgtggcattccttccacctgggtacagggcaggacctctctggagacaggggtcttatgtcctacttttagacaaggtagggcagagaatttttttctttctgtttctgagatgaagtctcactctgtcgcccaagctgcagtgcagtggtgcaatcacggctcactgcagcctccacctcctgggcctgagtgatccccctgcctcagcctcctgaatactgggaccacaggtgtgcaccaccacacccagccaatttttctccttccttcctcccttcctctcttttttccttccttcccttatccccattcagcct

SEQ ID NO: 656918 - DNA, 158 bp, Homo sapiens
aggacccgacggaacggatctgcctgtgggggcagtgcctcctaattggggggtagggctagctggagtgtataaggctcagaaaatcctgtgaaaagaaaacttctgaggtataaataggattatcccgtatcgaaggcctttttggacaggtagtg

SEQ ID NO: 656919 - DNA, 1197 bp, Homo sapiens
  misc_feature (384)..(384): n is a, c, g, or t
ccccctccacagcatggagcgcggccagacgcaggcaatactcatttctcgctcgtctcttctctctcgcgcgtactactgtgttgactaccgtggttgctggttcgtctcttcttcgtcgtctagtttgcttcgctggtttgatgtccctcctttgtgtatttctgtccgttctttacagcggtgtgtccactattctggtatttagtgctcgcccctcgttgtgtggtcaccttctgcacgcacaatacgtgagtggttgccttcatctcgcattgggctgtgtacgaccaggttgtgtgcggcccaccttgtgggtcgttttcccggcgcggtagtgttctgcgccctgtctccgcgctattccggtctcttagtgtatanacccgctttggggtacctccgcgacttcaggtcagcccgcaggcttcggcccttgtcccccttggttctttgttccgtccctcaggtgtgtcccacgggattaccctttgggcaagactcccctgggacgcccagctgtcccccgttttgcgcaacgccagatgggctaagggccgcgggattagggtccccctgaaccaggcccaacagcgcccatacctgggccgatcgatgtcttacagcagcctaaagccccacctgggtctctgagcccgaagaagtggccttgcagccattacgtgacaccccaagatgaagtacagctgaagacccacctacagccaatcccacgggcagcccagagcttaggctcagcctcccctggccccggccagccccctctcagtagccccaacgaggggaaggagtcacagaaggtgtcacaggggttggtggtaccccctatgagatttcggtgtgagccttcggcacctcccctccccatcgcctctgcgcctacaccccaagggccccacggtggcccccttccttccctcaaggggctcccctcccgtgcatggacacttttttaaacccccgattcccagaggatgaggagtgcttttctaaaatgcagtaggcttggggaatcgcgagagttggggcccctgagactggggtagcaacccccccttttatcttgttaagaccttcccttccttgatcccctggaccagactcagtggacatcttgtgccattgctcgccctggagggaacccgatcatttttaaacccagaaataattttttta

SEQ ID NO: 656920 - DNA, 1603 bp, Homo sapiens
  misc_feature (64)..(64): n is a, c, g, or t
  misc_feature (67)..(67): n is a, c, g, or t
  misc_feature (70)..(70): n is a, c, g, or t
  misc_feature (84)..(84): n is a, c, g, or t
  misc_feature (89)..(90): n is a, c, g, or t
  misc_feature (109)..(109): n is a, c, g, or t
  misc_feature (116)..(116): n is a, c, g, or t
  misc_feature (546)..(546): n is a, c, g, or t
  misc_feature (759)..(759): n is a, c, g, or t
cgcttggcgccgcacctctgcccgcctcggagacccgcagccccgcgccgcgcctggccccggnccnggnccctccgcgggatnctggnncctcctcgagcgccgccancggccgncatggcctctctgggggacctggtgcgcgcctggcacctgggcgcgcaggctgtggatcgtggggactgggcccgcgccttgcacctcttctcgggcgtcccggcgccgcccgccaggctgtgcttcaacgcgggctgcgtgcacctgctggccggggaccccgaggccgcgctgcgggcatttgaccaagccgtgaccaaggacacctgcatggcggttggcttcttccagcgaggagtggccaacttccagctggcaaggttccaggaggctctgtctgacttctggctggccctggagcagctgaggggccacgctgccatcgactacacgcagctgggcctgcggttcaagctgcaagcctgggaggtgctacacaatgtggcgtcggcacagtgccagctggggctctggacagaggcggccagnagcctaagggaggccatgtccaagtggccggaggggtccctgaatggcctggactcagccctggaccaagtgcagagacggggctcactgccgccacggcaggtccccaggggcgaggtcttccggccccaccggtggcacctgaagcacttggagcccgtggatttcctgggcaaggccaaggtggtggcctctgccatccccgacgaccanggctggggcgtccgccctcagcagccacagggaccaggagcgaaccatgatgccaggtccctaatcatggactccccaagagctggcacccaccagggccccctcgatgcagagacagaggtcggtgctgaccgctgcacgtcgactgcctaccaggagcagaggccccaggtggagcaagttggcaaacaggctcctctctccccagggctgccggcaatgggggggcctggccccggcccctgtgaggaccccgcgggtgctgggggagcaggtgcagggggctccgagcccctggtgactgtcaccgtgcagtgcgccttcacagtggccctgagggcacgaagaggagccgacctgtccagcctgcgggcactgctgggccaagccctccctcaccaggcccagcttgggcaactcagttacctagccccaggtgaggacgggcactgggtccccatccccgaggaggagtcgctgcagagggcctggcaggacgcagctgcctgccccagggggctgcagctgcagtgcaggggagccgggggtcggccggtcctctaccaggtggtggcccagcacagctactccgcccaggggccagaggacctgggcttccgacagggggacacggtggacgtcctgtgtgaagtggaccaggcatggctggagggccactgtgacggccgcatcggcatcttccccaagtgcttcgtggtccccgccggccctcggatgtcaggagcccccggccgcctgccccgatcccagcagggagatcagccctaatgatgctgtgtccatgatgcttttaataaaaacaacccccactgcaaaaaaaaaa

SEQ ID NO: 656921 - DNA, 1759 bp, Homo sapiens
  misc_feature (706)..(706): n is a, c, g, or t
  misc_feature (708)..(708): n is a, c, g, or t
  misc_feature (1199)..(1199): n is a, c, g, or t
tctttgggtcctgaggtgctcgtctttcttgttgtgcagcaaggagtcatcgcttggtgttgcgtactcttctcgtctgtgtgagtctccctccttggtggttcgtctcctttcttcttacgtctcggccgggcgggtgtcgttcctctgccacattgtgtggaacacatccctgtttttcggcggagtgcgccacactccctttgtgttcggatgatctttttgacttcctcgtttgatgagccagcgtctcgcccatggccccaccctttctggggggaagaaccaaccaccaccacgtgagctccgccacaaggctcctctggtgggtgcgcccccccccatgttttcacccccgcttgttgcctcgtcgcggggccacacgcgatttctcggaggctctttctctctctcagggggggatccctcgcctttttttttcccgtttgtgaaaggatgtggtccccccccggcgaaggatggggggaatgttatatagatggggccctctactcatcagccccccacggagttgcgcccacgccttcctcttgggtggttggttcgccccctgtggtgaggggttttggtaagtggccgcccccccgcgaattgctttctacggcgaagcctcctttttccccgccccaaggagttccttcattggtgcgcagggagcgacatatactcccgggggccgcccccncnaatatatattgttgcaccagcaaagcactcttgtggctcttcttgtgggtgtaagatttaccccccgtcaggtgaaggagtgaagacttttttatgcaacccacaggatgtacacttgggggtgctcctcctcacgacgacaagaaatttttgtgacgaggcaatgagagaccgccacagcccaccaccagagtggggggtgctcaacacaacgacacagacacaagatactgctggtcttggtgaggaggttttgtggagactcttgtctcttgtggagaaacacgcacacgcgtctctctaccagcgagagactctgtgatgagacacggtccccacacgagtcccccggatctccctctgtgtgagagactctcgcgacgccctggtgtacacctctcccacttgtgagaaatattcttttgtgatagagcccacccgactctttgtgggagaaccaccccacaccccctgtgagaggggaagagttngtggagagccgccccctttgactaccgccgctctctacacagagattgtgtgagacacagacggtctcaacacagggggggatctcccctgtcgtggcgcaacacacttggtgagattctcagagagacctgtgcccacacagagacaccgcgtgctcagcagagaggaccacagaccccccaggcgccccgcggagattatctgagggcccctctgcttgagaacactctctacaggtctctcacagctctggagaggctctgagagattctcccaccctcttccccccgcctctgtctctggagaagatatgtgccgagaggagctcttttattctcttggtgtgagttgcccttgtgagccagcacgcacaactccacatgtccaaccacatcccacaagagcccccacccccccggagtatgtggagatggccaaagtggtgttttgagagagcccacatgacaccccacaagttttgagaggcaccttaagcccccacgagaagcccgggtaccccttggggagaccggaggcccattaaaagttccgagttcca

SEQ ID NO: 656922 - DNA, 1624 bp, Homo sapiens
  misc_feature (64)..(64): n is a, c, g, or t
  misc_feature (67)..(67): n is a, c, g, or t
  misc_feature (70)..(70): n is a, c, g, or t
  misc_feature (84)..(84): n is a, c, g, or t
  misc_feature (89)..(90): n is a, c, g, or t
  misc_feature (109)..(109): n is a, c, g, or t
  misc_feature (116)..(116): n is a, c, g, or t
  misc_feature (546)..(546): n is a, c, g, or t
  misc_feature (759)..(759): n is a, c, g, or t
cgcttggcgccgcacctctgcccgcctcggagacccgcagccccgcgccgcgcctggccccggnccnggnccctccgcgggatnctggnncctcctcgagcgccgccancggccgncatggcctctctgggggacctggtgcgcgcctggcacctgggcgcgcaggctgtggatcgtggggactgggcccgcgccttgcacctcttctcgggcgtcccggcgccgcccgccaggctgtgcttcaacgcgggctgcgtgcacctgctggccggggaccccgaggccgcgctgcgggcatttgaccaagccgtgaccaaggacacctgcatggcggttggcttcttccagcgaggagtggccaacttccagctggcaaggttccaggaggctctgtctgacttctggctggccctggagcagctgaggggccacgctgccatcgactacacgcagctgggcctgcggttcaagctgcaagcctgggaggtgctacacaatgtggcgtcggcacagtgccagctggggctctggacagaggcggccagnagcctaagggaggccatgtccaagtggccggaggggtccctgaatggcctggactcagccctggaccaagtgcagagacggggctcactgccgccacggcaggtccccaggggcgaggtcttccggccccaccggtggcacctgaagcacttggagcccgtggatttcctgggcaaggccaaggtggtggcctctgccatccccgacgaccanggctggggcgtccgccctcagcagccacagggaccaggagcgaaccatgatgccaggtccctaatcatggactccccaagagctggcacccaccagggccccctcgatgcagagacagaggtcggtgctgaccgctgcacgtcgactgcctaccaggagcagaggccccaggtggagcaagttggcaaacaggctcctctctccccagggctgccggcaatgggggggcctggccccggcccctgtgaggaccccgcgggtgctgggggagcaggtgcagggggctccgagcccctggtgactgtcaccgtgcagtgcgccttcacagtggccctgagggcacgaagaggagccgacctgtccagcctgcgggcactgctgggccaagccctccctcaccaggcccagcttgggcaactcagttacctagccccaggtgaggacgggcactgggtccccatccccgaggaggagtcgctgcagagggcctggcaggacgcagctgcctgccccagggggctgcagctgcagtgcaggggagccgggggtcggccggtcctctaccaggtggtggcccagcacagctactccgcccaggggccagaggacctgggcttccgacagggggacacggtggacgtcctgtgtgaagagcccgatgtcccccttgcagtggaccaggcatggctggagggccactgtgacggccgcatcggcatcttccccaagtgcttcgtggtccccgccggccctcggatgtcaggagcccccggccgcctgccccgatcccagcagggagatcagccctaatgatgctgtgtccatgatgcttttaataaaaacaacccccactgcaaaaaaaaaa

SEQ ID NO: 656923 - DNA, 279 bp, Homo sapiens
tgtcgtgctcgaaagagtgcagccatgaggagaatgggttctggtgaagcccttaagacaaataagtctcctgagtccaaaccattgcctggaaagcttccaaaaggtatctctgcaggagctgtccagacaaatgttaagaagggaccccactccctatttaatgctcctcgaggcaagaagcgcccattgtcaccagattggaattattgcttctgtgaggatgccttttttaatatgcatacccatgaaatttaatacacattttaaaacctctga

SEQ ID NO: 656924 - DNA, 574 bp, Homo sapiens
ggcaattcaggtggcccagaaagcccctggtggctgcggtggagctgggcaccgccccgactgaggcagctgctggaagaggggttggcagaggtcactgccctccctgcaggccccacccaggaggccccctctgaggaatctctttgcagttacctagccccaggtgaggacgggcactgggtccccatccccgaggaggagtcgctgcagagggcctggcaggacgcagctgcctgccccagggggctgcagctgcagtgcaggggagccgggggtcggccggtcctctaccaggtggtggcccagcacagctactccgcccaggggccagaggacctgggcttccgacagggggacacggtggacgtcctgtgtgaagtggaccaggcatggctggagggccactgtgacggccgcatcggcatcttccccaagtgcttcgtggtccccgccggccctcggatgtcaggagcccccggccgcctgccccgatcccagcagggagatcagccctaatgatgctgtgtccatgatgcttttaataaaaacaacccccactgcaaaaaaaaaa

SEQ ID NO: 656925 - DNA, 105 bp, Homo sapiens
tgcatgagatctgcagcgtttgtccacacggcagggcaaattaccttgtagagtcagcatggaggtttgctaactctgcctgtgttctttgcagattttaaccag

SEQ ID NO: 656926 - DNA, 844 bp, Homo sapiens
tggtagatttctggcatagatttgaaaaacttttaggttgttaccaagtatgaagtataaatctggggaagaggtgtatttacatttaagggtcggtaggaacaggccaccttgtgtacaaattttttagtttccaaaataatcatatattaaagtgagggttgcctgatctgtactttgtgtgtagttacctttttatatttaaaaaattaggaatgaagatgttatgtgtcttagcaagacttaaagcttgatttgatcttgtgtttaaatgccagaatgtacttaaatgagtgacttagaatgccgataaaattgcagtttcatgtatgtcctataagtcatgctcatgtatatttagttacgtataatgctttctgagtgagtttaactctgtaaagtcatttggttaaatcatttggcttgcttgtttactcccttctgtagtttttaactgtaggaactttagagataagtctacattaaggaatgatcacatctaaagctttatcttgtgtgtaatctaagtatatgtgagaaatcagaattgggcataattggtcttagtggatcatccaggcttgacaagtcattattcctgggctgtggtacgtgaatttggtgagattacctgctgctaggaaaagtattgatggcaaagccccgttttgtttttgctccgactaccagtctgatcataccatgggtgccaaataccctggcgtagatggccacagggaggcggcgcctaaacgcgcggttttttcggaaacaccacgaaaaattttgggtgccccaaaaaattacaccatttggcggcgcgaaaaaagtgtccacaaaagta

SEQ ID NO: 656927 - DNA, 1015 bp, Homo sapiens
tgtcagcaaaaatcttttaaataaggagatgtaggatccaggggttagtttttggtacgcctcggttgggcccggtcggcctcgggcaccgctcgaacttccgggcccttggagcggactgtagggtttgggtggtgggctgtcgcggggtccctgggggccttgccgaataggccggtaacactctctctgcggcctcttggcgaggaccggagaagcgaggacagttgccaacagccccttaaggggatgtccagggccagctggtccggaaagtgaggtattcttggccccctctggcctcgtggaggatatggcggttggcgggcccggtctggtcagcgcgcgccagtgcactatactcttcagttgggggtacctcctctgaaacccggcatatccatccgagtttatgggtcccccaaaaccacggggccgcactttgggtttcccccggccagggaaagcttcaatctttccgggataactccgggaaaaggggacatgatgggaggccaggtggggggcaatctattaaaaaaccccccttatcaaagggcaaacctggggtagaaagttttggaagttggggcaccattcgggcgcaaaaaaaccgtgtaataagtgggacacaaagaggccttcgggttaaaaaacaccgtggcccatgggcgcctccctttgcgcccgaacgcctttcggggcccctgtgatacaggggcggcttgttccaatccccagtcatgggcgccctcctgattcgggcctcagactcttaacattgttcggggaacgtgtacccgggaccccgggttgtttgccccgtgttcgcctttagccttctaaaactcccttagcaaaaaatggagtgaagggaattttccacacacggtttgtcccagatatgtatgtccaaattgtgaaacgcttggtggaacccttaatgccgtgaccagggatcaacccgattgcaaaagtcaggttacaaaccctgttgggaagagaacctaaaaca

SEQ ID NO: 656928 - DNA, 1747 bp, Homo sapiens
  misc_feature (64)..(64): n is a, c, g, or t
  misc_feature (67)..(67): n is a, c, g, or t
  misc_feature (70)..(70): n is a, c, g, or t
  misc_feature (84)..(84): n is a, c, g, or t
  misc_feature (89)..(90): n is a, c, g, or t
  misc_feature (109)..(109): n is a, c, g, or t
  misc_feature (116)..(116): n is a, c, g, or t
  misc_feature (546)..(546): n is a, c, g, or t
  misc_feature (759)..(759): n is a, c, g, or t
  misc_feature (1489)..(1489): n is a, c, g, or t
  misc_feature (1507)..(1507): n is a, c, g, or t
cgcttggcgccgcacctctgcccgcctcggagacccgcagccccgcgccgcgcctggccccggnccnggnccctccgcgggatnctggnncctcctcgagcgccgccancggccgncatggcctctctgggggacctggtgcgcgcctggcacctgggcgcgcaggctgtggatcgtggggactgggcccgcgccttgcacctcttctcgggcgtcccggcgccgcccgccaggctgtgcttcaacgcgggctgcgtgcacctgctggccggggaccccgaggccgcgctgcgggcatttgaccaagccgtgaccaaggacacctgcatggcggttggcttcttccagcgaggagtggccaacttccagctggcaaggttccaggaggctctgtctgacttctggctggccctggagcagctgaggggccacgctgccatcgactacacgcagctgggcctgcggttcaagctgcaagcctgggaggtgctacacaatgtggcgtcggcacagtgccagctggggctctggacagaggcggccagnagcctaagggaggccatgtccaagtggccggaggggtccctgaatggcctggactcagccctggaccaagtgcagagacggggctcactgccgccacggcaggtccccaggggcgaggtcttccggccccaccggtggcacctgaagcacttggagcccgtggatttcctgggcaaggccaaggtggtggcctctgccatccccgacgaccanggctggggcgtccgccctcagcagccacagggaccaggagcgaaccatgatgccaggtccctaatcatggactccccaagagctggcacccaccagggccccctcgatgcagagacagaggtcggtgctgaccgctgcacgtcgactgcctaccaggagcagaggccccaggtggagcaagttggcaaacaggctcctctctccccagggctgccggcaatgggggggcctggccccggcccctgtgaggaccccgcgggtgctgggggagcaggtgcagggggctccgagcccctggtgactgtcaccgtgcagtgcgccttcacagtggccctgagggcacgaagaggagccgacctgtccagcctgcgggcactgctgggccaagccctccctcaccaggcccagcttgggcaactcagttacctagccccaggtgaggacgggcactgggtccccatccccgaggaggagtcgctgcagagggcctggcaggacgcagctgcctgccccagggggctgcagctgcagtgcaggggagccgggggtcggccggtcctctaccaggtggtggcccagcacagctactccgcccaggggccagaggacctgggcttccgacagggggacacggtggacgtcctgtgtgaaggtagggtgggcatggcccttcccaggcagcaccgtggtgcccggggtgtggggggcttagagctcggcctgtgctgtnagcagacgtggcacccanaggccacgcctgggtaacgccctgcagagcccgatgtcccccttgcagtggaccaggcatggctggagggccactgtgacggccgcatcggcatcttccccaagtgcttcgtggtccccgccggccctcggatgtcaggagcccccggccgcctgccccgatcccagcagggagatcagccctaatgatgctgtgtccatgatgcttttaataaaaacaacccccactgcaaaaaaaaaa

SEQ ID NO: 656929 - DNA, 453 bp, Homo sapiens
aaccctgcagctctctctgatgctgctctccttttctgcatgctcacatactgtcacgcttagtaacctcagattcgaaggagacgacatgcacacacatgatccaccagcccgtgtgggattccctctgcccttctggcatctgaaggctgtgattcaaagatcccccctgcaaacttcccacaaatgaaccacctgattctcacaaccgaagcgagcattgacacctcccattgagggacaaaaacaaagtcacattctggcctgctggcaagtcacctgtcatatccagctcatcttcatagtaccatagtaagtcctatactttagtaaatatacagcctcttacacgcttctatgaggtgccctatgtgttgtctctggggtcagccttgtgcttgacacagcgaccgctcatttccgttcagtgtgaacaaccagacctcaccaatt

SEQ ID NO: 656930 - DNA, 271 bp, Homo sapiens
atacatctgtgatagtcacgtgcattaggctgtagtatttgtctatctcttgggctgaggcgggacaatggtgtgaacccgggaggcagagcttgagtgagccgagattgcgtcactgcactccagcctgggcgacagagggagactccatctcaaaaaaaaaaaaggaaaaagggaaaatggcccttactttggtaacacttaaccaagcatagataaatatagagggccaggttgggaaaacccagtttgtgaagattacatagcctta

SEQ ID NO: 656931 - DNA, 379 bp, Homo sapiens
  misc_feature (14)..(16): n is a, c, g, or t
  misc_feature (22)..(22): n is a, c, g, or t
  misc_feature (42)..(42): n is a, c, g, or t
  misc_feature (52)..(53): n is a, c, g, or t
  misc_feature (75)..(76): n is a, c, g, or t
  misc_feature (98)..(98): n is a, c, g, or t
  misc_feature (100)..(100): n is a, c, g, or t
  misc_feature (103)..(103): n is a, c, g, or t
  misc_feature (108)..(108): n is a, c, g, or t
  misc_feature (151)..(151): n is a, c, g, or t
  misc_feature (154)..(154): n is a, c, g, or t
  misc_feature (184)..(185): n is a, c, g, or t
  misc_feature (208)..(208): n is a, c, g, or t
  misc_feature (230)..(230): n is a, c, g, or t
  misc_feature (249)..(250): n is a, c, g, or t
  misc_feature (256)..(256): n is a, c, g, or t
  misc_feature (258)..(259): n is a, c, g, or t
  misc_feature (266)..(266): n is a, c, g, or t
  misc_feature (268)..(268): n is a, c, g, or t
  misc_feature (276)..(276): n is a, c, g, or t
  misc_feature (298)..(299): n is a, c, g, or t
  misc_feature (306)..(306): n is a, c, g, or t
  misc_feature (328)..(328): n is a, c, g, or t
  misc_feature (334)..(334): n is a, c, g, or t
  misc_feature (338)..(339): n is a, c, g, or t
  misc_feature (342)..(342): n is a, c, g, or t
  misc_feature (348)..(349): n is a, c, g, or t
  misc_feature (359)..(360): n is a, c, g, or t
  misc_feature (363)..(364): n is a, c, g, or t
attacagcccttannncatttncagcttaaggacattttaanattgcatgannattagcaaaattattaatttannaccccaaagtaaattgcaaatntnaanatttnattttttcactcttttatcacatgctccaatgtatgtacatangtntctgtggcttaaataatatgttgttatttnnatacatttttgtggtgcaagtanttaatgttattatttgattgtnataccatatgtgccattannattctntnnaattaanantatttcantatgcagaaaataataatatanntgccctngacccttcacatactattttgncatatntgcnnctnattttnnaataaataanntgnnactcttttgtactcc

SEQ ID NO: 656932 - DNA, 869 bp, Homo sapiens
  misc_feature (449)..(449): n is a, c, g, or t
tgcatgtcataatgtacctgtactacggattatctgcctttggccctgtggcacaaccctacctttggtggaaaaagcacatgacagccattcagctgatccagttgtcctggtctcactgcacatctcccagtactactttatgtccagctgtaactaccagtacccagtcatttattcacctcatctggatgtatggcacatcttcttcatgctgttctccaacttctggttattaactctttataccaagggcaagcggttggcccgtgcacttcaagcaaaatggaactccaggttattggcccagtcaaggcaacttgagaagccattgccttaaattagggcgcccaactaaggttgcttcaagactgaactttaggccagtgtcccgtcaagttgcctctcccaactacgactgtgaccaagcttattgttggtcaggactngagcagggggggactggcctcccctccccacaggtgctctacagggaccacggcttttggttcctcacccacttcccccgggcagctccagggatgttggctcatttgcttgtcttgcactccagagctgggggctaaaaggggttgacagtatttccccttcctgcttaaaaccttgcgagaggggcctccggtgggcccacaaaaggtctcgtgtcttttctcacacgaaaggttgattatgtctcgtggacccgtgtcactctcaccccaatgagagtagttcggccagtcgggggggggccggaaaaaacgcggggggtatcaccgggtttatatgcgcgaacaccaaaaaaaggcggcaaaatcgggcacagtccccttgtaggccaaataaaaaaggcggaacagaagagtttg

SEQ ID NO: 656933 - DNA, 287 bp, Homo sapiens
aatcactcggtaccatgttcatccgtgatgctgatcctcctgcatgatttacgatcagaatccggggcggacaacctgtccgccgctgacgaccggttcgccggttccactggtccattgcggcaggatagtgattttttgtgtggcggaaaatgcgccgacatagccatccggatcggtggcgcgaacccgcaggtaatactgaccggctgctggtcgcgggatcttcagttctgcctgatccagttctttggtgaggtacagcgtatggaaggctggatcggtgg

SEQ ID NO: 656934 - DNA, 408 bp, Homo sapiens
ggttagtgttaagcagtatagtattggtatgggtcattatgcatcatatcagttagcattctattttggatggcagaatgttatgcacgtaggtagcagaattaatagctccttagacaacgacgtgctgctggtgtgtattggttgtaaattgttatgcacgtctctggaagacggaaaaatagactactactagaaagaaaaatgactttgttgtattttgctattatctatatatttcggcggcccagggggcccagaggtgtgtgggggcgtggcctataaaaaaatacaacacaacaaaaaataaacaacaaaacaaaaagtgtcgctttataaaaagtggggcgagaaaagagctctctcctatattcaacagtcgtgcgcgcgcgaagttgtgtgtggtaa

SEQ ID NO: 656935 - DNA, 167 bp, Homo sapiens
ggtacagagttggcatctgattgtcaacaaaacaaagcttgaatagcatcctaggagggcagacaggcaaccaggctgtagacactcttctatttgatcaaaatcagaccagagaaaacctactccacacagatagtataggtatatgatattcatctttttcgttt

SEQ ID NO: 656936 - DNA, 197 bp, Homo sapiens
cctaggaccagtaacgcatgggttatatggcagggatatggaaatttctagactttttgacagctactggacacagaatctgagttaacattgatacctagagatccaccccaacatcacaccaccttgttattaccttcggtggggccacatagcaaatcaagtccccgctatcatccaggtcacagtgggcccac

SEQ ID NO: 656937 - DNA, 138 bp, Homo sapiens
caacgaatatcccaggattcctctaacgattctcgccttatttactttcttctatatatttgattacttattgctagtgcttacactcagcatataaaatattctacccctttagagataacaaaaactatatatcaa

SEQ ID NO: 656938 - DNA, 205 bp, Homo sapiens
gctccgaggattcggcaagctatccggttcaattggtctgtgtatctgttttcattctagtattacactgttttggttactatagctctgtggtataatctgaagtcaggtaatgtgattcttccagttttctttttttttgctcaggatagctttggctaatctaggtcttttgtgttccatataaattttagggattcttttt

SEQ ID NO: 656939 - DNA, 343 bp, Homo sapiens
cctacatagcgttgcatgcggaggatgcactgaggagctgggactacaggtattcaccaccatgcccagagtgcagagagactctatctccaaaaaaaaaaaaaaagaaaaaggccccttccttttgggccgggaggggccaaaaatttttcaatacccacctttttagggggtaaggggttcaacaaaccaacctttttaaaatgggttaaagggcccggccttttttttttttaaacaaacttttacgggcccaccggcggggggggttccttggggggggttttcagaaggaggccttttttatagggggggtattacccaaggaaaccttccaggggga

SEQ ID NO: 656940 - DNA, 558 bp, Homo sapiens
gcgcgcgttccccatctcaccaacacaaatattaacaaggccccgcacctctcacaataataaagctcaaaacacctgttattctcacacatttagttccgcacaatgttggagatatcttccagattgtgtgagaaacacttcgtgacacaactacaaaattttccaaggttcaccacaaacttcacctaaaatagcggaggctaccaatttgtggcggcaaagacatacccaaagcgcttctggattccacattaaaagggaaacttcgcaaccatgtgcggatatggccaacacccattatattctattgcctggtacttgaaaaggttcaacggattcaatgtttacccaatattcataagctgaaaaaatcgtccacccacttatcctggtagactttcagacgatgtctttccctctctagaatctgttatgaacacgttgttgctggattcagtaataaatatgtaaggcctttctttttaaaaaaaaaaggccttacatatttattactgactccagccaaccaacgtgttcataacgtcgatcggccgg

SEQ ID NO: 656941 - DNA, 518 bp, Homo sapiens
tggttcataacagatttctggtacagttggagtcaatttaggtagggttatcatggatggagagagtgagtcttttaaattcccagcagagacaggcatatctggggtattcagtgaatcttggaatctttctttcttcttcttctccttttttttttttaaatggtgttttcacctatgggtccagtaaaacaataacaggtgcacgggaagtgggttttatacaggggaatgaaacgggaacaatattttacagcagatggggagaaaagtggcagagtctggtttttggaagtctaagtggtggacacttcagtcccagctcacagatgatgtaaaatggacaatggaaattggatggtcgcaaataggggacagaagttggccgtggtagggtgtccttatagggtggtagcaagcacccaaaagggtacctattactttctttagtacccttggattaaaagaagtggggttcccggcaaggcatggtaatccccttagatgggggacccttg

SEQ ID NO: 656942 - DNA, 87 bp, Homo sapiens
gtggaactaatttgcccgagggctacagcaaggccaagtggagacagccgtgacggtaaaacttacccctacttaccaccctccaag

SEQ ID NO: 656943 - DNA, 218 bp, Homo sapiens
cctctctcttaccccgttcttttaccctttcccttaccggtaccttgttgctactcggtctcgtgccggtactttacgccttacgactggcgttacccaccccgcttggggtctgccttcccaccgccccccgacctccgggaccgaccccgacgcgactctacacggtgccgacgggagtccacgcgctacgccttcagatcatcctggatcactcg

SEQ ID NO: 656944 - DNA, 137 bp, Homo sapiens
atattcggctttgcaagcctataaagtgctgcagctcctatagctttgctgtagttatagtgtgcagctcggagccatagacagctagttagttagttatgagtgagcacagctgggtgccagatacaattttaatg

SEQ ID NO: 656945 - DNA, 658 bp, Homo sapiens
  misc_feature (2)..(2): n is a, c, g, or t
anactacgaatgcctaatccaaggattcccaaatcagcccgcacatccataggttgttagatttacctatttagataggaggagttctgacggtcttgaatctatatttttccttaagggtatgttttggattaggtgtgttatgatggggccggggtggattatattgcggcgtaacgtccttacccctaagtaaggggcctgagttatttgagtgtttttccggggactagggaggtagtgttctcggtaggcgttactttagggattcggggggcgacgttctaacgactactatgaaagctatttttcggacgatttgcgttcgacgagtgggggacgctctattatagggtgtcttcgaggtttaaatttgtcttagctgagggctcttgggtttaatgtataaaatttaccggtcgtagttttccgattttgctgcctgggtaagttctcggggtgtacctatggacgtgctattcatttttctccttagtcgtattgaaagggtatgatgtttctctcttctcgtgtgcgtttttgaaaaaaagggtgggtattttcggtctcttttcgattggttaatgctctactgtttgtatggtggtgtatatccttaagtggatttgtggtttttttcgttttggggtagaggtct

SEQ ID NO: 656946 - DNA, 908 bp, Homo sapiens
tcgggcccgttcgcgcccgtcctgtacggccacgtaccgcggggtggcgggcgcgctagcggcgcccctttgagctagcacgccacggtgcccgacaccccggagcagcctgctgtacgcgacctagaagcggcccttacctacagccgcggacggtcggctgagcggccaggccgtgcgccggccctttgcgtcagcctccgctgggcctcaatgtaccctgcttctgtttgtatatatcccacacacgacatcaacggtgcctgaccttctctgaataccgccgccttgcaagttactacatagtacgaagtcctcatcaagagcaaagcagacgagcgcctaggaacaaggtttctccctatacttggtacactcagcgagctacaactaacatagctgagcgcatgtccgacatatacgcctgcccaccagcaaatgcccgtacaccacgaagacattcgtcctcacccacccactcagagttaggcctcacctggcactgcactacgtcgtacaacgcgccccctggccagaaccactcgacaaaccacacagattccatcaccgaactaatcacacagaacgggcaacagaaacacatggcttatcacacaacacttgcgaagcaggcacaacaccccacagcttttagcatgccatagaataagcaatcccccagacacgaatcaatttgacagcagggaacagctgattatcaaccttctattcaccaagtttaggagggcaaccccaccacactctgaactttaaaactccaactcaaagaaaaacctcgaaatcccattcatccctgccatacacatggataaggcactcaatcttgacccagtcctcacccattctccacattccaagcaacatccacacacagcgtcatcacaaca

SEQ ID NO: 656947 - DNA, 340 bp, Homo sapiens
ggcagctgctgttgcggtcgacctcaggatcccccgggttgcccgtctgcccctggttagagcctgtctggcccttctgtttgtgagctgggattatccccggaaaggaagtctttctgtctcctggtgttgggtgccacgaggtgcatgctgctcagaaaggccggatgacctcgggggcgagtgcgttccctgcttccttctaccgagggtcagcgtattgttcatgtccccggtacacttctatggagtgctgcatgtatagctcgtggtgttagtgaccggttcccttacctggtctgcacgggtacggctagcctagggcgcgtcgagtcagtct

SEQ ID NO: 656948 - DNA, 327 bp, Homo sapiens
  misc_feature (84)..(84): n is a, c, g, or t
agtcgcaccgttagaggtgcagtgcaaccccatcgcggtcgtcaggtggatgaactgacgtgaaaaatccgaccagctccaggncgataccaggctggccaaggggctggaggacgggcgggcgggtgcatcttcatcgtcgtcacccccccaacgcaccaggtcggtggcgcggtcaagctcccagtagatcaggcctgcgacttcgaccgccagacgccagcgctgacggctctcacgcatcaactgggcctgttgatgctggcgagtgacatcgcgcatctgcccaaaccagccaatcacctcaccctgctgctgaccctcgtc

SEQ ID NO: 656949 - DNA, 402 bp, Homo sapiens
  misc_feature (64)..(64): n is a, c, g, or t
  misc_feature (83)..(83): n is a, c, g, or t
  misc_feature (98)..(98): n is a, c, g, or t
  misc_feature (116)..(116): n is a, c, g, or t
  misc_feature (225)..(225): n is a, c, g, or t
  misc_feature (233)..(233): n is a, c, g, or t
  misc_feature (257)..(257): n is a, c, g, or t
  misc_feature (307)..(307): n is a, c, g, or t
  misc_feature (340)..(340): n is a, c, g, or t
  misc_feature (400)..(400): n is a, c, g, or t
caatatgtgactttttaaaaaagctgtcaaataggtgtgaccctactaataattattagaaatncatttaaaaacatcgagtncctcaagtcagtttnccttgaaaaatatcaaanataactcttagagaaatgtacataaaagaatgcttcgtaattttggagtaggaggttcccccctcaattttgtatttttaaaaaggccatggtaaaaaaaaaaattccnaccagtanataaggctgtaaaatgagaatttngccccctcccctcttcccccagtactattttccaaaggtaatctattacnaattttttatgtaattttcagaaaatttgtagnggtatataagcaaaaatgtaatctttattttttaaataaatgggatcaattattaaaaanaa

SEQ ID NO: 656950 - DNA, 407 bp, Homo sapiens
agttatttggtatttgctatcaatacatattttgttaacatattaggatagacatctcatcttcaaatcttcatggacatactaatttttgcatccttctaatcaaagtttttggaaagtggaaagcacttaaaacttgcaggatagagtaattaactgatggtggggcattcaagtggtgctagccagcagacatcttacaggatctaccacaaaaataaatataattattgttgtaatgagtgacctttgaaaaaagtggaagtgggatgctgagatgcgttattctggcctgggcatttgaagatagtttccctgaagaagtagcttacaagctgagacctacaggatgaacagtagttacccaaagaaggagggttccagtccaaagtaatagcaaaaaaaaa

SEQ ID NO: 656951 - DNA, 454 bp, Homo sapiens
  misc_feature (6)..(6): n is a, c, g, or t
  misc_feature (26)..(26): n is a, c, g, or t
  misc_feature (75)..(75): n is a, c, g, or t
  misc_feature (81)..(81): n is a, c, g, or t
  misc_feature (284)..(284): n is a, c, g, or t
ccaagnttccactttttcccttttgnttggccccctttaacttccggtagcccggcagcaagcccaattctggcntccaanggttttttgccagtgtccaacaaccaacggaggcattaaaactcaaaccatcccaaaacgtcttcactgtcaaaggacattctttatcaaaggtgtcatccggtcagctctaccacggtctttcttacttgaacttatcacctctgccctgctttccagaactgtacccaccactccgcccaccaaggcgatccttgactgantggcgcaaggcactgagggcggcatctacaatggcttctcccgttctgccaccctgataatcttctggcttgtttttgttagctccaaatatcttgatggtaggaaatccctggacaccatactgacctcccagggactgatgtttgtctgcattgacggccccgacttt

SEQ ID NO: 656952 - DNA, 407 bp, Homo sapiens
  misc_feature (22)..(22): n is a, c, g, or t
  misc_feature (225)..(225): n is a, c, g, or t
  misc_feature (404)..(404): n is a, c, g, or t
agcaagcaagatttgcagccanctttaatctacccctaggtgatatagtacagttgaaagaggctgaactctggggttagacaaacctgtctaagaagggcttcattactcctcgctgtgatttcttagcctcaatttgtaaaatagggggcaataaaacctctctcataaagttttgagaatcaagtgaaataatttgtgttaagtgccctaggatagtgcctngccatagcagtcactcagtaaattatagtttgatctctttagagagattcaccttttgaatacagcatataagtttccctttctatcaagagtagagtccctctcaattgtaatatgttattaaatgtgctgagattttgtatccatctgttaattctcactgtgtgggaggccttttnggg

SEQ ID NO: 656953 - DNA, 242 bp, Homo sapiens
ctttagtcggcgtaagaaaaggcgtaaacaaggcttaaaatgacgcaattctcccggggtcagggattacagggtctttaaatcaccttgggttaaatctctttaaaaaaatcgcctacaaatattaaatcaccaaaatttaaaacaaaactaaaggcgggaaaggcaccttcatttaaatcaaaaaggcatggcccttctatggggtataatccggggggagacttcccggatgggttggc

SEQ ID NO: 656954 - DNA, 135 bp, Homo sapiens
cacctcggtcgagaatgagtcgatgacgcgctgtggattccacctggctagctgagtgctctcgggactccgggtaccgttccgccggcgggagtagccgtggttcatgtcgtccgcgcggagccgtaccgagct

SEQ ID NO: 656955 - DNA, 156 bp, Homo sapiens
gtctgagcaagctgggaacatgaagcgttctgcagtgtcctgccactatgccctcagagggctctcggcagcctgtgagtatgcgcggccttccatcccagcactgcctccttttcaactctccacatttggtattgccttcccagcttgctcaga

SEQ ID NO: 656956 - DNA, 340 bp, Homo sapiens
gagtgaagtggccctatcttggctcatggcaacattctacctcccaaattgcaagctattctcctgcctcagcctcccagtagctaggattacaggcatgcaccaccacgcccagctgattatgtgtttttagtacagatggggtttctccatgttggtcaggctggtctcaaactcctgacctcaggtgatccgcccacctcagactcccaaagtgctgggactacaggcataagccaccattaccagcctcattattttataatttgattgcctatccgaacccacaccatacttaatggaatcaagagacaagtctcccaaccttgtcgacagtact

SEQ ID NO: 656957 - DNA, 100 bp, Homo sapiens
gaaagctcatacccccagtgatgtagaatccattggtcgcatcctacctttacttatcagttctcttccccacgacaatattcatgcgcctagccatggt

SEQ ID NO: 656958 - DNA, 514 bp, Homo sapiens
  misc_feature (18)..(18): n is a, c, g, or t
  misc_feature (158)..(158): n is a, c, g, or t
  misc_feature (509)..(509): n is a, c, g, or t
acccccatcccaatcaantatgaactataaattctgtttctttaatagttcaagaaaatctttactacctaaaatctgatctccccaggcccaggtgtggtagctcatgtgtgtaatccccagcactttgggaggctgaggcaggaggattgtttganctcaggagtttgagactgggcaacatagggagaccccatctctacataaaattttacaactagccaggtgtggccgggtgtggtggctcacatctataatcccagcactttgggaggccgaggtggcgtggatcgcttgaggtcaggagttcaagaccagcctggccaacatgttgaaaccctgcctgtactaaaaatacaaaaattagctgggtatggtggtggcatgcacctgtaattccagctactcaggaggctgaggcaggagaatcacttgaacccgagaggcggaggttgcggtgagccaagatcatgccattgcaccccagcctgggtgacaagagcaaaccnccatc

SEQ ID NO: 656959 - DNA, 426 bp, Homo sapiens
  misc_feature (121)..(121): n is a, c, g, or t
cctctccagccatggtcccctttaattataattgatctgaaggattgcttttttaccattcctctggcaaaaagaggattttgaaaaaatttgcttttactataccagcctaaataataangaaccagccaccaggtttcagtggaaagtattgcctcagggaatgcttaataattcaactatttgtcagactttcatagctcaagctctgcaaccagttagagacaagttttcagactgttatatcgttcattatgttgatattttgtgtgctgcagaaacgagagacaaattaattgaccgttacacatttctcagacagaggttgccaacgcgggactgacaatagcatctgataagattcaaacctctcctcctttccgattacttgggaatgcaggtagaggaaaggaaaattaaaccgac

SEQ ID NO: 656960 - DNA, 335 bp, Homo sapiens
cccccccccccccccaaagggggggggggtaattttttattcttgaagatataagcacagaagagagggtgctcattaacagaggtccattactgcaatgttctcttaccagttaaccaagctgttcacagtttaacctgttgaatattatttgagctatttaaggcttattatttttgagtatgacttaaatgagggttaaaccttgtttaagaaaaatgcactgatttctgcattatgtgtacagtattgcacaaaggattttattcattttgtcgcattattttgaatatgtgtcttttcattttaataaagttataatccttatttattat

SEQ ID NO: 656961 - DNA, 109 bp, Homo sapiens
tgtaagaatgctttaatgataacaacaaataagttatcaaactgtttccttatcctcttatactgatgtagcataaaaatggtcccggttaggagttataactagccag

SEQ ID NO: 656962 - DNA, 260 bp, Homo sapiens
gagttctgtgcgtagcttctgagaagctggtattacagacgtgcaccaccatgcctgactaatttttgtattttacgtagagacaagttttcgctatgctgggccaggtgacctcgaactcctagcctcctcatatgatccacccacctcagtctcccaagtgctgggattacaggcatgagccactgcacctggcctttacatgtctttcgtgctgagcttaacttcacttaaacctttcagcaaattcctcccctttc

SEQ ID NO: 656963 - DNA, 135 bp, Homo sapiens
caccaaatcagctctcagagtgctggaatacgcatcagccatgcacccagtcagttacagtaaaatctaaagaatgtcatcatttgtaacagaagagtatcatgactttttaggagtatttcctaagatctgaga

SEQ ID NO: 656964 - DNA, 415 bp, Homo sapiens
  misc_feature (122)..(122): n is a, c, g, or t
  misc_feature (285)..(285): n is a, c, g, or t
  misc_feature (296)..(296): n is a, c, g, or t
  misc_feature (363)..(363): n is a, c, g, or t
  misc_feature (389)..(389): n is a, c, g, or t
gtggctcacacctgtaatcccagtactttgggaggccaaggtgggtgggtcacctgaggtcaggagttctagactagcctggccaacatggtgaaaccccatctctactaaaaatacaaaanttagcctggcgtcctggcaggcgcctgtaatcccaactactcagggggatgaggcaggagaatcgcttgaacccagggggcggaggttgcagtgagctgagatcacgccatcgcactccagcctgggggacaagagggagacttcatctcaaaaaaaaaaaanaaaaaaagaangtgttagttcttaaatcttcttagttgctctttgggttacattttaaacacactaaacatatttttntgttcagcaacttaataatttctcantctgaacgtgacttctgctgactgtt

SEQ ID NO: 656965 - DNA, 313 bp, Homo sapiens
ggtgatttcttgcggtgtcttgtcgtgaaatcttgcctattcctgagtccagtatgccattgcctaggtgtctttcagggtttttatagttttgggtttcacatttaagtctttaatccatcttgagatgatttttgtatatggcataaggaatgtgtccatggcctcgtagtatagtttgaagtcaggtagtgtgatgcctccagctttgttcttttggcttaggattgacttggcaatgcgggctcttttttggttccatatgaactttaaagtagttttttccaattctgtgaagaaagtcatcggtacc

SEQ ID NO: 656966 - DNA, 1170 bp, Homo sapiens
gccccggtactagccatgggctcggtgggctgcggccagcaccattacagcacacactccgttgatagcatgggagccagaggaaacctgaacgtgggtggagcgttccactgagtctacttcagtgagacagcaaggcccatgctgatggggcgaggatggcagggacgtgggcattttggacaccaggggaaatggaaatgctgctttcaaaacttagtttcctttccatttcttcctagtctggccttggacacaaatctggtagaaagaagcctgataaatcgagggcacttgtacccatccctgtgccccacagaaggttcttggcagagaagtgcaagaatgggtgaacacggcggtggcagggctggtgtgtgatggccatgggctgggactccgtatcaggcctgatcacctagcctggcgagcataactctgatctcatttgaatgtccagagggagcatcataagagcccagagctccgataaccaaagagtgatattgacatttatggagatagggtagaaacatagtatggataaaatactaacttaataataggtagggagtaaagcgatgtagtctttgacattaggacactggtaggtaatttgattgactttatgagtacgatgacttatctacataggcacaagagaattcgagggatagacacggacaccaaagagacagtgacagtggcacgacacacactcggacacacagccaaacagactacaacacaaggacaccatacagcgccgaaaacatgacgagcaaggaaagacaccacaaaacaataagacacgacaacagaccgctacatgtgcgccatgagcaactaggagagtgacaaggcggcaacccggacacaagaacaaaggaaacagggaacgaccaacagggaacacgggcgcaacgaccacacgcgaggacaaccggccgtcacaacacccccgcatcgcgagagagagcgccacgagccgaccacaagcacagggagcggagaccaacagacgcgcaccggaccaagcacacgacaacgcacgaggacacgacgcacaccgaaacactgacaagcacgaagcacacacgagacgaagaagagaaagacgaaaagagcagcaagagacagcaggggacaagagaaagattaagcgcgcgg

SEQ ID NO: 656967 - DNA, 737 bp, Homo sapiens
gtggctgtactggcctggaattttgggatgcctggcgctgagcattgactgatccctgactgcgacgtcacctgtggaggaggacgaggaggatgcggagtgactgctggatgactgaggactgcgagtgacgtgtgaggcctgctggtgcgagggactgcggacgctgttgactgaggacgaggagtctggagtgagcctgctgtggcggtgcgtcccagctcgttcctgtccagaatgacatgtggtccagaaactggctgagccacgagggaccatgtgtaggtagtcggcacaactatcctggatctgggtggaaacgagactggcaatgtggtgacactgccaaacctgagtttctacagaaatgagatccggcttcctgcccaacggctgtttcattgaggacattcttcaggaacgtggacgtgacaattatgacctccttgaggacaatcactcctacatccagttggcgtgtttcctctgcgaggaaccaggagttgaacttggcatgccaagcccctcacgctcagggaggtcgaggtgtttagaagctcccaggagatccaggagcggcttgtccgggcctacgagctcatgctgggcttctacgggatcctggttggtggaccgattgcacggtgccacggtgggccgagcacatggaataccagaaggcgcttccagaagctgaacttggcgcagccacaacaacctccgcatcacacgcatac

SEQ ID NO: 656968 - DNA, 1183 bp, Homo sapiens
  misc_feature (1183)..(1183): n is a, c, g, or t
ggcggagactgcttctggaaggaacgccgcgatggtcgcgcagggagagccccaggtccacgttcaggacttgtattggtccggcgatggtggtactggacaaaacgatcttcgtgacagacagtcgatgatgactggtcgaatttagacgaacgaagtcatgtcagccgaccgtctgggtggtaggagggttctatccccgtagttggttcgcacgactcagacgagacggacgctatgtcagctgtcaagtgctacttgcgagaccacagcgcacggtctgagggcaggaatagtgtccgaggtgaggacatggagtaggaatgggccctattgtagtagtcgctaagcgcgcaggctgattgccagtcgagatagagtggttatcgaatggtgaacaagtcgcaggagattcatcctgtaacgaaaggaaattggtaggcgcttaaatcgtggtgctcactaatgcacgaatcgtggatcacggacgctgtgtggatcgacgaacacaattcctctcacttcggttgtataggtcgttcggtcaaccagagacgctgcgatttcattcagatgggtaccctgtgaagagggtcagtaccagtgggtgcataaactgctcgagttggtattgcctcttgcccaacccgcgtcgcacaggaacgagcgaaatcccgttgcgaaaagtgaaccgaaacggcgagtcgattccctacgatcgttcatcaggaaacagagtctcataatccgtggagcggacgatcagtggtaggcgtcaacgaaagggcccaccttgtgcctgtcccttgaacgtagttgtgttcagagaaaagctgtccaagttatggcgaccagaacaccttccctgaaaggcgtatacgggggcaatggtgtgcaggtctgtgcacccaatattggcgccttgggtttcacgtccaaggcggccccacgaacagcgagcggaaaacagctttccggctctaggttgggaacccctctaagtctccttttttcgggacaaggtgccacataagcggataaagtctgaactgccaaaccagagaaacgctggttagcggacccgaggttcaagcgttgccgaattggaaacactcacaagagcggttgaggcggctcttatcacccccttggagcacttgtacgaggcggaggacctgtcggn

SEQ ID NO: 656969 - DNA, 177 bp, Homo sapiens
cctgatcccggatcctgggtatagtgggaactcttacatactatctttgcaacttttctataaatctaatactattccaaaataaaagatttattaaaattagggctgggtgcaatggctcacgcctgtaatcccagtatttcgggagccggagacaggagaatcacttgtacccag

SEQ ID NO: 656970 - DNA, 188 bp, Homo sapiens
cctaattttagaagtttcaatagcattcttatgattttataaattgatgtggcatatgcagatatttctaagaaatatatagttcagttctgaaatgtttattaaccatttatataaaccgatatcatctacattgctgcctgggggttcctttagctaggtgctgattgagaacttctaaaactagg

SEQ ID NO: 656971 - DNA, 721 bp, Homo sapiens
ttggctttctttcattgtcttgacgtgcgctgcagatccacagaccagcataggaaccacacaagagtgaaacctttgctaagtggcacctgcagtgccaatgtgccaaagtggaagaggaacaatgggaggcagaaagaaacgtgagcaatgccctcctccagctgatggaagatgaggtgcccaggagacaatgcagtgagaatggcaacccagctgactgtcctgcatggcctgggatgctggtgtgtgtgtgcctccaatgggtgtcttataagatgatgtgatgatgttgtgtgatgttgattgatgtgcattggcatgctgtgctcatgatttttgatgctctccatgtggatgaagcctctgatcacctctgattgagtgattcttgaagcctgtgccctccaaatgcatgagtgaaatgcgccccgacttcctcatgaatgtgacaatatgtgcttgggtccaatgtagttgactccagtgacccatcagtggtgagccatctgtaagtgactccaagcttgccagctgtgcatcctcaatgctcttcaagacagtaaacacacggccacgcaacacatgttgcagctgatggtctcagacggcagacacatacgaagcatagcttggtatagacattggctagaggtgtctgtgagccgggagtgaccaggtgggtatcgttacactgtgttccggtgtggtgggcaagctc

SEQ ID NO: 656972 - DNA, 356 bp, Homo sapiens
gaccaactcgattgtgtgagcgtgggtcatactgtctaagtacgacttcatcgattacctacctattatcaatatggtgcttgaatatattcctataactgtagaacagtgtggaaagtgatggtaactttgaagtaggtcatgtatgattggctctggaataattgacactagtgtagtgttaatggtctttgcgtaaatgctaatggcttatccattggatctgcttctcttaacaagtctaagacgaatatgacctcattaaatgtgctgagatatttggaccagatacacatccagagattgaagcagtcccagctcatgggcttactgtgcaagccctgccgccttccgtg

SEQ ID NO: 656973 - DNA, 233 bp, Homo sapiens
tgaacgcgtagccccagtcataggatcacgaccgcgagtgaaccccgacgtacatcagccacccagcggaccgcatgcctcgccaccagtggctcgactttatggcagcatggtgtggcgagagctggctgcgctggtgatcgatcatgctgacaccccatcgcggcagaacggcgtccggcaagtgctaccactacatggccggcatgaaggctccaatctctaccacatct

SEQ ID NO: 656974 - DNA, 136 bp, Homo sapiens
gatggcgtaaccgaacttctgaagctcttgcacaacacatcccaggacttgtacacaaatctcgtatatgaagcatggttggctgcatcaagcatgcacactgcagtcaaccctatcatcacactcagcatgcaac

SEQ ID NO: 656975 - DNA, 290 bp, Homo sapiens
acgcagccatggctcgtggtcccaagaagcatctgaagcgggtggcagctccaaagcattggatgctggataaattgacccgtgtgtttgctcctcgtccatccaccggttccccacaagttggagagagttgttgccccctcattcattttgcctgaggaacagacttgaaggttgccctgacaggagttgagggaaagaggttgtgcatgcagggggttcattgaaaatttgtgtggcaagggcccacctgatagtagcccacccctggtgggttgacgggttgtata

SEQ ID NO: 656976 - DNA, 749 bp, Homo sapiens
  misc_feature (118)..(121): n is a, c, g, or t
  misc_feature (124)..(124): n is a, c, g, or t
  misc_feature (126)..(126): n is a, c, g, or t
  misc_feature (128)..(130): n is a, c, g, or t
  misc_feature (134)..(134): n is a, c, g, or t
  misc_feature (136)..(136): n is a, c, g, or t
  misc_feature (171)..(171): n is a, c, g, or t
  misc_feature (513)..(513): n is a, c, g, or t
  misc_feature (515)..(515): n is a, c, g, or t
  misc_feature (578)..(578): n is a, c, g, or t
  misc_feature (601)..(601): n is a, c, g, or t
  misc_feature (607)..(607): n is a, c, g, or t
  misc_feature (636)..(636): n is a, c, g, or t
cagttggtcaaggttgcagtgagctatgattataccactgcactccatcctgggtgacagagtgggaccctgtctcaaaatacaaatacaaatgaaatctcaagtcagaccagtcccnnnnagncnannnaggncnaaccacatagctgcatgatcgggtttgtgtggctntggatgaggagacccctgtccaattgttggctatgtaatcagtttatttttcaatatagtaatcaaatatatttcatcatacttgatggtctcagatatgtgtggattttggaattccccttggaacaggttgtaacatcttattggctccataattccataattttttaaatctgatcagtttttaataagatcagaattgatattagactacctaatcggttttgttaatgagaaaataaaattgtgttgtttgcattttatccaagatgggtgtcgtattggctaaatctcatcaatacttgaacaaatgcaaaattagagcttctttatcatgaaacncnatgtaattcttgaagaagatgccatttcttttttttctttttttttaagatagagtctttctnttgtcacccaggctggagtgcantggtgngattttggctcactgcaaccttcaccttntgggttcaagcaattctcctgcctcagcctcccgagtagctgggattacaggcgcccgccaccacacccagccaatttttgtatttttagtaaagatggggtttcaccatgtt

SEQ ID NO: 656977 - DNA, 231 bp, Homo sapiens
gtgcctgacagcgagctggggacaaaccaccccagcctttgagtagtcgtcacttggtagctttgtattcaccccttcccaggagggtggtttagagcagacccatgcattgagcttcctcgagctcgtactgcctctccagggataactcaggcaggctgaggtgctcctaggggctcagctgttagtgaataaactggggaccctgttgagaaccacttctcttcttct

SEQ ID NO: 656978 - DNA, 908 bp, Homo sapiens
  misc_feature (118)..(121): n is a, c, g, or t
  misc_feature (124)..(124): n is a, c, g, or t
  misc_feature (126)..(126): n is a, c, g, or t
  misc_feature (128)..(130): n is a, c, g, or t
  misc_feature (134)..(134): n is a, c, g, or t
  misc_feature (136)..(136): n is a, c, g, or t
  misc_feature (171)..(171): n is a, c, g, or t
  misc_feature (513)..(513): n is a, c, g, or t
  misc_feature (515)..(515): n is a, c, g, or t
  misc_feature (578)..(578): n is a, c, g, or t
  misc_feature (601)..(601): n is a, c, g, or t
  misc_feature (607)..(607): n is a, c, g, or t
  misc_feature (636)..(636): n is a, c, g, or t
  misc_feature (905)..(905): n is a, c, g, or t
cagttggtcaaggttgcagtgagctatgattataccactgcactccatcctgggtgacagagtgggaccctgtctcaaaatacaaatacaaatgaaatctcaagtcagaccagtcccnnnnagncnannnaggncnaaccacatagctgcatgatcgggtttgtgtggctntggatgaggagacccctgtccaattgttggctatgtaatcagtttatttttcaatatagtaatcaaatatatttcatcatacttgatggtctcagatatgtgtggattttggaattccccttggaacaggttgtaacatcttattggctccataattccataattttttaaatctgatcagtttttaataagatcagaattgatattagactacctaatcggttttgttaatgagaaaataaaattgtgttgtttgcattttatccaagatgggtgtcgtattggctaaatctcatcaatacttgaacaaatgcaaaattagagcttctttatcatgaaacncnatgtaattcttgaagaagatgccatttcttttttttctttttttttaagatagagtctttctnttgtcacccaggctggagtgcantggtgngattttggctcactgcaaccttcaccttntgggtgcctgtaatcccagctactcgggaggcagagaatcacttgaacccaaaaggcagacattgcagtgagccaggatcgcacccttgcacttcagcctgggcgaccgagactccgtctcaaaaaaaaaaaaaaaaaaaaaagccatgtgttgtggcatgcagctgtagtctcagttcctggggtggctgaggcgggaggattgtttaagcctgggaggtcgaagtttctgtaaactctactgccccagtgtactccagcataggcgntaa

SEQ ID NO: 656979 - DNA, 474 bp, Homo sapiens
gtcctcgccactgagatataataagaaggctaatgctctttttctgtcacctatagaccacgccctcttctattaaactcacatggtgagccacatatgtgagcgccgcttttacgcgccccacaaaaaacacatatacttaacacatttcacagaacacatatatcccacaagggagaataactcaccacattttgttataagagaagttgtaagaactatatgagactggaggtataacccacatgtaattccctctatcttttaactctttttttctgtgaacacatttaatgttctcacatgtaaatttgcacttaacttctggtggagattgtttctagtaactgtatattgggctttctttcgttaaataagagattattttcacatatactataattgtaaataattttgataaccaatagtttataactctagggatataaaaaccagattctgattccccttcca

SEQ ID NO: 656980 - DNA, 766 bp, Homo sapiens
gagacacttggggtctggacgcaacggaggcgggagcgtgaacgcccctccagccttcgagtcgtctggctcttcgagggcgagaagaagatcaccattaacaaggacaccaaggtaccaagtgcctgttatattcaccatcaacaaagaagaccacacatgggaaacatcattaaatcacagttgttgacctaaaggacccgcaagtgctattgctagctacaaagtccccccacccctgtggagcacaagatcatcatccgagtgcagaccaggcggacatacagcccccaggaagcctttacacaacgccatcaccgacctcatcagtgagctgtcccgtgctggaggagcgcttccggacgtgccatgcttccccttcgccttctgccgtgatggtcagtttccctgaggccctccccagccacactttctgtacagccgtgagaactgtgagtcaattaaacctcttttcctccaaaaaagacacaaacgacaccacacaaacaacaagcggttgtggggagcggcactcgacgccccgaaaaaaggcttataacaccccaccggtggacgccgccgccccaagagagggaaggcggaacgtggggcacgcgggggcccagagagagcacccgcggcacgcacacgggggggagcccaccaaataaaaaacccgcggggaacggacgtttggaacaaaccagaagggcccggaggcacacgggcactcaccgggcccggaaacagtaagcgccacgaggga

SEQ ID NO: 656981 - DNA, 1028 bp, Homo sapiens
gggccagcaaagcggcggcgcaagagtcccgccatggaccgatctcacccgaggacccccagttccagaatgctgcagcaatgtgtaccgcagatgcaccgctccgatgctgaacctgcgccagccatcttcgcatgccaacaatggacctgcttcaaccacttcatgcttgaccctcgaacaccgaaccataggagcactatacctggtggcattactaccaaagaacctggctgactggcaggacgtgatgctggcatgctggtggacattggaccaatgtccagggcgcgatggcaggccgcacctgggaagacggatgtaacacatggatgcagcaagatacaacgtcacaccagcagggatcgcagccagtgactgcacggtatggctctagcggacaccaggatcacaacacaccgcatacctggtagcacgagcacaggcatgtagatagcctacgagagtcaagcacaggcttctgagacaaagactgacagatctatacatagcacagacagtgatcacggaagacggatgcactgcacaaggaggataccacgagagcacagcacccatccacaggcacgatccaatcacacataagcgcactctgcgacgtgcatccagaacacatgagagcaacacacatccatgcgatgacgctgacaagcacattaaacgacaagtacctcatatcaagagagagatcacaccgacgatactaggatatagtacaaacaaaacaatagactgcgacactacacaataagacaaaaaaaccactagacaccagactgaaagcgcccagaagatccatacccatgaatacatcacatagaccataccaaagcagccacatgaaacccaaagccccagagcaacgaagccaattcacacagaaaagtgcaagagcagacacgggcccgaacacaggaagagaggacaaacatcccaacggacggcagccacaagggaaataccactatccatgcacatgttggacgaacagcaacacgaaggaacac

SEQ ID NO: 656982 - DNA, 192 bp, Homo sapiens
atctcgacctctacgcccacgtgtgtatacacatagcacaggttagtgagcgtgtatagtacctgtacctccagtgccgccccgagtgttaatgcctgccccttccttataagtgacttatctatcaagtgtgaggaccccaactacagtagccaaaatcagcttttccgcttgatcttggaacatgcataa

SEQ ID NO: 656983 - DNA, 1902 bp, Homo sapiens
  misc_feature (997)..(997): n is a, c, g, or t
gccgctaacactgatctgtagaaagcgtggttatactggtaccatgcactcggagaatggtcttcagaatgtaagatatggtgataagataatcgaggatggtgagtcgagaactcggaaactgaggagtaataggtcatctccgtatacgacgattgccctggctgatcggaacgacatcgaagtgtgaactgtggcgcatcgctacaagagctgatgatgctcactccacggtgcacagacaaatactgtcctatcagccctgccaagagctcgagggcacgctgaaatgacctggtttactatatgttggtactctactgcttgtgcttttctatctaggaggtgaacgattgccactttcgcactgttgaagaaatgtaggctacgtaggaaaccttggacgttgaaagaaccccttcgattggtgtgtagtgtttacggcgtgggggggacaacccaatcacagtgaagggggacataggctacttgtactccaatccgagcgcaatagattgcaaacgaaatgggaacgcaaagagtgtcgcgcttgcccaagacacttgctgggcttcctacatagacctactagtggcaggatagccggcatttcctgaagaaagttcaacatttacggaaccttcgttccattggggggggggtaggtagcagaccatacggcaatttcgccaagacgttgccgaataagcactttcggacctcaatccttcaccttgaatgtaaacagtggtcttggtgtcagcgcacgcacgttcacgaaaacaaccacgaagattctcatacaacacattgaaattaaccctgttgaaggagggtacattaagtaagttgtcaagagaagaaacaagtgactcgttggggcgtcatacatatgaacgttaccacgtaggatgggatgtccagatacagggattgatcgttagagatctacgggacacgtgattggaacctgaggactccaagagaaactaggacnccccgcaaaggcaacattggacaccagcgacaggaaacggcacgctcgcgacaaagagacgtaggactcgcacaagtggtccgcacaacggtgctacatagaacggcacagggctgcgacacacactagaggacacccgcgactaattcaacatcaacagaggaagcgacatccaggagaacaacagggaggaagcacagagagccaacaaggaaaagacacagaccacaaacgacagacacacgagacaagagtgggcacaggaaaccacaaatagaaacagggcagagaaagcatacagccacaacagacacccgaaaagatgagcgaggaagaagtcagacagaacagacaccacaaacaacgacaagggaacaaacaactatagaagagccaatgagcaccacgatgagcagaaaccaagacgaagtgacgcacaagacagcgagaaagcgcccagaacaataacaaaggtgactacgacgacaatagcacgactaaacatgcgtgaacaaacaatgaacgacacccagaggcagaacacacaccacaaggcaaacacaacatacagagacatataaacaagcagaagcaggtgaagaagcagagcaccagccagacacaagaaggaaacaagggaccacgaaaacacagcagagggagcacacggggagatagcaagcaggggagcagaagacgcacgacggcaacaggcacaagaacagaggagaaaagacaatagcagcgagcagcgagcacacaaacgtgaccgatgacaaggagcgcaacgccaacacacatagaacgatacaagcgacacaaaggacacacaacgacgacgcacaaggaaagcaacacagtaactcacaacaagacgaacacacaaggacaagacgcaagacaga

SEQ ID NO: 656984 - DNA, 220 bp, Homo sapiens
tgacggaatcgttcagctaactgaggaacatgattgtacctaagtcaaagataagtaatgcagtctctccatgagaacttcacatgtcatgatattatctagaggataaggatccattattttagaagagagagatcaacaactttgtatattattttttaaacaagtaatggaatctggcaagcagaccccactggcactaccttaagtacatggttgg

SEQ ID NO: 656985 - DNA, 839 bp, Homo sapiens
agcgggctgttcaagcctgggtcgttccgggagctgccgacggagcggagcgcccccggcgctgctgaagctggcgtcgctgccggcctcgtgccacgcaccgcgcacgacgctggagacaggaggagacgccggatgtgagcaccaccggcgggaagggtccgcgcgcacatggctggctcgctcgacgcccttgacccaccgactgtccgggaaacacgatggctcgccccaaacaggatttagcgtgaaaccagccgcaaggattccgggccaccacccaaccgagacccacgcggcgccgggggactgacttcgagtggaccgaggtcatgggatctcgccgagacgcacaggatctcagggacacctgattctgcagactggtctgcagagcccaagtcgcccgacaaagcgggcctgggccgagacgcaggtttcacagagcgcactcgcacagagtcgtatttgataactgcacggataaaagcttggcagggaagcgatatatcacgttcgtgactcacgacgttaaggtggcattatacgaacgtcgcgtaagaggccaagggaaagccgtgaaccacagtttatgcgcgcgcggcccaatgggatttccctcagtcccctaggaccctggagacgcccaggggtcgtccaaaggcggtgcgcagggccacactcgggaagaaacagggaccaccagggctacacaaacagagaaacaggaaggagcttctcccggggcacctgaacgcatggatagggcaagcctgaggcagccagagaagggttcagcgcccaggggagggtgaccccatgggcatggggttgacgag

SEQ ID NO: 656986 - DNA, 122 bp, Homo sapiens
acaaaaacattcctgttatcgaggctgctcgaaacccacacaaataccgaatgctcatcgcaatggtggatctgatctatgctgatgtggcccagccagaccagaaccggattgtggccctg

SEQ ID NO: 656987 - DNA, 176 bp, Homo sapiens
acgaaaggcgatcctggatgagcaaggacgcgggggagcatagatgatccgatccgcgccgacgcgctgttccgtgctgctgctggtgctgtgtgctagtgttctgggcgtcgctgaggtcgaggcagccctgcgagcaggacgagatccagcgcctccccgggctggccaagcag

SEQ ID NO: 656988 - DNA, 148 bp, Homo sapiens
ggacttgcatgggttgtactctgcgagcagtcagtatatttacgctggtagcaaccacgctgtcaagtcaggtcagagcaatgccagcagacaccagctccacgaacacatccagcctgggagatcatcatcgcacagcctcagcagg

SEQ ID NO: 656989 - DNA, 246 bp, Homo sapiens
  misc_feature (146)..(146): n is a, c, g, or t
atatgtcaccaatctgccaagaaacagcctctattggtgtgcatgtggaatttgaagccacactcacctttttgcatctctgtctcccccatcaacattgcatccccaatactcataggaagggttggggaaatacacaagctatnaggaagaaatgtagatcccactgaagatattggacagaagatcaaagtttttatatctatatctaggtacgttttttccacagtacggggtaccgagctc

SEQ ID NO: 656990 - DNA, 617 bp, Homo sapiens
agcgggcggggctgctggcggcggcggcggcggcagcggcggactccggcccctagatcagacattctctctcattacccggcgcgtgggaacgggtccacaggccaccttggtccgccctagaacccccatgggctgacgaccgccgccgagtcggatgacaccacaggacacggtcagagataagcgcagcacccttcactgacacttgctcacatctcttacctccttgtacatttgtccctgttctctgtccctctacataccactcatgcccatactctgtccccttgacttagcccaggccactgctactatactcgcatccctaatttctgcactcttgtactgtctactcctaattcctatatatccttgtagcatcacataatacctgtacacgcttgtcccattcttcctcgaatctaccatcacctaagatccatcatgaccctaaatctctggatccccataatggaccaatacgcttaccattttgctctggatgtaatcgtattaccacaccgttcatctcgcagcaagctggcacgatagaatgcaacgcccaattactggagttccgcattctgaagacctagacaccaatacacgacgac

SEQ ID NO: 656991 - DNA, 304 bp, Homo sapiens
ggaagcttttggggggcccctttgcaaggggcaaaattccttgccccagcagggtgccccaccaagatagcaaaagttggaaaagagccggctggaaaacatatcccctgggtggaaaacccctccccttgaagatcgagaaccaggccttttgggtcccccataccggttatgtcagggtaggacccttcctgtttacaggagactatgaaacccctgccccgtcctcccttggggctgcccccattttaggccccagcccccccccccccgggggctctttaaaacggcatgttgctcccca

SEQ ID NO: 656992 - DNA, 100 bp, Homo sapiens
gagccatggccgccgagccctcctgctcctgcttctgtcttttcttgcggcctcgggcaccataggccttccgcccggccttaagggcccttgcaggcta

SEQ ID NO: 656993 - DNA, 648 bp, Homo sapiens
  misc_feature (36)..(36): n is a, c, g, or t
  misc_feature (97)..(97): n is a, c, g, or t
  misc_feature (99)..(99): n is a, c, g, or t
  misc_feature (103)..(103): n is a, c, g, or t
  misc_feature (108)..(108): n is a, c, g, or t
  misc_feature (113)..(113): n is a, c, g, or t
  misc_feature (115)..(115): n is a, c, g, or t
  misc_feature (132)..(132): n is a, c, g, or t
  misc_feature (139)..(139): n is a, c, g, or t
  misc_feature (173)..(174): n is a, c, g, or t
  misc_feature (197)..(197): n is a, c, g, or t
  misc_feature (201)..(201): n is a, c, g, or t
  misc_feature (204)..(204): n is a, c, g, or t
  misc_feature (206)..(206): n is a, c, g, or t
  misc_feature (216)..(216): n is a, c, g, or t
  misc_feature (218)..(218): n is a, c, g, or t
  misc_feature (225)..(225): n is a, c, g, or t
  misc_feature (231)..(231): n is a, c, g, or t
  misc_feature (233)..(233): n is a, c, g, or t
  misc_feature (238)..(238): n is a, c, g, or t
  misc_feature (262)..(262): n is a, c, g, or t
  misc_feature (296)..(296): n is a, c, g, or t
  misc_feature (303)..(304): n is a, c, g, or t
  misc_feature (332)..(332): n is a, c, g, or t
  misc_feature (336)..(336): n is a, c, g, or t
  misc_feature (341)..(341): n is a, c, g, or t
  misc_feature (351)..(351): n is a, c, g, or t
  misc_feature (353)..(353): n is a, c, g, or t
  misc_feature (386)..(386): n is a, c, g, or t
  misc_feature (394)..(394): n is a, c, g, or t
  misc_feature (399)..(399): n is a, c, g, or t
  misc_feature (402)..(402): n is a, c, g, or t
  misc_feature (411)..(411): n is a, c, g, or t
  misc_feature (413)..(413): n is a, c, g, or t
  misc_feature (415)..(415): n is a, c, g, or t
  misc_feature (453)..(453): n is a, c, g, or t
  misc_feature (471)..(471): n is a, c, g, or t
  misc_feature (502)..(502): n is a, c, g, or t
  misc_feature (648)..(648): n is a, c, g, or t
tactgctgaagaccaaatcccttgccactctttcgnttgctactaattcaaacgcaaacaaaaacaggaaaaaacaacaggagcacaaaagccagcntntccntttcnttatncnatggagccaggtgccanaagtggnctggtccatctccctcctcagcctctgccaaaannctgctccaatactcccctcattngaantantnaaccaggcgntntaaaacnaaccanantccantaaagttgaccaccctaccgaganaaaccaaggctcacaggtgaaaacccctttcaanaaaattnnttccaggtaggaatcaaaatattatgcntttnccatnttccgggttntnctccatgggacattagggacacttcagctttcntccattanttatnttntttattgcntntngggagataacatggccacaaatgagctttatgggaggnttggaatctgacgtctgntggcggaggatggggcaagcgaacacggagngttaccagcacttcatgcctagttcaatctcaatcggtaactcgtccttgtgattccagaccccagtgcactgccgctgctcaatcacagccttgatgttcatcaacacaggcagcgccacacagccagaggcaaagctgacgctn

SEQ ID NO: 656994 - DNA, 240 bp, Homo sapiens
ggggggggggggcccccccccctttttttgcccctttttgggggccccttttttttttaagcccccggttttttttttggccccttccccttttttggggccccttcccttttttgggcccccttccctttttttacccttgcgccgggccggggccccccccccctccccccccccaattgtgggggggggggggtttttttttttggggggggcccttttttaggggggtgggattta

SEQ ID NO: 656995 - DNA, 215 bp, Homo sapiens
  misc_feature (19)..(19): n is a, c, g, or t
gatctagaggatcccttgntggagacgggggtctcactatgtacccaggtgggtctcgaattcctgggctcaagtaattctcccaccagggtcccccgaaacactggaatcacaggtgagagccaccacacccagccctccttttctttctttctgttttttttttggtttgggtggtagagtggtggatggtttttgggaaatgggagtctaac

SEQ ID NO: 656996 - DNA, 737 bp, Homo sapiens
ggcagtgctcagccaggagtctctagacagcctctccccaggcgattgcagttactgtggtggccgaggaagatgcaagactggaccgatagagctgggggaacgtcagggcgttctggctagcttttgtgtcccgacaccagaagggtcccccatcccaccaggcctgctccgttggagcccagctcaccttttggtgctaaggtgctggggagtcagggaagagcaccatcgtcaaggcagatgaagatcagtccacgaggatggctactccgaggaggaatgccggcagtaccgggcggttgtctacagcagaggccatccagtccatcatggccagtggatcaaaggcatgggcaaccgtgcagcatcgactttgcgcgaaccctcctagagcggacgaggccagggctagctatttgcactgattctgcttcgccggaggagcaatggcgtgctccctgatgacctgtgccggcgtcgatccggatgggctctggggctgaccatgtgtgtgcaggccctgctttggccgctcaaggggaataccgagactcgaagcgacgtccagctgccttactagcctgacacgaaactgggagcgtatctgctacagcagtggacttacgattctcccacagcagcaagcatgttgctaatcggaaccccgcggtcaagagaacccaacgggggcactcgtgggagaacgaccactatcagcctttcaaggcaaccta

SEQ ID NO: 656997 - DNA, 1167 bp, Homo sapiens
  misc_feature (432)..(432): n is a, c, g, or t
  misc_feature (439)..(439): n is a, c, g, or t
ctttataggaagaaaatatgggaattggattacacatagatgatgatgtttatttaaaaaaaaaacaacagcaacaaaaatcctagcctccagttgccttttcctttctttagctcctgtttttggtgaattgctaaactgattgactttcagcctgtttaggcgtagatcctgagaggctatttgtcttacgagatataccaacatcctgaaagttaaagaaaaaagtctaatgtatgaatgtgacgtcaccgaatttttatcaactaattcctgtttattttatgtagaagggcagtactaggggattaagcgaggacttctgtttacaatggtaaatctgaaatggaagaaacagtctttaagccttgtgtgtctgtgatctcctctgtcttaatccacgctcaggctaaagatgggataatgtgaaanggcagtngtcccgaggcgtgggtgggggtgcttctgtgcctcacgggtccctggtgcaagatgtccctaggctaacgtagcatggggtggggggctaggggaccagggctgggcctgatccacctacctggtaactccagatattattgccaagttggagacctaaaagtaattctcttgtattttggagatgaatgaacaaagtcgattcacctgggagggattctaaagcaaagcatgacgactaagtattacctcgcctcttgccagaactcctactgtcctcacctcatcgcatcactgtaaaagtattacgtcgtgcattaaagaccagagaggacttgcttttacccagggaggggacattgcccccaatcctgtggtctgggcagtttgccttggttggatgtttcggggccttttttccaccatgggaatttctcaactctaggtctaaggcagtgaacactgggcaaccctctcggttccgaagatttcccttcggacgggccaggaaggatcttaagggcctgggtgtgcggactgcagtcctatggtggacgggcccactctgctgttctcaaaggggcattcaaacacgaaccggttaagccttcagcccttttgcaacaacagggggctaatcccgatagacaaaggggccttcggaagagtacacacacaaagtctcaaccatcacagcaacgacacataaaatttcgtacccaatacaag

SEQ ID NO: 656998 - DNA, 311 bp, Homo sapiens
tcccccatctagcttacaactcaaagcgacctggcggtgcttcagtatcctctagaggggcagctccgccgcgcacggagagctgcccctcttgtacgcccctgctttctaagctccaccctgtggctggggaaaggaaagtaagagaccacagggacaatttcaagccccccagtctccacagggagctacgttctccctggctacctgcctggctttctctctcctgggctaagagctgaggagatctgcggcgctcagtcctggacctgaagtattctaaaaccctgctctgtggctgtctccagagc

SEQ ID NO: 656999 - DNA, 406 bp, Homo sapiens
caacggaactcggaaaaacttaggcccgcagtgattaccaaagaacctcagcatctagacatcaccagtattataggcaccgcctgaaaagtgacacatgtttcactgtgccgcggaaccctaattcgatgcaaggtagcataatcacttgtaccttactacagggacctgtctaaatggctccacgagagtactgctgtctcttacttataaacctagagaaattgaactgcccgtgaagaaggcaggcatgacaacagcaagacgagaagaccctctggagctttcacttaataaatgccaacagtacctaacaaacccacaggtcctaaactcccaaagctgcattcgaaattacggttggggcgacctcagagcagaaaccaacctccgagcagtaaatgct

SEQ ID NO: 657000 - DNA, 146 bp, Homo sapiens
  misc_feature (23)..(23): n is a, c, g, or t
gagtaggtactaattgttatctncatttcacagaagagcaagtcaggcctccgagcactaagtgacttggctgaggtcaaactgcctgcgagttttatctaattagtgacagagagaacctaatgtgtcgcagcatagaatgtcag

SEQ ID NO: 657001 - DNA, 526 bp, Homo sapiens
  misc_feature (432)..(432): n is a, c, g, or t
  misc_feature (439)..(439): n is a, c, g, or t
  misc_feature (483)..(483): n is a, c, g, or t
ctttataggaagaaaatatgggaattggattacacatagatgatgatgtttatttaaaaaaaaaacaacagcaacaaaaatcctagcctccagttgccttttcctttctttagctcctgtttttggtgaattgctaaactgattgactttcagcctgtttaggcgtagatcctgagaggctatttgtcttacgagatataccaacatcctgaaagttaaagaaaaaagtctaatgtatgaatgtgacgtcaccgaatttttatcaactaattcctgtttattttatgtagaagggcagtactaggggattaagcgaggacttctgtttacaatggtaaatctgaaatggaagaaacagtctttaagccttgtgtgtctgtgatctcctctgtcttaatccacgctcaggctaaagatgggataatgtgaaanggcagtngtcccgaggcgtgggtgggggtgcttctgtgccacggtccggcnaacgtccctaggctaagaagggtatgctctgatcggatcctta

SEQ ID NO: 657002 - DNA, 135 bp, Homo sapiens
ctactagacccactcgaacttgccagtactcccagtatcgcagacccagctctgatttgtgaagaaagatccccagacgtgtctatgaactctttggctctctccaggcaggtggtggagaagtgcgcctgggtg

SEQ ID NO: 657003 - DNA, 101 bp, Homo sapiens
aagctgtgcgtggtcgtctagaggtcccgaggtggacacggggagagctgggacacgggctacttctaggtacgaccacatctacaacgttatcgtcacag

SEQ ID NO: 657004 - DNA, 946 bp, Homo sapiens
  misc_feature (653)..(653): n is a, c, g, or t
  misc_feature (716)..(716): n is a, c, g, or t
  misc_feature (721)..(721): n is a, c, g, or t
  misc_feature (726)..(727): n is a, c, g, or t
  misc_feature (731)..(731): n is a, c, g, or t
  misc_feature (752)..(753): n is a, c, g, or t
gtggaggtcaggatgtgtctcatgctgctcatgttaagactattaacacatgatttgagaaataagtttactctagaaatgcatatgtagtcctgaccatcactagctgagagcagactattgatttccagctgtagatgtttcgcactagccatgttcgtgttgacggtcgtagttcacctgtatggaattctaccgaatcagcaagatctgattctgcaggacattaatggtaaaactagatcatcctttctaacagacgagttcatgtgatcctgtgacgggcctttgcactaggtcggaatgcagtatgtgccgtacgacatgaagtttttgaaatttcattcgatcccagatgtggtacaagtatttggccaaagctcattatcgctatgtgtcaccgctggcctgctcctggatgatgtgcctgatcagtcgtcagcagttgttgaacagggctattctttttacaaggtgtgaagtgtggctcttcggcttcgtctttgccatggcattaagagagaaagttccctgtcttctttcaatattagttatttcaaatgaatatgtgctacttaaaagcttgtttggttgtctttgtatataatttgccttggatttattgtgcacagtttgttgagttgtatgttttngtgaattatcaggagtaaatttgacaagtacatgtgaataactcctgtaaatgaattttatancaaanatgtnntganctattttttaaagttgtgcannttagcaatttctcgctatagctttgacttttctatgctgtgaattaatagctgcgatttggcaaacagtcctgttgtctttgttaaaccctaatttttaagaggtaatggcagttttttagcagaaacaagaagatggacatggattaaaggttatgtattataaagtaaaaaacaaggtaataacatcaaaa

SEQ ID NO: 657005 - DNA, 107 bp, Homo sapiens
tcgagctcggtaccggtgttttcgatgccccagatcttctgtgggcatgagtgtggctggtggcatctctggcacggtggctgctgtgctgactcttccctttgact

SEQ ID NO: 657006 - DNA, 261 bp, Homo sapiens
acggactccccttgccttgtaccgggggggggacgacgccgcaagacagcttccagagtgaccacagttcttttgttcttttcttttcttttcttttcttttctttggagacagagtctcgtcctgtcgcccaggctggagtgcagtggcccaatctcggctcactgcaaggctccgcctctcgggttcgtgccattttcctgcctcagcctcgcaagtagctgggcactacagtcgcctgccaccatgcccggtcacatg

SEQ ID NO: 657007 - DNA, 248 bp, Homo sapiens
tacaatttctacaccgactgtttaattgggacagagtgtcagttttgcaaggtgaagagttcggtggatggatggtggtgagggttgcaagacactgtgaatgtgcgtatatgtgccacagtaactgtatgctgaatacagtaaacatggtacatgtagtgttgatgtatatttaagcacaatttatattttaattttattgttttgattttaccttacgttctgggatacatgtgtgtgaaatagaa

SEQ ID NO: 657008 - DNA, 332 bp, Homo sapiens
ttagagatctcgggagcttaccttggtacagacagtactagtcatggctgttaggaacaggctgcacagaggaggtgagtggctggtgagcagtgaagctgtcagtgttatagccactccctattgcttgcattacctgctgaacttctcatgtccgatcagcagagacattagatcctcacagaagcatgaaccctattgtgaactgcgtgtgcaagggatctagattgtacgctcctcatgagaatctaatgcctgatgatctgtcactgtctcccatcacccctagatgggaccatctagttgaaggaaaacaagctcagggctcccgg

SEQ ID NO: 657009 - DNA, 225 bp, Homo sapiens
tgtctcactaactgtaaattttctgagatagggctcactctgtagcccagactagaatgcagcagtgtgatgtcaggtcactgcagcctccattcttccagggaccacagtccaaaatacaccatggctgggctattttttttggagaccagcatattaagggtaaccgagcttggaatttcgtacatcattggtccataagctagttttccctggtgttgacac

SEQ ID NO: 657010 - DNA, 479 bp, Homo sapiens
cttaagaagcatcctgagtcaagtgattctcctgcctcagcctcctgagtagctgggattacaggcatgcgcaccacgcccagctaattttgtattttaggtagagatggggtttctccatgttggccatgctggtctccaactcctgacctcagctgatccgcccgcctcggcctcccaatgtgctggaattacaggcgtgagccactgcgcccagcccattttattgatacacattcaagtttaacacttacgaatttaaggactttatgccttggaagcagtacatgacacctgagacaacttttcaaaactatcaactgaatcatctttcattatctcagatatgcctaacctcagtctcttctttttttcttttggtctgagcacggaatttcgctcgtagcccaggtgggagtgcaatggcgtgatctaggctcaccacaacctctgcctcccgggttcacgtgattcttttg

SEQ ID NO: 657011 - DNA, 1456 bp, Homo sapiens
ggaggcattgagtgcagccagctgcaggggcttctgctgagggggcaggctggagtttgaggaaaccgcagataagttatattctctttgaacagatagagattaatacaattacttaaacacatatagtcaataggtatactaagatatgtgcttagctgtacgtttaaagcgtaaattttaatacgcttaaagatttacggacgaccactattgaagactttagaagatgtacgctctgacggaacggaaagcgatacacagcgtgtcctaaacaccattgactgagacggttcgacgcattgcaagcctgtcttccacttggcagttaccaccactgttgtattttaacaaacgaacaactttggacgcagaaaacgggactacaagaagcccccgaaatataagtacccaatagaaaggggccaagttggttttgaggatttacaaacttggaggcggttgacttttaaaacatggcttaacagcggtgtgacgtctcaaacactgtttggacaggggtagattaacaacaatgaactttgtggacagcggcgattcctttttaaacaacaggcacgatttcaaacgcggaagcgttgactataacaaaaaggagctcttttgaatattttcctaatgttggagcgggctaggggggagatcatcttggggcggtccacattgtaaagagagggccattaggtttgagcgggccattttaacttaaaatagtggccgagcgaactggaaaactgtgcgagacaggattttaccttttgggatcaatgcttggtatagtgaagttgaaacacccaagcttgtgggacgaacagtattagacaggtttcggaaatggtgtggcacacacaacgtgggagaagtcacgagaacatgttccggggtaaagtgtcgcacaatcaacaaggcaattggacacgcacgccttagcggcaaccctttcgcacacgcacttcacgaacagcattcacttttgtgagcaaagccacaacacgtatatacattttatcagtctgtgaagatcaccatcataactgcataagacgtacaacaacacctgttgttacggtcatcacctgctcctcgagacgaacgttctaagcaacccatgtgatgacggcgcggcgcccacgtaatgaactcgaacactcgcgcatacgcgtccacaagacacacacgttcgccacgaatgtttgtgattcaccaataaaaacaccggtggacaacggcttgtaacaccacgagttgggccctatggacaacaggacctttagcacatcatcacgaccagcgtgctggtaacagcatgactaagtaatgtgcatgacagcagttcactgccacataactcgacagttctattcacgtccatgccactcaagactgcaccgtgactcacctcgtccagtcacattgcatgatgtgactctgcgac

SEQ ID NO: 657012 - DNA, 191 bp, Homo sapiens
ctggaaaaaatttttagggaagggaaaaaactttggatttcccccctttgaaagggtatcattttagcccctttttaggggggcagattcatcaaacccccatttaaaaaagtttaatttaagtcttttaaagccttttaaagaacgatttttttctatttggtggcaaaaaaaattttggttggtttgga

SEQ ID NO: 657013 - DNA, 261 bp, Homo sapiens
tacgatcgcgacagcgcgacatcgtgcctctgcagatcaaagtgcagcgcgagcagagccagcgccagagcgacaaggaacaaccggacacgctctggaagatcgaactggctttcgatatccagcctctgggccccttgcaggtccaggcacagctgctgcgcggcagcctgtccagccagctgtgggccgaacgcggcgaaaccgccgagctgatcgccggcgaactcgaacatctgcgcgaacgcctgcaggccgccg

SEQ ID NO: 657014 - DNA, 259 bp, Homo sapiens
cagaagaagaagaaggcacaggaggatctctaaagcagtcgccaaacaccactttgtcaaaagactcttccatcagacatgggaaaaccatcgcggcggactaggacccatatgggaattattacctcctcagggccgagaggccagaatggatataatctgaatcctgttcaattttctctaaactgctacttagctgcactgtttaatggaaataccaggaccagtttatataggtggtttatgggaacaattatat

SEQ ID NO: 657015 - DNA, 82 bp, Homo sapiens
  misc_feature (35)..(35): n is a, c, g, or t
  misc_feature (69)..(69): n is a, c, g, or t
  misc_feature (71)..(71): n is a, c, g, or t
  misc_feature (81)..(81): n is a, c, g, or t
cctaaatgcttactttttaagcatttacatttaanaggtgaacatatatatagaccacttatactttanancccaaatcana

SEQ ID NO: 657016 - DNA, 339 bp, Homo sapiens
gcccccccctttttttttttaaatgggggcccgcaacttttttaacaaagattttacttccgggggaatcccaaaaaaagggtttgggccttttttttggggggggtttgctatttttaaacttgggccaaggcccaatgtgggggggtagaggggattttgttccttccccccgcccctttaggggagggaagaaaggttcatttttaaggtggggggccagaggggggggggtttaggggagggaatccgggaagttcaaatttaagattgggggggggggggccattgggatgggccttttcccgggtcaaaaaaagaaaaaagcctttttaacca

SEQ ID NO: 657017 - DNA, 239 bp, Homo sapiens
cgcaccatcctactttctgactactctgggaacctcatacaagaggaatcatacaatattgtgtcctttcgtgactggcctgtttcagcgcaacgtattcaaagttcatccatgttgtaacctgtcaggatttccttcagcatcttaaaaatataatttgaatatagtttttttttttttttccaggaacccaccatattttacaacccattacaaagttccatacaattctgccacat

SEQ ID NO: 657018 - DNA, 413 bp, Homo sapiens
  misc_feature (153)..(153): n is a, c, g, or t
gaaaagccgtcttagcatggttcctcatccgcctccttgcccgccggcagatcgctctccgcgcgcgcgcctcctccgccggcgcggactccggcagctttatcgccagagtccctgaactctcgcttgcttttgaattcccactgcatcgangatcaccggtcgtggcccacaccatgtcaagacgccagcccgtaagacagccaagcgtccgaaaattcagccaggcagaggaacttaacacggacgaacgaacgcgaacgcttgtgggacagaaggcaggacaaatggacagagacgccccatgctaaaacgggcaatggcttacatgcacggaacaattggcggaacgcagcgcaggcttgaacaattgcacggtaagaccgaaagcaaagaagcgccagacaggttag

SEQ ID NO: 657019 - DNA, 366 bp, Homo sapiens
  misc_feature (355)..(355): n is a, c, g, or t
atgagcactgtgccggcccatgttaaccatttttaagtgtatagttcagtattgttaagtacttgacattgttgtaaagaactcttaatcttgcaaaactgaaactaaacccactaaacaacagctcctcatccccactcttccagcctctggaaccaccactctactttctgtctctctgaattcatctactctaggtccctcatgtacatggaattaatattcatatttaaagttagctttcctaataatatagtatctttgggtaatataaactcagcttcttacaataaaatatataggttgggagtatattttataggttttgttaaactaaagaaaaacaggaagggtnggaactcctta

SEQ ID NO: 657020 - DNA, 857 bp, Homo sapiens
  misc_feature (386)..(386): n is a, c, g, or t
atgtttttggtttgtctgtcgccgcgcatttttttgtccttgtgtctccgatctctttccctctcgctggtggttgagcagctcactctgcataaggatggcgtcgcgtttcgtttaataccacagcgtggtggccgctcacagcacctctcgtcttctaaatgcggtaggtggaggcgcgccccactgcgtgctcgtcggttgttggtcgtcatcagcgtgcgtgatcttgccgcttctcctgtctgcgtcttcagcgcctcgtcaccgcacgcgcacagccacctaatctttctggttttgctttcttattaattctttctggtcggagagaatagataatgttgcgctgggccgcgccccgaagatgagatttgttcgcgcgncgttttctccctcactagtgcgttgcgtgccggtcttctctgctcttctggctgggagatagatcaccaccacatttattttgcgggctctcgctattttttctctctcttttggaattttttgcgtgcgcacctcagaagacgcactcgctttgggtacacaacatctctggttgttgatccacccaccacgatgatgttttcttcttcatactcctcccagccgcctcgtaggggcggtgttcttattgtggggctcgccccatatttatgatgttggtttctccccctgtggaagcacggagggttctggtggttagttgtggaaatgaagttagaggattctgccatcccgagaggccttccccccgcgtccccccctatttttgaaacccccccccgcggttcgccttttttaaagagggggttttttttttttttttttttccccttttttttagggggttttta

SEQ ID NO: 657021 - DNA, 577 bp, Homo sapiens
  misc_feature (430)..(430): n is a, c, g, or t
ctgaagtgctcctgctccagctccaggcagctctacacagagagggaaacactcatggtttggggggaagtaaaggaaaagtctgtacctggtaatctagagaattcttcctgatcttatccaagacaacttagccagtacctctataagactacaaaagccacaacattattgagattggagtaccccctaatgaagatacagctgcagtgaccaaggacttagatcataacacccaagtcccctcaaatacctggaatgccttcccaagaaggatgggtagcccagaacgtgaagactacaataaaatacctaactgttcaatacctagacaatgatgaacatccacaagcatccaagcatccacagcatttccatccaggacaacatgacctcaccaaagagaaatgtgcaacctttcagacagatnattcaaaacagttgttttgtggaaactcaaagaaattcaagataacacagagaaggaattaagaatcctaccagaaaaatttaatgaacagactgaaaaaagttaaaagaacaagcggaaatctgggagcaggagcacttcaggggt

SEQ ID NO: 657022 - DNA, 151 bp, Homo sapiens
gggttgctgggtgatctacaggatctcgggtgttctatcaggcagcattgaagtcaggtggttcgggacgggcaggaagagagactagggtggtgtcacaggctgatacagaatggagactggacttccagaacctggtgatgctggaaca

SEQ ID NO: 657023 - DNA, 259 bp, Homo sapiens
aaggtaaaattttggggggtaaaaattatgtgaaacataaaaatttaataatttctgtcccccccaggggagccgcttgtccccaaaaaaagtaatttcttttttttgctttaaggaaaattaaaaaaaaatagggaaaaggggggaactttttttaaaaatgaaacctttgttcccttaatgtctaattataaaattttaacccctccggccttttttttgttcccccaaatgtattaaaccttccgttttactggta

SEQ ID NO: 657024 - DNA, 610 bp, Homo sapiens
gtgacactctgtctcagatacacctagctccgctgtttgtcaaccctacgctggattgggcgctggggacgatgctgggcgagcagttccctgagctgtgcagctcaccctgcccacctgtggaagtcacaattgaggagccaggtaccatggatatgggcaagcatatgtcgaatgagtactacatgcgctatgacactgcataggccggcttcagtgacgatgatgaagatgtcaacagcagaggaatgaagagtacgtgtcgtatgcaccctgtcaagcagactgatctggaggactccgttgatatcactccttaccttggccagttggatgagtacctgacgcacatagcacttcaattccagttggccagtcataccgaagctcgagctaagtcctacacgaaatcgtggccaagatgtgcaggacgactttactaggatgagctggccgtctggttcctgcttactggtgctctttagcccagtttcaggtcaggcctgctgaagaggttacggaggcctcttgaccgaatcgcctaaagcatcgcacttttacggccccacctagatcctgcagacttcggaactctcttttctcccttttc

SEQ ID NO: 657025 - DNA, 1318 bp, Homo sapiens
acacacaacacaaacaaaccacggacaggaacgaggcccggcgcggttaacgggacgccgacatcgcatcacctagcgtgactctagatagtcgactataaaagtaggcataggtattatagtacgagacgtatacatatactatagacacacttgtcttataaatctaggcctgtataccggtgtccgaggcgaactcagtaagatgatgttaagaggaaacctagaagcaacgtgcgcatagagaaaaaccacggaccgacttacgcgccctggagtccgcggtgggcgagagcgagccggacggaccgcggccagccatggcagctcgctctatgccggggagccggcaccgaaccgcgacacagacgcctccagaggaccacccggacgaggagatggggttcacctatcgacatacaagagttacctacaagccgggcgagaagacgtacacgacagaagctgccgactactatcagctgggaaatctgcccaccgacatcacggaaggaggcacttacaagagagctctttaccgacacagactctggcgagccccagccgcacgtctatcatcaaacacgggacacgcagcgcataacaggcatacatccagcataggacaatccagaaccactgactgaaatagcgaaaaggcagaagcatcggacgcgcaccactcatctcaaaagagcagaaacctactaccgggatactcgactatacgcctaacacataggaacgcagcccttgaacatgtccaagcaacactcaactaccaagacagctctacacaacagaagccggatcagcaaccaacgcaattcaacctcaaccaccgagacacccaagacgccaccaaccagccggctcgctagcgcagcggcaaatccactacgagcgagcacaacgcctacacaggaaacaacgctgccgccacaaccacgccaccccacacagccactccgtgccaccacacacacggcctccggaaacacaacacggcgcagaacggcaggacaatgaccctggactacaccaacgcacacaacagatagccaagctatattgtggctgtgtacccacatgggataacacacatatggaatgatatgaaacattggagttgatcacagaaataaacaaatgaactgcaaaacaaactatactacaaatttatattctggcacctcaacacaaactccgacgactagatgagctacacaatgatgacaattaaaactatgaaataacataattacacaagacaaggcataataatcacattgtacaatacgaacatgatacgcctaca

SEQ ID NO: 657026 - DNA, 139 bp, Homo sapiens
caggagaatcgcttggacttgggaggcggaggttgcagtgagcagagatcatgccactgcactccagcctgggcgacgagtgatattgtcactgtctcccccttgctaacctcctaggggcttagatatatccagagta

SEQ ID NO: 657027 - DNA, 168 bp, Homo sapiens
ccagagcattccttctattacaggctgaagatagcattggtaaaaggtaatgctataatagtatttccctcttctcaataaatgtgcaaaactggggaatctggtgctgatctgcagcatacttgaaaaacacagggaaaaacgtggatgttccaagccagccttaca

SEQ ID NO: 657028 - DNA, 176 bp, Homo sapiens
aagtctgaaggtcattctagcaaatataagcatttacacacttttaagatgtgtacaattttagtaactactcacattatagacttgtacaggtatatgtctatcattttagaaataatgagatttttcttttttcttttttttcttttttttttttttgtgatatttaaaaaaaa

SEQ ID NO: 657029 - DNA, 206 bp, Homo sapiens
acattgctcgcgcaccgagtgtcctcagtatctccggaccccgggtgcacgacgctctggttcaacagagttggatatcaacactgatggtgcagttaacattccaggagttcctcattctggatgataaagatgggcgtggcagcccacaaaaaaagccatggaagaaagccacaaagagtagctaagattatatgccactccag

SEQ ID NO: 657030 - DNA, 407 bp, Homo sapiens
  misc_feature (3)..(3): n is a, c, g, or t
  misc_feature (71)..(71): n is a, c, g, or t
  misc_feature (95)..(95): n is a, c, g, or t
  misc_feature (116)..(116): n is a, c, g, or t
  misc_feature (119)..(119): n is a, c, g, or t
  misc_feature (123)..(123): n is a, c, g, or t
  misc_feature (134)..(134): n is a, c, g, or t
  misc_feature (164)..(164): n is a, c, g, or t
  misc_feature (175)..(175): n is a, c, g, or t
  misc_feature (192)..(192): n is a, c, g, or t
  misc_feature (238)..(238): n is a, c, g, or t
  misc_feature (242)..(242): n is a, c, g, or t
  misc_feature (248)..(248): n is a, c, g, or t
  misc_feature (259)..(259): n is a, c, g, or t
  misc_feature (264)..(264): n is a, c, g, or t
  misc_feature (272)..(272): n is a, c, g, or t
  misc_feature (283)..(283): n is a, c, g, or t
  misc_feature (294)..(294): n is a, c, g, or t
  misc_feature (314)..(314): n is a, c, g, or t
  misc_feature (326)..(326): n is a, c, g, or t
  misc_feature (332)..(332): n is a, c, g, or t
  misc_feature (340)..(340): n is a, c, g, or t
  misc_feature (344)..(345): n is a, c, g, or t
  misc_feature (351)..(351): n is a, c, g, or t
  misc_feature (353)..(353): n is a, c, g, or t
  misc_feature (358)..(358): n is a, c, g, or t
  misc_feature (369)..(369): n is a, c, g, or t
  misc_feature (391)..(391): n is a, c, g, or t
  misc_feature (396)..(396): n is a, c, g, or t
ttngggtatataccacaagtaagggggggtgggaaagtccctccatcattggatttccttaaaaaagcgantcccagggtgtgcaattaatccangaccacatacaaggatccatnganctanataaggtaaantctctcaggtaacggtaaaatttggaggtnggataaaaaantactccaggggtcctantctgaccacgtccttaacggatctgtggccctgggcttgggggtcngggnaagaangagggagaaanggtcnagggaganggatagggggntgagaggagtncccttagaagttggagcccntggggtgggganttttcntcccccantcanngaagcngnagtangagcaattcanggtcacattaacagtaatctcngggtnagccacactaa

SEQ ID NO: 657031 - DNA, 181 bp, Homo sapiens
ttctactgttgactatctttttgcatagctgtgagatgcgctactcgatttcccagccaaccacagaaactactattgccagtgtaagccatcttgtcagaacttaaattaacacagtgattctaagtcagcaactttctcatactctgagttgacactacagtttaatgaacttacatgc

SEQ ID NO: 657032 - DNA, 408 bp, Homo sapiens
  misc_feature (390)..(390): n is a, c, g, or t
cttaacagggtgaacctcagtaatactgtctggaaatgtacaatggactaaaccataaatcatctcctaagattcttcctgaccatttcctaacatgtaaagaaatgacattgttgaacaatttttttttgtttgttttttgagacagggtcttgctctgtcacctaagctagagtgcagtgccgtgatcttggctcactgcaacccctgcctgctgggctgaagtgattctcctacctcagcctcccaagtagttgggactacaggtgcacaccaccacacctagctaatttttgagttttttgtagagatggggttttgccatgttacccaggctggtcttgaactcctgggctcaaaggacccacccgccttggcctcccaaagtgnccaggatcacaggcgtga

SEQ ID NO: 657033 - DNA, 371 bp, Homo sapiens
ctttcagtcactgtaggctatgtagagacaagaagtcttctaacataggtgtacctggatacacgctgacccattgtggaaaggtagagagtggaactgccattgttgacaaagccaaacaaggcctcctcagctcggagctgacttcgattccggatcaagaagtagaactgaccaactgtgagatcagaaggcaccaggtatctcttcttgtccaggtctcctatccgcgcttcgggcgccttttctactatcaccggcacccggtccgggtatttctttcggctcttctcgccctcagagcggcgcttctcgaacggctgctcttctttgtacacgcccttcctcctcccgggaaccgagctggcccg

SEQ ID NO: 657034 - DNA, 332 bp, Homo sapiens
cccagccacgtgccccacagcctgtccccacactgtccctaagcccctggccgctcccagccgcctgtcccctctaatgtccctcagcccctggccgctcccagccgcctgccccacagcctgtccccacactgtccctcagtcccccagccgcctgcccagcaacctgccccccacactgtccctcagccccctggccactcccagctggcccgccccttctccccctctccgccagttactgggtgggctctggttgtgtctgcctcaggtgaccatgggtccagtgtttgcctccattgatgtaaaaatttgccaggaaaaaaaaaaaa

SEQ ID NO: 657035 - DNA, 198 bp, Homo sapiens
ggcggtcctataggcaggtatgtgatctagcgctcattagacacacgttttatttatcctaaaaatatcaagattaatatataatacaagggccaggcacagtggctcacacctgtaatcccagcacttggggaggccgaggtgggcagataacttgagctcaggagttcgggaacagcctggctaacatggcgaaac

SEQ ID NO: 657036 - DNA, 1232 bp, Homo sapiens
  misc_feature (140)..(140): n is a, c, g, or t
  misc_feature (728)..(728): n is a, c, g, or t
  misc_feature (1110)..(1110): n is a, c, g, or t
cgtgtcaaaggcgctagctccaatcgaaggaaggttgtagatgagagacacggatggacgatgaagagagactctcaaagagagccaggctgacgtagacagatggaagcttacgaaagcatggctagcaggagccgacnagcgtcgcatgcgtggctgagcaggagccgacggtggtaacgcaatacacgcgcagcattgggcagagcatcgccactttacgcgggcttggcctcttcagaatgtagtgcgtgcagagtctagaacaaacgaaaagcacggtgggttataaccttgaaatcgatttgcaggcgtcgctagtaaaagacgagacgaacgccgtggagattgcaaaggggtatggaggcgagacttattagcatgaagaagcttgactgcacagcacatcccacggaagcactcttcgaggaatacgacgcgaccacacctttatgctcttggctattcctatatgagcccaatgtagtgctgatcgcaattcgtaggttggatccttggatcgcacaaggaccaagaaaaagctcactcataatggatcgagaatcgcgatctaggacgctgttggtaggctatagatcactgaggaaccgagtatggcttttgccttgtacaagaccaagagaccaaggcacattcttgtgcgcgctaaaaggaatcttcatctagtacttacccttacaatacgaggcacttgcatccatctactngaggcacgacagcacgctagcgacatctcttaaacacattgtcatcttcgcatccaagtttgtttgacccatacaccccaacgagcgccttcgttttcactcctcaggtagtgaaacgatcgagaacctagcgttcctccacaagagaccataatataagagcctcgacagtgtttgccattttcgactcaaggaagattttaaggagggagagtacccctttgcaatgcggctttgagtgttgaaacttggtacaggaaatgcacggttaaaaagacccgctcctgaaaagactgggcgaacctctttaatttcagcggtagtatccaactatttggctccaaaaagttgtgggccaccagaaagcgttggactcccacantcgtcgacagaacacttgcaagacccagagtggaattacgcgacatatcagcgagtggcaaagtcaacacacgcttacaggcaacacacacaggaggggccaaaggggtcaccaccgcacac

SEQ ID NO: 657037 - DNA, 507 bp, Homo sapiens
ggagagagagatagagagagatagagagagagtgagatgaaaatgagatcatgagtgagagagagaggaacagagagtattgaagagcatggagaaagaagggagaattcctttaaagctcttttgatggaaaaatgaaattatgatacatatggtttcatttaattgtacagtctgacccctcaggctctctctctctctctctctctctctctctctctctctctctctcgtctctctctctctctctctctctctctctctctctctcctccctctctctctctctctcctcatataatactctcacacgagatatcatcatctactctactatatgtgtgtaatctcgcgagagcagcagtagtagtgggagagagagagaagagtgtgagcagcagtagtagtaatgatgtgtcactgtgcagtcgtagtagagagtagtagtagtagtgatgaggagacgacatagcagagtagtagtagtagtagagatactttatctac

SEQ ID NO: 657038 - DNA, 302 bp, Homo sapiens
  misc_feature (77)..(77): n is a, c, g, or t
  misc_feature (88)..(88): n is a, c, g, or t
  misc_feature (90)..(90): n is a, c, g, or t
  misc_feature (93)..(93): n is a, c, g, or t
  misc_feature (190)..(190): n is a, c, g, or t
  misc_feature (290)..(290): n is a, c, g, or t
gccctgctgctggccagctgcagcctcagccccacaagtcttgcagaaacagtccattgtgaccttcagcctgtggncccgagacgangngtngacatataccactagccaggtctcgaagggctgcgtggctcaggcccccaatgccatccttgaagtccatgtcctcttcctgggagttcccaacggncccgtcacagctggagctgactctccagggcatccaagcaaaatgggcacctgggccccgagaggtgcttctggtcctcagtgtaaacagcagtgtcttnctgcatcttcag

SEQ ID NO: 657039 - DNA, 412 bp, Homo sapiens
  misc_feature (1)..(1): n is a, c, g, or t
nttaaatcagctcggtaccggcatgtgctgtaggccagcggccgttctttattgtggggctgtcatgtgagtcgtaggatgtttgacagcatcccaggcctctaccccaatcatcgtgacaaccagaaatgtctgcagacttttgccacatgttccctggggtcacactcacccctggttgaaacactgctctaattccatcttcatggcatcgtcaggagatgacgtcacttgcctttacgctgatgtagaaaaccagaggctaatggtaacaaaaccggtaccggggaacatggggttttgaaaccacatttgttctgatccttgacaagactctgcctgatggctgagggggagacgggtcagggcaaccgctggcctacagcacatgccggaccggctcgatttatcg

SEQ ID NO: 657040 - DNA, 210 bp, Homo sapiens
  misc_feature (146)..(146): n is a, c, g, or t
cccatgcctgcaccagacaccctgttgaccatgactcaacaaatttgtgttgggagccgtctgcctccccagctcagtgcctttctgcaccccttctctcctgcccgcagctgctgcatccgccaccccctccaaccactgccctnagcccccgaccttatttattaccctcccctcccacacccccaatctacctggtgcaggctacct

SEQ ID NO: 657041 - DNA, 132 bp, Homo sapiens
tctgcattgcaaggccaaggagttgtgtaaggcagcggacatcgaaatatgaaaaactaccttatggatgtttgtgccccttacttgagccttgccatactgcagcggataccgcagctcgaaattcgctaa

SEQ ID NO: 657042 - DNA, 429 bp, Homo sapiens
  misc_feature (49)..(49): n is a, c, g, or t
tccccctcggaacccaatgagcatgagtctggagtttcttgactgattnatttttctttagcgtaattaagtggttagctggtagtctcactgagaaatctgtaaatgccagaatgcaaaggtcattgctccaaggttatttaatttatatagaggaaataaaaaagtagtataggttgagtgtcccttatctgaaatgctcagaattagaaatgtttcaggttttggattttgtagtatttgtatttatacttactgattgagcatccctaatccagaaatctgaaatctgtaacgttccaatgagcatttcctttgagtatcacgttagcactcaaagagtttcgaattttggagcatttcagatgtcagattttggattatcagattagggatactcaacctctaatggctcattgggttccgatg

SEQ ID NO: 657043 - DNA, 610 bp, Homo sapiens
  misc_feature (314)..(314): n is a, c, g, or t
  misc_feature (350)..(350): n is a, c, g, or t
cagacatgatgcctctttactcctatatcctcaaatatgtatttcctaaaaacaccattacaatgatcaaattcaggaaattaacactgatacacatattattttctaacctatagaccttaaaaattattttgacaagttttaagtttaaaattctctgcaatgacaggtttcaaatgaaataaattttaataggctaatttttggtttctgtcagaaatcttgaactgtgatctattcttatatgtctgacaggttttttctttaaatgaggcctatactacactcaagtgtaagaaacactgtattttagntttagtaagaaatctttaggtaggagtgaatttttnaagtctttgcttattaaaatcaaggtaaagtaaaaagctatttctgatttgtagttacgaaattcagtagaaggtctggagtgagacctaggacctcacttttggctgtccaccttgaggacaggaataataaaagtattatcttagttaagttcttatccagattcttaaacatttttgatgtcaaggaatcttaagtgtcctgtacagtgacacatctagttttgtttttgtttgagacagaatgagatcctgtctcg

SEQ ID NO: 657044 - DNA, 421 bp, Homo sapiens
  misc_feature (331)..(331): n is a, c, g, or t
cacgaggccttcgcgcgggtctaggcaaaggctcttcggcgatattgccgtggcagggtgacggcggtcatgacgagctcatcacggggggctttagacggtggtgctccctgatgcgctggcggcgctgacgatcgagcgttccatcgtcctggaagcggaggggcggagcggagccatggtccgcacatcccgaatatccgcgaccggcgcatcggcgcgcgtcgtcggcgttggcttcctcattatgtactcgcctgtttagagttgttccagacaagtagcgcaccgatgacataagaacaaatattattgtcgaataaatacgatnagaaaaactgatcttaaggattggttttcctgacatgtctcagacagcaaaacgcccgcggaagcgaacttccgcgggcgttttgtccgt

SEQ ID NO: 657045 - DNA, 572 bp, Homo sapiens
ggctgtctcctctctccgccatggcgtgtgctcgccctacttgatactcgtgctgctactccggaaaagggggagtcatctggcaaaagatgtcactttgcctgtctgctattcaaggctcctacttcgaccaggatattgtgaactttgttcactagccaaccttgcgcaacaaacaatcacgacatgcccctatgcgtgtcaggtgaatttatccacggtcatcagactagtgctgaatcttgcgggtactggcagagctgtggctcgaattcccagagttctgaggtggtgggactcacccgctctggccagtggtgctctttggtacaatcactgtgtcgtggacggccgtcatgtttgcatccaaccaataatctggctgccgtttggcatcgttgtagtgaacacaacccatagaaacgatatcgaccatctgttgctgccctggcctgcctcaggccctaccagctagctggttcactgtctactaggtcatcgctacttgacgcgaagttcctgtaacttcctttggtagttgaaggatcccgttgatcggctacagagaacgc

SEQ ID NO: 657046 - DNA, 860 bp, Homo sapiens
ccagcactttgggaggccgaggcgggtggatcaactgtggtcaggagtttgagatcagccaggccaacctggtgaaaccccgtctctactaaaaatacaaaaattagctgggcgtgatggtgggcgcctgtaatcccagctacttgggaggctgaggcaggagaatcacttgaacccgggaggcggaggttgcagtgagccgagatcgcaccattgcactccagtctgggcaacagagtgagattccgtctcaaaaaacacacacaggaacagggacaaaaaaattagctttatacctcttcctggtctcaaccggccatgaaaattctggaacactccaaattcaggtggaatattccaaaacaaacattcactagcgtttacaacataatttaaccttccttatagtaatagtatacctttaaaaagcctacaggggtatatcatcttctaaacgcagctacaactctcagtgcagctacattaaccaataggtccctaagtggagaaaccaatttgggcctatttcactggctgttgtagcctcaagtggcctaacatgggggtgccaatataaaatattcaggtaaaatttacccttgaattgtgtaaaacccatttcggactacggtctccaacttggcacagaaatctccaaagggcccggtattcacaggtgaactcccttcggaaaattcatcaatacaatcaggagtgtcccccaggtaatggacctggctgggggtggtgaccttaggtaccattaagtactccaaatattcattcaaaagccctcaaaattactgggaattagatatttaacccgaagatccttacccaattctacaaagtagaattct

SEQ ID NO: 657047 - DNA, 589 bp, Homo sapiens
agcgtgggtctgagtgcggagctgctgtcatggcgggcgtctgtggggcttatttcccgtcctgctgctgcctgctgctatcgggggatgtccagagctcggaggtgcccggggctgctgctgagggatcgcggaagggacgtgcgggtcggcatagagacgatcgcttcgagattgaggggccgtgcagttgcttccagggggtgaacgtctctatggacctggatctcgagcggcgccgatgtgcctggtagacaggcacaatgagcacgtcgtgtttcccttgaagacagagtgggagttgttgtggttcagtgatatatccgttctggactcttatgtacgtggaagttgagtactctccagacttgacaggattgtgatcccgttcgagtggagtatcgacgttcgagaaccaggacaacaactgagagcagagatatgtgaacttacagtcaaaacatcagaggttgtcagactggccgaatcctctccaaatgagatcttcaggtccaccttcttactttattagaagggaactcgtggggctggacagacttggctaatgaacccaatggttatgatgatg

SEQ ID NO: 657048 - DNA, 454 bp, Homo sapiens
  misc_feature (5)..(5): n is a, c, g, or t
  misc_feature (145)..(149): n is a, c, g, or t
  misc_feature (201)..(201): n is a, c, g, or t
  misc_feature (206)..(206): n is a, c, g, or t
  misc_feature (233)..(233): n is a, c, g, or t
  misc_feature (243)..(243): n is a, c, g, or t
  misc_feature (285)..(285): n is a, c, g, or t
  misc_feature (321)..(321): n is a, c, g, or t
  misc_feature (331)..(331): n is a, c, g, or t
  misc_feature (335)..(335): n is a, c, g, or t
  misc_feature (337)..(338): n is a, c, g, or t
  misc_feature (342)..(342): n is a, c, g, or t
  misc_feature (347)..(347): n is a, c, g, or t
  misc_feature (349)..(349): n is a, c, g, or t
  misc_feature (358)..(358): n is a, c, g, or t
  misc_feature (362)..(362): n is a, c, g, or t
  misc_feature (374)..(375): n is a, c, g, or t
  misc_feature (378)..(378): n is a, c, g, or t
  misc_feature (393)..(393): n is a, c, g, or t
  misc_feature (430)..(430): n is a, c, g, or t
aaagncagaaagggggcaggggagggcaggggtccacgggggtggggccagtgcaccaggggcagctcagctctccaaaggggccagcatctgcacctgctcctgctgctgctcctgctgctgttcctgctgttgctccagctcnnnnngggagagagtcttgtcctggctctctttctccttgaaggtgctgaagaaggngttgnccttgtccctcaggtccttctccaggntgctcaagtngccttccacgtcccccgcatgggcgcccagtttctgcctganctgttccatctgctgcaccagggctttgttgaagtnttccccgtanctcnanncggngtcgnanctcctccanctgntggtccaggtgnncanccagctctgccagtnaattctgcagcccctcggtgttgcccctcaggttgcnacggacgtgctcggccaagggggc

SEQ ID NO: 657049 - DNA, 504 bp, Homo sapiens
ggggcccagcggagattccaactgtggttccaaaacattgagctggtgaattgggcagacgggggccagcacaccagcatccacccagcttgaggctcaagttgcccttaccaccccttcccccaggaggggccaatttcttcggtcagcaagaacccaagcccacatccaaacttgcgtgtcccaaaccacttatttccctgttcccctttgcccccccccagcccagaggggtttgagcccccaatttcagggcctttttgtaccccaagccagcccaagattgggcattcctttttgcaccaaagtgcgggccaccctttggggggggggggggttttcccattttcataccctttcctttaaagggggggcattaaaattccctgggcccagcccatgggggggcccctaattatgccttcccccagctttggggtaaaaatgacccctttatgcaagttgtaaggggttgaccagtaaagaggaagttttgccccccca

SEQ ID NO: 657050 - DNA, 899 bp, Homo sapiens
gccaggaccgactcgccctccgaaactcaatgtttggggctgcggacttgctcgtcgtgcccacaaaagtaaagcttggggacctggggggagccggcagtatcgattcgagatccccaaatactatcgggtaaacggagagtggccgtcggtggcagagacctgttcggcatggagcctaatgatagtaccagtaccgctgtggaggagcctgacagacttggaggtgtggtgaagacctcggacatctcaaactcgtacacttaattgtgggggcccagatgaatgtaaaagagtttaaggagcacattgctgccatctgtacagccaatcccatctgaaaaaacaacggatcataaccagggacgagttctgcaagatgataagaagctacaggaccttacaaatagtagggaaggaacaggttcatccaacatggatggaaacaggggctccaccatcagactcaactccacttcatggagagcactctactgagacggggtcatgcctcagccacacatcaatggtgggaggagataccacacacctggtactcaggggagcctagaggaccaacctgatacaatgaacaggacatgcccaaacaagcagatgtacatgggtggacaccaacaaaatcttcacccaagagtgacgggctccagcaggaggactgacacaatcaagaaggggaaacagggccccgaaatacaagaggagaagccacaggggaacggagaggatgatggatcagagacaaggaacagggcgataaaccgaaaaatacgaaatcacggaggagcggacaagagagagacccacggagacacagacgacagacccgaaagacacaggagaaaccaggaaacagacacagagcaccaacacaagcagga

SEQ ID NO: 657051 - DNA, 1425 bp, Homo sapiens
  misc_feature (385)..(385): n is a, c, g, or t
gcaccggcgttaccattaattgctccttcggccacgccaatcccagtcccggtggcggtcccagcctcagttcctagcgccaatgctatcaccggctgtggctccgtgttccctgtttgcgtctccactccttcatcctcagaccctgcggctgcctcggctgcgactgttggttcctggccacgagccccgtgcctcagcgcaacgctccaagcgcagatccccacgtagcgctgtctctgtctgagtcccttgctcttccaagtggttccttcccctgtgcgggctcggctgtcgggttcacggtgttgtcaccctccagttcggtctttagtgccctccgcagtttgttgggtcacgctttacgaagcacgcacggcaattngacagcgaggtgccttgcgcccggatttttacttccgggcgactcccttggctttgggggaaagccttggttcccgatacatccctaactcctacgctcgggcagtggttcaccccccctatttttgcctatattccaggtttcgacccccggcgagccatacgtgcacgtgtcaccgaaacgacgtagcaagcgtttgggcctccgttcagaaccgcttcgacaccttcttttgccgatataggacattatgttgtctagtatggcccccgtgtccctcaacaccacacagggtttttcctcccgctatcatattcggcccttcacttttcactttggcagagaacctcgggtaaataccgcgtacgcaggtagtgtccgagcttggtattcacatttcacctccggcacgccccattcttcgctaggtttgcctttgtgacttccccattagaggggtttccctatactccgtctcccttgtacgaacgtgccccccccgcaaggacactcaggtcgccctcttctcttcatatcgatgtggggtgatacactcccacaggtttctctcttccaagggcccccgcgcgcgtccgcgttaggtgggcacctcccttccccttaggccctagacgcgtttcagcggggcgacgatttttcacctgtgctcgcaaaggtttccccgggtgcttcgcagggccccccttgggggcagaccgtcgcactttatgattccccacagtgtccaacagtgggtacccacgcggccacacaatatcagcagccatgatacctcatctagacccacccctgactagagagccgccattctagattaagtgattgttgtaccccagtgagtgcaatacaactagactgccctgggctttcttaagggccgctcccaacacacgccgagttatagataatctggtgaaaacttatctatcacgccagtagatacgaatttgagcgacaccatcaagcttatacggcacacgtagtggtcatattatagcgggccgcgctcattcactcca

SEQ ID NO: 657052 - DNA, 204 bp, Homo sapiens
  misc_feature (1)..(1): n is a, c, g, or t
nataggacttacacgcaacgaccctgacacggaggaacacggtaactgacgcctggacgactaacttggggaacactaatactttcacggtactagacgactttgcaaactggctacaggctctaaacgtggtaccccaccagtgacctggactcaccttttgacaggacggacgaactacgtaaaacgactaacgcttgcgca

SEQ ID NO: 657053 - DNA, 168 bp, Homo sapiens
ataagaaaagctaaagcttgaacttcagtcagaaagtaaaggagtttaatgagcaataagaaataatttgaaggtacaaaatttactggtaatagcaagtacacaaaaaaatagaaagtgaaaaagtaggcgtcggggatgaagttaaaacagagtttttatcagttt

SEQ ID NO: 657054 - DNA, 186 bp, Homo sapiens
agaagctagatatcatagtactaatggtggtctaggagcagctgggcggatagcaccgggacatattttggaatggatgaggtcttggcaccctgaagacagtccagcgaggacttggtcttagattgagcaatttggactagagaagatagtatgacagcacggtatctgagatctgtagggatt

SEQ ID NO: 657055 - DNA, 115 bp, Homo sapiens
agcatcatttagacatggcgaaaagcatctacatcccgtacatcacgacacttccgtccacacaccatcctgaagtcacctcaacttctaccaccagcatcaccccgcaaacaca

SEQ ID NO: 657056 - DNA, 193 bp, Homo sapiens
accatgcggactcataggccacaccttcaatcatcttcttgggctcacaagttgtttcttatgcagagatcaaaattcagcctcatccacctggagctattgtatatcttactatcctctcaataaaatatcctcaggattaggagagcctccgatcgtaggacaggaggctcccaggtatcatagatacacc

SEQ ID NO: 657057 - DNA, 105 bp, Homo sapiens
aaatagattagcttcatcacgattctcatgtactcttactatggttccgtcgtcagtgccttccagtgcagtcatacctctggtggaagcaagtacatcacgtca

SEQ ID NO: 657058 - DNA, 140 bp, Homo sapiens
cagattgcagagtcaagagcttttcactattgacaagatggtgatggactattacacacggaattgggactgtattgagtctctgggcagatcccacagaggcagagttacaggacatgattaattgaggtagtagctga

SEQ ID NO: 657059 - DNA, 1610 bp, Homo sapiens
  misc_feature (891)..(891): n is a, c, g, or t
  misc_feature (1143)..(1143): n is a, c, g, or t
aaaaaatcgaatacctttatttgtgctcccttaagcagctgtgttgaaaaggtggcagttgacctctcagcagcaggccgtggtatctttgtgcccgtgtttgagaagccaaaatcatcagcgtgtacatagttcgagggtgtttttctcagacagcaagtaaaaaaggttggtggccaaacctccaggtgcgtgattctccgtggaggaaggttccggggtctcagcactgtgggcaaggtataggttaccttagccgtgccttgaacaccctatagtatcgtggggtttgagacactctcgtgtttgtgccgtgaagtataagacgggattgtctcagttccccttacaagatttatctctaccagcaaatgtgtgtgtctcttttatctatctctgtgaacagagtggtctacaacagagagctgtggtcctcccttgtgaaaatgtgtgactccctgtggccatgtgtgtatcaccccctatagaagcgccagggtcccaccagctgtggtgactcttctcttattgtgtcgaactccagaagggagtaatatctgtagacaaccacacaagagcctgtcgcgcccatgttgagagagacgcccccttttgagagaataatcacacactatgagggagacaacccaagaaaaagtgagcagtagtgctctcagaaagctctcaagagtgcgccgtgacaccacagaagtctctccagaggtcttcttactcagagaagtcgttgtgcccacaactacaaataaagaagaggagccttcgtgacaagctgtggacagccacaagtgtcttccaaaccaccccaagaggagcacgaagacgcagagaggctactaccaccaccagggcttctacaaattctcgacgaanttattacccccaaagtggtggggggaacccaaaacgtgtgtggacacctttcacgaccaaacgctggtttaaagagaaaggctaaccccgcgagaggtttaaagacgcccacgtgtggacccatatcgcgttgttctttttcccaacacacccacgagggagaatagtaacccactactacacaagagatgaggtgtcacaaaaatgtcgagccccgaatcaagagtttagtcataaaaggagacaatttancagtaaaaaacagacaacttctgatggccccatgtgggcacccatttggattagacccgaacacgcgattcatcataccgtatcgataggttagaggaacatgtgtgccccgttaacacagaggaggccatacggatctcattcaagccctgctagcacagtgtgagttgtacaaacacacccggacatgtgtcgcccatgacataccgaactcgcagcgggcacccaccccaggaggacaaaccgtgttgaccacacctagcagacatctggccccaggcaacacacacaagggactcacacacaaaagaccctcacgtcagaaaagtagcacacacgtacctttcgcaacgagagcaggacagcaagacaggcagtccaagcaagacgctcgagacagaacaaaacacctatgggtagaccaaccacgaccgatcgcatacgaaccatggacgacacaagagtaa

SEQ ID NO: 657060 - DNA, 951 bp, Homo sapiens
ggcggcgcgcggaggaggccaagatggcggcagtgcggttcgcttcgcgggtagtgtgggcccgcgggcgcgggctccccgggcgcgcgtgccccgggtctggcttgtggaggcgcgcggccggggcaagctcccggtttagggggacaccttccaggggccggtggcccttgtgtcggtcgagggtcgtggcctttcccggaggccgggagaaaggttgattgctggccaggcggcgtggggcattgcttgggcggcccacggggtgttgcgggggctttggcccggtggcttctggcatttccgggttgtggtgtggccaagttgcacctgggtggaggtgtgacccccccccaatggttatccggggggtcctccaccgggggccctcccttcttcttttctctgggacgccaaccaccagagcattcccgaggggggggggttcccccaggggtattataagcgggacgcggtggtgttgggccccttcctttggcacagtgtttgggcacttcctggtggcgcttacccggccaacacttgtggtggggcggccgtgttgtttggcaacacggggagggattggcacgcataaagacgaccctggcttggcgaaagagtggacggttccacaaggacgggcccccaaattggaagaagtggggaaacgactggttcaatggcgggcgccaaggagaaacggctttggtccagggtatttcccaaagaacctataacccccaaaaggtggagggttggtcggagtttggcaaaccagcgggtgtattgcgccccttgtgacctcaaggtacaattcgtggagaagcataggcatgggtgggagcgcacatacgtattctccctggtcaacggggctactggaaacacaccacggcgttgtccattggaggaaggtcttacataacccctaattcctggcaggcatgg

SEQ ID NO: 657061 - DNA, 126 bp, Homo sapiens
cacgaggagtgcttcgagcggagcgaacccatccacaggaaacggcaactgactcacagcagacccctcaccccatcctgttcctcttcttgccctgtcctgcagtctaaggagcccgcctacctc

SEQ ID NO: 657062 - DNA, 516 bp, Homo sapiens
aacccatcgccaacttttattatgtgataaatagagaggagatgtcaggatcgctgtatacagttgaggatgaggcggtctttccttctctgtactattctttcttcttatatttattatctctcttgtcagtattaattgccatctttattttctttaagaatcaagacatctgctttcctggttgagaggtacagtgtatggaaaagacaaagaacagatgaatacattttgctcccccatgagtcagtctctttctcctcctctcctctccccctccttttaattattcaacaccatcctttttctttattcacgtatcctctcatctcaatgttcatgtcacactgttattcttaaatcatacccactggaggggagagagggttgtctaagatctaaaatatggaggttacaatttataatgcacatatataaaacagagctccgcagcgtttcctctgacctcttcgataccactcccagatgctacaccagagctaagcacaaggacct

SEQ ID NO: 657063 - DNA, 949 bp, Homo sapiens
  misc_feature (949)..(949): n is a, c, g, or t
tatctctaggaaacagtctggcttaactatttttggagaatataactgttgccccgtctctgctgctttagatgttgctttacatagaaccagaaaagtggaattgtctgcagactaaagcgatgtgtgccatgtttcatctaatcaagcagagctaaaatgtgcataccgaataaatttatattaataaagttactaaactaagagtactcaggttagtttactatatttgcaagtcgaagatggacagtaagaagttgactggtcaagagagagcagtgctgaaggaggagatccaggtttaaatctggcttattaagctcaatgccaattttaatggattttctgtatagattactcatgtcagaccaagaactttgataattatttccgagagaggcgtttaattgctaagtaaaccaggtgttataaagaattataagagatgatctctgtttttcctggtcagagatttacgacaaactgaatgaggtatagcctcaaacccaatagaatagaaggttggttgtcggccaaagaaatactgaggctaggacatacaggaaccgtttgccggagcgagtgatgggtaccacgtgaaaaaggcttctttcagacaccaattcgcgtagaggagcgcagcgggaccccaagagaggttatggtggaacccacgcgtggtccaaaaggctgggtacacccaaggggaagaaacaccggcggcgcacaaggacaacgacacacgggcgtgggggatcttctctcgcccaagatagaaaaaccggcgcccgggggggggagaacacccgagagcgggctcgtgacgaaagagacctcccaaaagatgggggggctctgaagaggcggcacacacaacggaggagagcatatccaccaggggggggaggctcccacgagaagaggggcccgagatatcataaattacggn

SEQ ID NO: 657064 - DNA, 710 bp, Homo sapiens
  misc_feature (5)..(5): n is a, c, g, or t
  misc_feature (81)..(81): n is a, c, g, or t
  misc_feature (83)..(83): n is a, c, g, or t
  misc_feature (103)..(103): n is a, c, g, or t
  misc_feature (113)..(113): n is a, c, g, or t
  misc_feature (212)..(212): n is a, c, g, or t
  misc_feature (223)..(223): n is a, c, g, or t
  misc_feature (255)..(255): n is a, c, g, or t
  misc_feature (305)..(305): n is a, c, g, or t
  misc_feature (323)..(323): n is a, c, g, or t
  misc_feature (350)..(350): n is a, c, g, or t
  misc_feature (423)..(423): n is a, c, g, or t
  misc_feature (446)..(446): n is a, c, g, or t
  misc_feature (454)..(454): n is a, c, g, or t
  misc_feature (467)..(467): n is a, c, g, or t
  misc_feature (469)..(469): n is a, c, g, or t
  misc_feature (477)..(477): n is a, c, g, or t
  misc_feature (534)..(534): n is a, c, g, or t
  misc_feature (700)..(700): n is a, c, g, or t
tttgnttaatattgatttggttgatttatagcatcttgtgatctaggttggctttgggaaggtgccacagggaggtttgcnanttcagggagcaggtagatgntacagtggcncccgagcgcgccaggtgccagcttcgacgtgtaaatggcccgttgcgggcgctgctgggaaggaagacaagaagggtgagggtttgtttttaccaagtnttttttgagtnctgtaggacgtgggtgggatatggggacagtnagggtaacacaaacagcaacgaatgcacaaagacaagttccaggaacacncataaactcataacgttnaacaaaatggtaataaaacgacgcttnttttggtttggtgaggttggtgttttttttgtggtagatgccacctgcagctggctggctgggaagcgttggncaagttttttggtatttgggagnttaacagnataaaaggttgtnanttctatanggaaaaatttcacatccttcccctgaaactgacttcaggggcaaagaaacgagactncttgaagaccagcctctgctgggaaaggggcttctgagacgagtgtcgacggcagagcagaaggcctggggaaggcaggggtccctgggcagaggctgggagggtgggcagagaccagggagggcccttcatctggtgggtttggcaggtgtgtccctggtgctgncaccaggagc

SEQ ID NO: 657065 - DNA, 684 bp, Homo sapiens
  misc_feature (28)..(28): n is a, c, g, or t
  misc_feature (65)..(65): n is a, c, g, or t
  misc_feature (73)..(73): n is a, c, g, or t
  misc_feature (90)..(90): n is a, c, g, or t
  misc_feature (92)..(92): n is a, c, g, or t
  misc_feature (94)..(94): n is a, c, g, or t
  misc_feature (169)..(170): n is a, c, g, or t
  misc_feature (225)..(225): n is a, c, g, or t
  misc_feature (231)..(233): n is a, c, g, or t
  misc_feature (243)..(243): n is a, c, g, or t
  misc_feature (246)..(249): n is a, c, g, or t
  misc_feature (273)..(274): n is a, c, g, or t
  misc_feature (304)..(304): n is a, c, g, or t
  misc_feature (330)..(330): n is a, c, g, or t
  misc_feature (469)..(469): n is a, c, g, or t
  misc_feature (471)..(472): n is a, c, g, or t
  misc_feature (475)..(475): n is a, c, g, or t
  misc_feature (519)..(520): n is a, c, g, or t
  misc_feature (525)..(525): n is a, c, g, or t
  misc_feature (529)..(529): n is a, c, g, or t
  misc_feature (553)..(553): n is a, c, g, or t
  misc_feature (556)..(556): n is a, c, g, or t
  misc_feature (560)..(560): n is a, c, g, or t
  misc_feature (645)..(645): n is a, c, g, or t
ggggagctgtggtcttgttcacactttngggggcccttcttaggagttctgcctgtcccttgganggttcagngtcttgggtccagcggntntngggagcccaacctgcgtggacaaccccttgtggcagcccttggtcactgctgctctgggtgggcagcaggtttanntttcatagttcacatgttcccaccacacaagtcaaatcaaggcatgaaaattttngggaannncgggagggcnggnnnngggagcctggaagaggttgcaggnnggggaaggggacacagtgggcttccgagangctggcaatttcttgacttggatggngttacgtagtattcactttaaaattattctttaaattgtacgtacatgttatatacttttcagtatgcatatctttaaattttaaaaattaaaaaaagaggctaaaagtgaataaaagggcagatgatggaatagaaangnnatngggggggggagacgacgaaggaggaagatggccagggtggaaanngaggnagtnctgggggtgataatgctggcctcngtntctnttcttctgtctggatactggttctacttctagataccggagcccgaccagcatacccaggatggagaaaccttaaatacggaggnaaggctagtgtctaacatacatacggtacctttcttctc

SEQ ID NO: 657066 - DNA, 477 bp, Homo sapiens
  misc_feature (452)..(452): n is a, c, g, or t
agatactcttcgtcatgtattccactagaggagcagagggcaaactacgttcccattaaagccacaaggtttaaaaacctctaaccttggaaaagcacacttcaaccctctgcacaccaaacttctctactgtggtttcccctctgccgctttctccttggcgttccccgatcactgcctctagggtctttacaagggacagcgaacgtaaggtttcggagctggcttcgcccccttctatttaccgggggctggtcatccttcgggccaggctgactgtctaggggtggccctcggatacctggtccccgcaggtgacccccctccctcccaccgaggaggagggcgcgtcccgctcgctccgtggagacgccgcggaggcgcacacgcctcacgcctcctcgcagaagccacaggggctgcggctctttgtcgcggccacaccggaaacngcccggagcgcgcgcggggcggccg

SEQ ID NO: 657067 - DNA, 526 bp, Homo sapiens
agcggtgggccgaaaagcacggggggctggtgaggaagaagccgccgccggcgcccgagggcaagggcgagcccgggccaaacgacgtccgcggggggggaagccggacgagcagcgctcgggaggaccccctgggccggccccttgccggcccaaatgtctcggcaaccaaagggcaggggggcaccgggggcaaagcatgggagcgctgatgatgccctgcggccgctgcagctggtccgggcgccgaaggcccggccatcagcgacggggaggagggcggcggcgagccaggcgctggcggaggagctgccggagccgcgggcgcggggcgccgggacttcgtggaagccccccgccaaggtgaacccgtggactaagaacgcattgccgccggtcctgaccacgtgaacggacagtccctcccagaacactctgtgtccagccaaggtggtgagggcagctgttcctaaaccatgcgcctaaggcagcagggttggatgactctggagatgcacatcaattg

SEQ ID NO: 657068 - DNA, 839 bp, Homo sapiens
cggacgcgtgggtccaactgctctgacattgttagaaatgttagtattttattccgtttgagcaatacgcgttctgccactacacatttctataaggaagtcacaattgcttcatggtcatgaccccattagtcagtgtaccagctgtgttggggataggaagtatatctggcagatagatattatacaccttcctactataaagcagcatatcacaacatatagtacacatccatttcattcccttgaaagtgatatctcttataacaaaatgacaagctggagttcacggccatatcaaatcgtcctggaaggtgatcaaaaatcacaattctttagcaactatcaaacctcaacttctttcctaagtaagatacagcacccaattccagtctacagtacatattacactctactatatgtaccaagaaggctaggttatattggtggatgaggtctcttgacaactggctaaaagggaaactcttgatctatgggtaaatgtctcttacggatattaaccactacagttaaattggaacttactctatgggaatgtgtggtctctggtctaacctcagagcattaaaccaggtacaacagctcaggatcagcacaccaattaccagaagaatactccctgccgtaaaacacaacatgatactgcccgagaagacacataagatgataacaacgaccgacggagaacctacaacaggccgcactcagtcgctacggcaccaatgaccctgcaggccgccactaacaggggccacaacacaacggaccacctaggccatcccgccggtcaagaaagacgaaaacctacacaacacaaa

SEQ ID NO: 657069 - DNA, 224 bp, Homo sapiens
gaagaaatcacatcatggcatcattccatatccctacacccctacaccctggtccatcagaaacctggctgactctaccacccattacttcccatttccttagtctccatcctcagaccaaacccagcccattctccatccaccagtctccttccccagcacctctgtctcaatctgctgcctgtgggtgctcctctcacatcgcaccttgccaggccattgca

SEQ ID NO: 657070 - DNA, 390 bp, Homo sapiens
  misc_feature (255)..(255): n is a, c, g, or t
  misc_feature (285)..(285): n is a, c, g, or t
  misc_feature (320)..(320): n is a, c, g, or t
  misc_feature (345)..(345): n is a, c, g, or t
  misc_feature (373)..(373): n is a, c, g, or t
  misc_feature (379)..(379): n is a, c, g, or t
ggcacctctaatcccagctacttgggaggctgaggcaggagaatttcttgaacccaggagatggagattgcagtgagcgaagatcatgccattgcactccagcctgaacgccagagggagactctgcctcaaaaaacaaacaaaccaacaaacaaacaaacagaaaaacattgtcacacagacaaaaccaatatgggaaaacttccaaaggaaagggtgcgggcatcacttttaacgggtgaggcacagcggccnggggagccttccgggttcttagggtggcantgggttcttttcttgacagtccttctcttgggctnttcagagacctccgtttttagcttncgttgcccttagagtttttttgggagtnccttgnttcttaggggt

SEQ ID NO: 657071 - DNA, 490 bp, Homo sapiens
gggggtgcgggtgatctagaggatccctttgcggtgcctttcccagagccaactcaaggcttctacatcctggggtgagctgaacaggcagagtgaaaggctgtatcctgcagtgtccctccgtcccagggggtgtgtggacagagctgagaatggggaccaggtcattcagagctccaggctggaacagtgctcttggtgcaacaagaaacttctccctcagcccctccttgaacctcagatttggagatggtaaccaaaggaagcagctgggacaggtggagaaggaagtcggaatgagtgcacggtgagcccgtgctcctcaggggcctcccctgtctctgggtggaatggttatcataggggggggcaaaattagcaaaaaacaaaaatcaatgacaagcaaactgaaagcgaaacgaaaaatcaacgaagactctgtcctctattcctccaaagaatgcaaatcagaaaaagcccctggctagat

SEQ ID NO: 657072 - DNA, 706 bp, Homo sapiens
  misc_feature (446)..(446): n is a, c, g, or t
tgggtagccattgaaaaagcttaggtggctataagcctgtggaaagcgtcagtgagtggcttttataaaaaggtggatctggtggatgacagtcaggaaagaggatgtggatagaacagagactagtttataaagtttagggggtttctcaggcaagaataacattgagggtgtggcacccaagaagtggttacgcagtgtggcagaagtgcgccattcaaggggtgtgaggtgtgaagggagagaagagtgtgtacctgtgcaactgtggcattaggtggatagagtgtgcgttaaggctgtgaggagagaggaagccactttaaggaggacttccgaggtctctgtgggccaataagaaaacagggcacttgcgggagtatggggcggaaggtcccggggtaaaattttgtggttttcaatattctaatgcgatgttcggggcnagccatctcacttttaggagcaagcagcaatgcgggagacactgggggagtatttcaactatctcaaatgtttaaatatcgctgggtaaaggggctaatataatattttttcacccgagaaaagtgagggcgagcatatttagacacaatattctggggaggataattggaaagtttgggttccaacgggtgaaggggaggggcctcttctatcacaagaaaagtagtccctttggtttttcaaaagttttccctttcta

SEQ ID NO: 657073 - DNA, 356 bp, Homo sapiens
ctacatgctcgacacagacaccagctactgaggaaaaggcctcataggaaatgacatcgccaccatcgtcttccaggaccgtggagcacttccttttactccaaacagcatccggtctcactttcagcatgtctttgtcatagtcaaagtgcataatccatgtaccgaaaatgtgtgctatagtgttggagtttccagatcaaaagatgtgccaccatttggcccaccgattcccaaaggtgtaacttttccaaagtcagccgtgctccgggacttccttttagccaaagtaatcaatgcagataatgcagcccataaatcagaaaagtttcgagcggttaccgagctcgatattc

SEQ ID NO: 657074 - DNA, 488 bp, Homo sapiens
ccaaatcgcaatcacaatgagatgctcacacccagtagaactgaaaaaaattgacaataaccagtgctgtgaggatgaggaggaataggggattcaaaggaacgcctcccatctgccactctctcctgacctgacctcctcccaccctcagttttcctaattacagagtcatcaggtttctgtccacccagaagtgacggcaatgacaggctaagaggcagcgtccaagagagttctggggagacagcactgggggagcccaggtttcccggctttgctggggcctctctgcaggagaaagtcaccatttcttttttccatctctaagacatggccacctttctgcctccaggtattgtcacagagccaggaccctgtttgtgggcccagtggctgagcccagaggcaggacggggcaagagacagtctcgccccgtcaggctgaccatgtgtttctgctgggattttaaatgctttccccataaaaa

SEQ ID NO: 657075 - DNA, 424 bp, Homo sapiens
tccacatctatatccccaaaacctgatttcccttctgtgttctccacaggtgtaccactttcacttactaatccaggtatacactctaggagtcaccttagatctgacactcagtcgctcctaattcatatgattctatagttaattgtccaactcttaacgagagataaaagggtgccataagataattacatcaggaaaaaatatcccaggcaacaccaggctctatggtcagcctactataatgcattatgaaatgcggtgattgccgaatcctgacattctcacctctaaagatatactctcatgtccatatcctcttttccattctgactaattaagcctcaactgtctattaccagtgcgtgcacatagtccatgggtgcagtccgtcagagggtgcagttagtcagtgggtacagtt

SEQ ID NO: 657076 - DNA, 288 bp, Homo sapiens
agctgggattacgggcgcctgccaccacgcctggctaatttttgtatttttagtagagacacggtttcaccatgttggccaggctggtctcgaacgcctgacctcatccgtctgcctccgcctcctggagtgctgggattacaggcatgagccaccgcgcctggcagttggatgagttttgattaatatagaccttcatgtagccatcagtcgaatcaaaataacaaatgtctctatcaccctggcttaagctcgcctgcacttaaactgtctgcaactaggagccta

SEQ ID NO: 657077 - DNA, 242 bp, Homo sapiens
agcctcagcaacatagtgagacgctgtctctacaaaaaaattttaaaaattagctgggtatgctggtatgtgcctgtagtctcagctactcgggaggctgagaggtgggagtagtgctgagcccgggaggtcaaggctgcagtgagccatgatcacgccactgcactccagccagaatcacatgagagcctgtctcaaacaaacaaacaaaaaatgattcttgccactaagcttaagaaaag

SEQ ID NO: 657078 - DNA, 259 bp, Homo sapiens
catactacggacttgaagtccctccgtgctggtatgcagtcctgggctgactcttgttgtgtgccccctggtacaggtctcacagacgtggcagttccgatctatatccgagatctagcacaatttcccagaacagaggactctggttgttactcattccaatcaggccctatagcagttgtttgagaaaatctatggcattagacatttataagcgcccacctactgcgtttagggtcatggagaaaaaaagctggag

SEQ ID NO: 657079 - DNA, 246 bp, Homo sapiens
tgtaaatgctttcagatctttcataaattccaatcttatgtgtatttttctaaattctataagcaatacatgaatatgctttggctgtaaaaatctcaattattgatgttttttaaggagaagtccagaacgtggttctcacacctgtaatcccagcactttgggagactgaggtgggcggatcacctgaggttgggagtttgagaccagcctgaccaacatgaagaaaccccatctctactaaaa

SEQ ID NO: 657080 - DNA, 878 bp, Homo sapiens
ggactcatggaagagatgaacgccatgctgggccggagaaggaaagccacgccggttggggagaaaatcgcgcaaggatgaatctgctcaatgaggagccagaggccagagtcccggatccagagtgcaatctgtgcggagaccctggtgagaagaacgagcaagcatagcgttgcctaacggatgagagtctgtcattcgtatcaggatggaccgagcttcgcggaataccgcgaatgcacgtgctacagcgccgagctccatgttgattactcggacctacagagggtgaaacgaggagcttctgggaagaggtgaaggaaggacattgcgagaatagtgaacagaggaaagtcagttgaagccattcgtctcagtgagctgtaggaaagacgggggttactcgcctgaccacaggggacccagaaggacccgcttcctccctttccgaaacacccggcactgtcaccctgctattccctgcactctacgttgacattggaacttggcgtgaagactacagcaggaatgcatcgttcccactcccacatacccacttgcgaaaacgtccaaggggggatgtggccttccctgctcaacacaccacaacatggctggctgatttggcttggggagagcccccgagcacttttactaccccttatggatccttcccactctgacatcacccataagggaccggtcccatctgctggcggattgcagccaagtggaaagcccaacagtgaaaaggggggaaagggacaggaaggggaagtttcagagtaaaccgtatgataactaaaattaacaatattaacgacatataatggacttacaaagaatataggataataataagaaaacaaaatattagt

SEQ ID NO: 657081 - DNA, 456 bp, Homo sapiens
ggtcaaaataaaggttttatgaaagtccatattgacttgtctgatgagttgtttgcagacaaaaagaagagtatgtagtgtgcatgcttcaacagtgcctggcccacaggaagcactatagaagtggtgttgagaggcagcagcatgcagggtggttaaagggagaggctctcgagccaaattggctgcgatcaaatcctggcttttccccttacaagctgtgtaactttggacaaataatctctctgtggcctccatgttctcatacagttgtgagaattaaatgagctaatatactgaaagcaattgtacaaaaaaggtgctagataagttttctgctactggaggaaatacacctttcttttatttaagtacctttaaaaggtctgaggtttttcatactgaaaaagaatactccagcctgggcgatagcgagactccgtctcaaaaaaaaaa

SEQ ID NO: 657082 - DNA, 374 bp, Homo sapiens
aaaaaacagatagcaaggcaacaggcctgtctaatcccaaaggagggtggcgagggaatatttagtgtgtgtgtacaattgggacctttaaaaaccgagtcagttctataaaatagagtataaatactagattggtgatattaccatgaaataaaccaggataaagaattttaaagtcctggaaaaagtgaccttcctgaggcagaaaacaaccttttgcagaagagacagtgctaggaacgttcttactgaaaaaacaggggtctcagcaacagagtattagagaatcccaccccacccaatgaaactgccagcagacttaaagaaaaggtatttctcccatcagcttggcggatctctagaagagtaccaac

SEQ ID NO: 657083 - DNA, 1388 bp, Homo sapiens
tccttatgggtttctctagtttaattccatggccaaagaactttacaaaccagtgagattccaagcgctttcctcccaggtcttcagagagattcaaaatccaatatacccaaatttcctagtcctaccaattctgactctcccacaacgagcagagaatctatttttagccaaaaactatcggctgaatacaccgaggtttttaattcgaggagagccagatatgtgtgttcaagagttgttagaggttttccaaacacaagaagaatgtgaacaccgcgaataattgcgagattacgtaggtgccactttcacatatattacgtgttatactactgtgagcctttacagagagagcgcgtgctcttctcgtgtctatgtggaaccctataatcccctttactctctacagatattctcacgaggagtgtcattactattgagcaacagagagactctcttttcccactctcctccatattttacatttacccatcaccttccctatcaatataaaatcaattcacaactacaactcgattcaactctatcaccatataaaatctatatcagagatacagcatcagactacagatccaacatctactcgtcggcctagcgcactacaatcttacaacttcccctaacctgtcaactatcgtcaaagttactctctacaaactcccccactacagagggcccccaaccattgtttatctattgaggcgacgcttctccaccaaaccgcgggagacaccacacgaaacacttatatacgacacaacagacattctgctactatgcaccctcttttgtgcgccatagacgcatcatataaaactcctttacacaataaccccctacccattatccctcactccaacacacgccttccactatattatcccatccacaatttaagattaacatctacgatccacactcccttcaaaatcacactacatttcaccgcatcacatttcccataccaatatcctgttccccctcacaattacttcatactttgagacggcaacaagcgtcgagacaaactcaaaatatagtagaactaagccaacaataacactcctggtaccatgcaccatgggcatttacaacgatgatttccaaaatccctattacaatgacacgatcaaacttcacgattcgggttcctactcgtctaaaatcacagtccgttatacaacatccgtacgtaataagccagtggattagtatactatccctaatccctcgctatacagacaaccgtgtacatcaacagctatcatttgagacattatctttgtgccgataatttatagtgagccccctttggtgattgaggaaatattagctcgctcaccccatattttttagccaagtga

SEQ ID NO: 657084 - DNA, 667 bp, Homo sapiens
ccactctgcatccagctagtgcccggcaatctgctcatctttgctggcgctcacttcatgaatgcacagtcagatggcagatttgccgggactagctgatgcagagtgccagggggaaagccctcaggtctcttgttcacacagtttctctcatcctgcaagtttatttctcatggaccaagggcattgggtcccacagcacggagagacaccatgccaggcaagaacctcatatcatctaggctgggaactgatgcactgttaccacctccaaccacaagatactgtggcaaagcaccgtcattaagttaaggccaggccccaccattttacaaaggtggcgcaactaacacctccaactttcttaagtggggagtccacacctgtaccgaaggtcctgaataatacggggaagagccaaccatcttattgggtgcacatcgttcaaaatcccacctcacacgggttacccatttcggaacggtctgtgtactaaaccaaccaatgatttcctgacaacgccctaaagtggttgtcacaccagccacctatcagcccatcggcaggatacgcattgaaagcacgataagcctacaagacacacactatgctcggccgcaccgtgtattcactgacacgacaagcgcttcctctggcgaccaccacg

SEQ ID NO: 657085 - DNA, 84 bp, Homo sapiens
actgaagacagtgccacttactactgtgcctttggacaagtcccttcctacataccgtactgtaagtgtagcgataaactcatc

SEQ ID NO: 657086 - DNA, 120 bp, Homo sapiens
gttgtattgatgcactctgatagttgttttttcttaagtgtaactatcagaggtggattatcttgcctcctcacttagaataccactagtccacggttggctccttggttggcatcgata

SEQ ID NO: 657087 - DNA, 414 bp, Homo sapiens
taataagcctttagttgagagaagatgtggttctgtttcaggtttcccaggctagttccctggtgtttatttattcaaaaaaatgagcaccgttgttggaatatgtctttgctagacattgatgatttgtaacttctcattctcaaagttgaagggagatctgctttttcatttggtgtctttatgtttctctgttgttttccagcacattatttggtgacatcccatgttatagattaaaatattgcaggcatcaagattgttctcactggcctctcagatatgattggtgttatctatgagataaccctctccggggattttctcctctggctacttagaccacatgttacccaagcaacatgagtaccatgttccccctacaaggttgttattattccaaacttccatttc

SEQ ID NO: 657088 - DNA, 725 bp, Homo sapiens
  misc_feature (725)..(725): n is a, c, g, or t
ttgttccgccggcacggtgaccgggacccggtgtctgctcctgtcgccttctgcctcctagatccctagccactatgcgatgagtgcatctcctatccaacgttgggccactgctgtggtgtccagcatttggcaactgcctgctgcgacgctctagctgcctggaacagcggcagtccaagcccgattggcctagatgccaagtgagcaacgaccacttcggggtgacgcgagagtgactccgttcaacacgcttctctccgtcgagacgtggctgcctagagcaatgcaaccgttgcccccaggagctagtacgtttagaaacgcacattaggaaacctcaacaagtgccataagatagaacggttactgcgactagggcatacctaagcagcccaggctactatccccacgccctaggaagaccaagtctcagtacatacacgtgccaaaaatggcaacgtaattgcattgctcacactaaatcctaatttgtcacgcagaagaggggccaacttaaccaaccactaacatattgagcaagaggtgggcactacactacaaattatcgcaggcacctctaggtaacttaggtgaatctccccgaaacatatacgggcaaataggctttaagtcgtggacaccccaaagatgtgcaacccatggataacgatatcaaagcagagctatatactcatgaggagttaaaccccacacaagagtcn

SEQ ID NO: 657089 - DNA, 1389 bp, Homo sapiens
  misc_feature (51)..(51): n is a, c, g, or t
  misc_feature (90)..(90): n is a, c, g, or t
  misc_feature (92)..(92): n is a, c, g, or t
  misc_feature (123)..(124): n is a, c, g, or t
  misc_feature (159)..(159): n is a, c, g, or t
  misc_feature (225)..(225): n is a, c, g, or t
  misc_feature (247)..(247): n is a, c, g, or t
  misc_feature (254)..(254): n is a, c, g, or t
  misc_feature (264)..(264): n is a, c, g, or t
  misc_feature (266)..(266): n is a, c, g, or t
  misc_feature (331)..(331): n is a, c, g, or t
  misc_feature (349)..(349): n is a, c, g, or t
  misc_feature (358)..(358): n is a, c, g, or t
  misc_feature (373)..(373): n is a, c, g, or t
  misc_feature (375)..(375): n is a, c, g, or t
  misc_feature (393)..(393): n is a, c, g, or t
  misc_feature (630)..(630): n is a, c, g, or t
  misc_feature (651)..(651): n is a, c, g, or t
  misc_feature (681)..(681): n is a, c, g, or t
  misc_feature (688)..(688): n is a, c, g, or t
  misc_feature (776)..(776): n is a, c, g, or t
gaagaagctggcaggggcacgagccgggggcgggtttgaagacgcgtcgtngggtttaggacgtgccgtgaaagacagcacgtattgagntntggtcgtgcgagtgtggagaacgttctgtcnngggggtcccgtgccaagtaaggtagggccacgtcntgttcatcggagttggtgtccatggagttttcaagcgcgaagccgccatatgaccgggttcctagnagcatgccgggtgcattgcggngtgcttngccaatggtncngcaccgggcacggaatcaatccatgggggagcctggctacagtgggtagctagaaccatatgtgnctgcgtgaactttatgcntggagctgncgagtacaggttgancntcgatcacacataccttncctagtgcacacggctagtgcgatactacttgcagttgattggaacgcttcgaatctgtgcttagagttaaactaactttgctctcctgggaggatggacactagggccctcgcatttatatcgccccctcggtagtttctccatatgtgtattggctcagttgcctacttgggtatgcgtttcagttgatttcttaattacactacgatgcttttcgagagtagacctggtgattntgagtggagcaagaccaagtntatactctgattcgacaagctgtggggttngggcatngaattattccaatttcgtgtcatggtgtatgcacgacacatttatattgagtgttcgtgtgccgtgcaagtctctggcacatgtggtnttgcctaatttaccgatttccatctccagggctaaattttgactcagacgtagattcagagacgtagaggtatttcttgaggagttcagcacctttacctgtgagagtttatttgccacctctactgagaaaagtgacattggaagcccattttctctggggtaccttctggggcaatgttcgcccaggtctagtcccctgcccctggatttctattccggtccgcgtttctgattgttataccttttgtggccctgttataatttcaatcaactttgtttgaatggacggttaaatccgtgaagattgtgaacgctggtcggtttctggaaaccctttgcgttagtgtaacatctttggaattcaaaaagttggaggccccgaaaaaacagggtagtctcggggaaggaaattccggccttggtgtgtgtaccccccgtggcgcactttttttgtagaaggcaagcctttccctgtcgagaggaaatctggttttatggggcaaaagcctttatttgtgagaattgccggccgtcggagaagatatttcgccctttcgaaatataaatgtaatgcggagcacaacctcttaactttgtcccttgtatccctt

SEQ ID NO: 657090 - DNA, 1151 bp, Homo sapiens
tgctctcgctgagtacggcgcgtcaggtgttcgagaacgaccccgagagcggattatttatagctcgcaagactagttagactgcagtcaacaagatatggtgtctccggtacaccaaaaactcaggcttcgccaccatgcggtgcaaaacctgcctgaccagtgcacgcccaaacccctgacgagtaggaaggggacccaagcctgccaggacctcatggctcaacttcttctgcctgtgtaaagctgcgctgccggcgggccggctctgctgacaaacgatgtcaacgaatcgcacgccaggagaacgtggggctgccatccagatctgccacaacaagccagggtagcttccactgattcctagccacagcgagcttcgagctctcctctgactgcgcaggacctgccaagcacctcgacgagtgccggcacactcggcaggcctgcggcggacggccgcgcctcgccaagaaccctgcccggcatcctactccctgcctctgcgcaccagcgcgccctcgccatcacagctccccaggaccacggctcgcccgcgcgcctcgtggcccgcgtcgtctgccctcgccgcctgctgcaccggcgtccgcgctgccctcccccaccggcagctcccaccccttgcccctgcccaccggcccctgcgccgcccctcccacgccctggtcccccacggcccctggccccccctcgtccgccgcaccctctctcgccctgcgcctcgccctccccggctgcccccccccactgctgccaccctccttgctccccctgccccggatctctcccccgccgcacccccccgcatcccgactgcgcctccacccgacgcctcgcccccccccccccgccctgctcccctcccccttcgaccctctcccgcgcccccttcgaacccccccggcgccccccccccctccttgcccgctaaaggccccccgaccacgcgaccccggcacctcctcaccgcccccgccaccaccgcgcccgccccccccctcccctcccccccacgcgcctcctcccccctcccccaccactcgcccctcccctccacccccccgctcctcccctaccccccgcctccgccccccccccgaccccctccaacgcccccccccccccccccc

SEQ ID NO: 657091 - DNA, 630 bp, Homo sapiens
ggcgcggtgttgcccgccccgcactcggagcccagagccgccgcccaggaaggggatgcaggaaacccctggctcggtggagcggagaggcaggcgggcaggagccgaggacggcatgtcccaggccccgggagcacagccgagacccacgcgcagccgtgtgaccagccgaagcggcgagcgccgtggcaggctgtcgtgcttgtccagcggcccgtctaacaagcgttctgcagcaggcaggtctttagcgcaggaggctgccgatgagatctgcaagaggcccctgtcccagtctgggccctggcccaggtactggggctgatcctgaagcctggcctcgcccgtgtcgctggggctgctgtcactgccgctgcgccggcggcactgggtggccctgcgccgaggtggacggtgtctactatcatacctggagtctcaagctgcgggcgcccgtaggccctgggtggatgaggacggagtcagggccttcctggcggctgcgctggcccaggcctgtgcgaggtgctgctggtagtgaccaaggaggtggaggagaagggcagatggtgcggtacagactgtacatggttcgacatcggcagccacaggcagtccctgcgcatcccc

SEQ ID NO: 657092 - DNA, 111 bp, Homo sapiens
atccgagatgtccaacagacgtgattcagtaccgagtaaactctgagtggttctcgtccaccatggccaaggcaagcagcgcgcgggcagcccgccgcatcatgtccacac

SEQ ID NO: 657093 - DNA, 269 bp, Homo sapiens
cagtctcaagtgttatactatccaagttttaaatggaaaggtaaactgtggagtaatgaaattttggttttcctgtcccttttgctatcaaaataatattcatgtttgaaatcttgtctttatttggaatttaggtcctgtccgcttttaccctttgctttcctaaaaaaagtttgagatccaaaaagttcaagggattggggaaaaaaaggcgtcaagtcatttcccctttgtccctgtaagttaggtaataaactattatcctcgta

SEQ ID NO: 657094 - DNA, 963 bp, Homo sapiens
atgtggtgtcgccgacagtttgaatgacaaacgaacgcacggtcgacagtacttactgcgttgtaatcaaacggtaaaacagtgtaatgccgttgactctaggcgtaactagacaattgtgtgggccaagttgggcgcgaccaggctggcgagcatagtggggcccgccccaatgatctttgtccgcgcgacaatagtggggccctctaccacgaagggtactagtcttcctcgcggagattgccccccggttgtacaggcgccttatttgtctagcatggtagaccaacgtttcaagagaggggttctgaacaaccacaatggaggctctgggtatgtcccgtcccccccgcgccggtactttttctgtggggagggggagcattttcttccggcacaggtgaaccacccccccctcccctcgccgcagggagattataaagtagtgtcttgtgggtgccctgccgagtagactctcacagtgccccgaagaggcgtcctgatgttcttggaccacagataatatctgtgcgcagaaccccaggggccacccaattaaaatctgggaagaatgatgatgattttgtcagccgcaccacaagaatcggtgccttttcgtgcttggcgaccagggtaaacttggcgggtcccccccccccgcctccgtgaatgcaggggtcacctcaaaatgggtgccaacctgtggtgttgagacgcgaggcgattggccctcaacagtccacatttctcgtagcagttttccagtggccgacctatagtctgtttcgacagtagagcgtggcatattccctccaattgattggcccacagcgccgacacgactctcttcaccctggaggacaacatgtggggcagtctgtccttcttgaatagttaccccagatatcagcatgttcttccgcaccccaaagggttccccccacaaaccactggccacaaaaa

SEQ ID NO: 657095 - DNA, 230 bp, Homo sapiens
tgaattttgaaatttccctgcgacggacatgtgccctgtcacattttccattggttaatcctgaagtttggggcaagtctctctgcccctattaaaaagtgatggaaaaacctccctcttattctggtgaggtggataaaaatgtcttttggatttaaccctttggaattttcccaaaattttttaatttaaataaataaacaccttttttccctcctgggaagtcatga

SEQ ID NO: 657096 - DNA, 351 bp, Homo sapiens
ccccccctttttcccttttattttcaggccctgatttgacttgtggtggggggaacatgtgaaatttgaaacttaaacctgctgcccccccagagcagctttgaccaagggcttcctcaaggggttttccacccaggttgggcccctctctgctgctggacccaagactttgaaccttccaagggacaggcagtttttctaagaagggcccccctgtgtttgggcaagaccccagctccccttttttctacagatgcatgggggttggaagagtctgggctttttttagaccttctggtccgctttttttttgtaacaacttttttaataaatagaaaaaccccctgccca

SEQ ID NO: 657097 - DNA, 142 bp, Homo sapiens
atactcctatgatataacacaactcttctctcttctgctcaagttgtagcttgatgtgagggtcgctcttctcccggaccccgttaactcggccgtcggggtggatacgcaagctgaagccctcgtacttgcagtacagccg

SEQ ID NO: 657098 - DNA, 879 bp, Homo sapiens
cttcatcagcccccgcaagtggacccaggggaggtggagcagctggagatggcccggaagcggctggaaaaggacctgcaggcagccgggacacccagagcaatggcgctgatcggagaggttaaagttaaacagtaagagtgaaccagcttgtgagagaactggaggaagcctagcgcggcaggtggcaactcgtgctactcccgagctgaaaagtctctcaagctagcatgcagtcccgtgtcctcaggccgagcagccccggatccctcacgtccagccggggctccctggtttgcagtccagccgtggactccctccacttcagccagcttcagttgaccttctactatgaccccttttgagcagctggatttcagagctgcgagagcaacggtggcacgttccttgctccttggaggggggccaccgcggttcctgtgccctcaggcttgcaatcaccaaccatccacgaggatgaggtgtccaaagacccagacaggcaagagggagtgttggccagcctgcagggctctgggttccctgtcttggcaaccccaaagtccatgactcccttatccccagggtcctctctccttcctccgcgtccccacccgtggttcgccgttctcaagtgtttgaccccccgctccgggcttggtcgattgccttcatcagcatccgtgggaggttccggaccgacgcccggaatctttagttgccactgtctttggcacgaggccttgtacctagcgcccggaatgcccgggtgggcacctggatcggggcgcccgtggggcatgacgtagacttgggccggggtgcctcaaacggctgtgttcaccgcggcttgtcaacaagaggggcagcgtgttagcc

SEQ ID NO: 657099 - DNA, 101 bp, Homo sapiens
attctgtctggtcgagtctaagagagatccccctggatctgaacttaggccctacgaggggttccgaaggaggggtcttgtgtggacacagagagtacttc

SEQ ID NO: 657100 - DNA, 413 bp, Homo sapiens
gtgagtgtgtccagtgtgtacgaacaccatgagagcacacctcttataggaggacagagaacaggtcttgagtccccaactgtgattgacttttctgatattactggcaactcttttactgtgcactggattggttctctgagccaccattactggctacaggatccggcattattccgagcacttcagtgggagacctctagaagaacgggtgccccactcttggaattccattacccttaccaaccttacttcaggcacagagtatgtggtcagcatcggtgcgtcttaatggcagagagggtgccttattgattggccaacaatcaacaggttctgaggttccgagggacctggaagttgttgctgtgaaccccaccagactactgatcagctggggcttctggtgtgac

SEQ ID NO: 657101 - DNA, 855 bp, Homo sapiens
gatctgaggatcccggtatacgagtaaatattgtccccagcacctaaaacagggtcacacaacattcactaaatgtttgttgaataaaagagttaacaaacataattgaaagctttttttcttcctatatttagcatgaagactgtcattgtttctctaggaaatgtatgaatctgaacttttttgacttgaagaaaaacattctttttttacagagatttggactttgatgataggttttaaaaatatatgataaatattttttgtacttgtttgatttttttttttaaagactttacttcagaaagggaaagactgtttagaaagaatgcatattttttccctatttatttctgtggttactgcttttgcagtttaacagtgtttgtatttgatatttgtatatgtttgattgctatctttaaagtgccttatcagatttatggctctgtgctattactttttgagctttgcaagttgtgtacataataattctaaagaagttactttgtttgcaatgcatcaaatttaaatgatgtgattttttttgtattatttgatcttagtgacagtgttctattttgcatcctgtatcttatgttgcttttggtgttttgtgttgtgtgtcaacgattaagccaactaattctctaccatatataacttctggacatttttgatacaacatcttaattctttgtagatatggagataggtacagaactatattctaatgccccaataaggtctctactccttttttagtttttccagtaacagctacacccactcttttcttcctcttcaccacataacgcgttattcactcgcccacaacctctcgctataacacac

SEQ ID NO: 657102 - DNA, 892 bp, Homo sapiens
ggtgtctgttctcctttttggttcagtgctcgcttggttcctcagtgtgctcttcatcatccgcttctgtgcgtcaggtgctagatcccctgggcttttgtgccctgggcgttgtgattcgctgctggtccctctgttgcttggtcccgtcctgccctttcctctcggccttggagttccgtgctttctccgtgcccttacccgtgtagacctccctgcctccctcttgggcctgccgcgctgccccagtttggagctgcctcgtaggggctgggccctttcggcctggtactcccttctcccggtacatccttcacaggttaccttgtccacgctcctccggatccacgctttggacttgctctactattttacttttaagagtccgacgcggggaaagacgggtacaaaaatccagaggagatccaagtcaattggaagatcaacatttcaaaagggtgtccacagtaggcgtaaattaagcccaggctctaccgaccttcaaactacaagcagagctttcaggagcaatgcggagagacggcttcccacccggacctcaccacgcaaccgcgcacaccccagccacattgctccctcattcagccagaaaggactccaactccacctaccaggaggccccccttcctggtgctggccatgttagcagaggcatgttgcatggcatcccacaggtggcgactgccccccaccctcctctctagcactttagagggtccctcatgtggcagacaccatggctaggtttctctttccaactcctgttggtctggcaagtgacagatcatcattcacgtacattaatcagtagtcacccgaacattcctatactgtcccccaattccttaacagccagcgggtgcctccccca

SEQ ID NO: 657103 - DNA, 1015 bp, Homo sapiens
gaacataatctagggcgtgcaggagctgtgtgtgtgtaactagctcgtacaaggatgggtgttccgaacagccgacaggtgtctctgtgcaaaactcatccagatagcaccgcggtgttccatgcatgtctgcaaagtgatgtgcaattcctagacggtgagagaagtcgtagtcgcttaagggaatcatcgaggaagaaaactctggaagatgcgaaagggaggaagcagatgtggtgaagacataagtcgtatgtggtattatagccttcaagggtgaatatgatggtcctggggtggtaaagaggccaccatggagttgcttgggactgtgagttaatgggaaaatgatcagtgcattcctaaatcatgataagcaaggctagacatgcacaatcacataaggtgtgagaatcagacttcctggcttcaatgaactggtgagaactggaatcctcagatgcggagcttacttgtgcaagagcaagatgtgactaagtcacctggctagaccagtggggtctacgcctagtgagaggttacggcagaatcgttcaccgttcacatcaggcaacggctaaggctctgaagacactcccttggctagctccgacaatccagatgagaatatcctaggatactatatccataagatttttgattgtcgaaaattaagactgagataccattgtggaatagcggtgggatagaatcgttccttactgggtgtgacaatcaggtgtgctagtgcacgggtgaatagagctgcggaatccacgttggggaatggataccatgggctaccacgtactatggcagtattgcaggggcattgagtcaaataaacaggccctcacatccacgcacagtacacacgtcggtgtccaaagctactcacgagcgaacaaaggtgtctggaacaagaacacgcctgcctagcgtgcctagaaaccaggcaagcagaccacgccaacacaaccaccaaacgggaaaaacaagcacgcaaccacactga

SEQ ID NO: 657104 - DNA, 2542 bp, Homo sapiens
gatctgaggatcccggtatacgagtaaatattgtccccagcacctaaaacagggtcacacaacattcactaaatgtttgttgaataaaagagttaacaaacataattgaaagctttttttcttcctatatttagcatgaagactgtcattgtttctctaggaaatgtatgaatctgaacttttttgacttgaagaaaaacattctttttttacagagatttggactttgatgataggttttaaaaatatatgataaatattttttgtacttgtttgatttttttttttaaagactttacttcagaaagggaaagactgtttagaaagaatgcatattttttccctatttatttctgtggttactgcttttgcagtttaacagtgtttgtatttgatatttgtatatgtttgattgctatctttaaagtgccttatcagatttatggctctgtgctattactttttgagctttgcaagttgtgtacataataattctaaagaagttactttgtttgcaatgcatcaaatttaaatgatgtgattttttttgtattatttgatcttagtgacagtgttctattttgcatcctgtatcttatgttgcttttggtgttttgtgttgtgtgtcaacgattaagccaactaattctctaccatatataacttctggacatttttgatacaacatcttaattctttgtagatatggagataggtacagaactatattctaatgccccacaatggggctatgagaggggacagatggatgggcaaagaatagttttgtttaacatattaggtcatagttcttgattagtttttttagttaaagataaacacatagggtgtgatttctataccaaagatatgcttatttcagtattagaaaaatattcttcttacatctcctgaaaattgcaatttttaaaatgtgtaaaaataaattattattaaaagcacattttatttccattcgtttggattcattaccttaaaactttattgacatatttcaaagatataggaaaggtaaatgatttcaagaaaatccgtgtatttctaccatgcagatgtaataaatgttagcatttggctatattttcttcagacacacatatgcatgtaattgcaaatgttagatacatttgaagtttgctttgttacctgtttgatcctgtcccgttcctccctccccagagtccccagaggtaaccactagagggggcataatatagcatgtgtttttatatttttaatacaaatatattttttaaaagcgctacaaaatattgttttatatatgtggtagccagcttccagatggccccagtgatccctggcctcctggtggtcatgccccagtatagccttctcctgcattttacagtgctgacttttgtaactaccaggatattgagcaaatgcagtgtgtgatttctgaggccatatcttttactcttttttttttttttaagagacaagatctcactctattgctcaggctggagtgtggtggcaggatcatagctcactgtaaccttagacttggactcaaacaatcctcccatctcgcctcctcctataaagcactgggattacaggcatttttgctcatttttctatgttgttttttttacttgtcagtttttagatattacatattttgaatactaatgatctgttatgtatgttccaattatcttttttagtctggtttgtcttcatattttggttatgaaatcttgaatttttaaaaacgtaattttaccaatctttcataatgatttgctttttctggtttttgtataggaaatgtcataaaaatagtcctattcagccttccaaaagttacaaaatttttgtttttaacatttagatgtttagtccaactgaaatttgttttcttttatggcatgattttggaatcttgttttaattatttttacatatttatagctgttcctccaagtatcaatttttcaagtgcaacatctgtcatgcagttactatgtaagggccagattctgacctttctgttctttttatctgaaggaaatttgaacatgccacccccaaatatgccgatttggcatactgattatttcgagctaaaggtgcttgactaacagtagttgcagaaatggctattttaactgtcctttcctacctgtagcaagccatacaaacttctttgataaagatgctttcctgataccaagatgagaagatggctctaatcagctgagacagcaccagaggaatctacaaacaagaaactattagtttcttaacatatatttaccttccacagtttctgcctctggaagcctaaaactgctttccttcgtcttgtcacacttctctgaaatgtattctttgtggaagatgctatatagtccagagttgtaagccactacttgtgtttaccttttcattgagttttctcctgtgtgatgtacgttgcatatattaataaaattacttgtttttctcttgttaaaaaaaaaaagtcgacgcggccgcgaatttagtagtagta

SEQ ID NO: 657105 - DNA, 2195 bp, Homo sapiens
gagtgtatgtggtgtgttgcgtggtgtgtgtggtatgtggatggatgtgtgtggtgtgtgtgtgctgtgtggtgtgtggatgggtgtgtgtgttgtgtggtgtgtggataggtgtgtgttgtgtggtgtgtgtcgtgtgtgtggtgtgtaggtgtgtggatgggcgtgtgtggtgtgtgttgtgtggtgtgtggatggatgtgtgtggtgtgtgtgtgtagtgtgtgtgtgtggatgggtgtgtgtgctgtcttgtgtagtagtgtggtgtgttgtgtgtcaacgattaagccaactaattctctaccatatataacttctggacatttttgatacaacatcttaattctttgtagatatggagataggtacagaactatattctaatgccccacaatggggctatgagaggggacagatggatgggcaaagaatagttttgtttaacatattaggtcatagttcttgattagtttttttagttaaagataaacacatagggtgtgatttctataccaaagatatgcttatttcagtattagaaaaatattcttcttacatctcctgaaaattgcaatttttaaaatgtgtaaaaataaattattattaaaagcacattttatttccattcgtttggattcattaccttaaaactttattgacatatttcaaagatataggaaaggtaaatgatttcaagaaaatccgtgtatttctaccatgcagatgtaataaatgttagcatttggctatattttcttcagacacacatatgcatgtaattgcaaatgttagatacatttgaagtttgctttgttacctgtttgatcctgtcccgttcctccctccccagagtccccagaggtaaccactagagggggcataatatagcatgtgtttttatatttttaatacaaatatattttttaaaagcgctacaaaatattgttttatatatgtggtagccagcttccagatggccccagtgatccctggcctcctggtggtcatgccccagtatagccttctcctgcattttacagtgctgacttttgtaactaccaggatattgagcaaatgcagtgtgtgatttctgaggccatatcttttactcttttttttttttttaagagacaagatctcactctattgctcaggctggagtgtggtggcaggatcatagctcactgtaaccttagacttggactcaaacaatcctcccatctcgcctcctcctataaagcactgggattacaggcatttttgctcatttttctatgttgttttttttacttgtcagtttttagatattacatattttgaatactaatgatctgttatgtatgttccaattatcttttttagtctggtttgtcttcatattttggttatgaaatcttgaatttttaaaaacgtaattttaccaatctttcataatgatttgctttttctggtttttgtataggaaatgtcataaaaatagtcctattcagccttccaaaagttacaaaatttttgtttttaacatttagatgtttagtccaactgaaatttgttttcttttatggcatgattttggaatcttgttttaattatttttacatatttatagctgttcctccaagtatcaatttttcaagtgcaacatctgtcatgcagttactatgtaagggccagattctgacctttctgttctttttatctgaaggaaatttgaacatgccacccccaaatatgccgatttggcatactgattatttcgagctaaaggtgcttgactaacagtagttgcagaaatggctattttaactgtcctttcctacctgtagcaagccatacaaacttctttgataaagatgctttcctgataccaagatgagaagatggctctaatcagctgagacagcaccagaggaatctacaaacaagaaactattagtttcttaacatatatttaccttccacagtttctgcctctggaagcctaaaactgctttccttcgtcttgtcacacttctctgaaatgtattctttgtggaagatgctatatagtccagagttgtaagccactacttgtgtttaccttttcattgagttttctcctgtgtgatgtacgttgcatatattaataaaattacttgtttttctcttgttaaaaaaaaaaagtcgacgcggccgcgaatttagtagtagta

SEQ ID NO: 657106 - DNA, 94 bp, Homo sapiens
gctcttggacaggatgtttaacagcatccctggactccaccagctagctgccagtagcaacctccacttcctccagttacggaaccagggaaaa

SEQ ID NO: 657107 - DNA, 406 bp, Homo sapiens
  misc_feature (277)..(277): n is a, c, g, or t
  misc_feature (375)..(375): n is a, c, g, or t
  misc_feature (397)..(397): n is a, c, g, or t
tgcaaactaatactacaatgagatatcactacatagctaccaaaattgctaaaataaaaaataatgataacaccaaacgctgacaaggatgcagataaaccgggtcagtcatacactagtggtgggaatagaaaatggaacagccactccgcaaaaccatttgccagtttctcataaaactaaacatacaactgccatactgaccctcaattgctccgggggcatttatacaagagaaatggaaaagagggttcacacaaaaacttgtggcatggantgtttcatatcagtttttatcccttaatgtttcaaaaacttgggggggaatcggtgggccttttaacggggtgggctggggtggaacagtggggtggngtgccctctttggccccgggantacttactt

SEQ ID NO: 657108 - DNA, 168 bp, Homo sapiens
  misc_feature (104)..(104): n is a, c, g, or t
cgatcgctatggggtgctttctccctactcttcacccaaggcagtcatgagactgtcatccctaagaaaacatattcattgaccaaggactcatcccaccaggnacgtcccagatggttgacttcgacacgaatggtgacagcgccattggtacaattggaggcctgg

SEQ ID NO: 657109 - DNA, 211 bp, Homo sapiens
gggagcaccgtgagtggcagatgcatatagcaagtgcactctataggtccaagtcccacatgattactggagctcagtacttgccagcccataagcttggtgagtagctgaacggcatgtaggtggtgctgtgacatctgagaccggagaatatcctgtagctcgtgctcctgataagacagggtaattacgcgatcccagctctagtgta

SEQ ID NO: 657110 - DNA, 467 bp, Homo sapiens
tctgctgtcctctggggagaatgcatttgaactcatctcaaaaagctggttttctaccctggaggtctccgatggctactgcgagaagaaagccatgtcccgaaagcagtgatacagattggcagccactgcagagatgcagaatgtcgaagagtgtgtgtgttggaattcctggacagacactgctctgaaagaaaaaccctctggttttggaagtctggctgggcaaggcaggcggaggtcatggaggggccggcgtgatggaatcctcggtgcagctgactgcgcagcccgacactggcgtggacactgggacgcgtcatgcaacatccaaccagagcatactcacgaggacaaacatgggcccacctatttaccatcagaaaaacaaaatcatgctctttcacttgaaagaagggggaaactggaaagttattatttgaaataaaatggaattttagaaaaaa

SEQ ID NO: 657111 - DNA, 108 bp, Homo sapiens
gaggatcgctcgaaccccaggaggcagagtgttgcagtgacgctgatggttgcaccactgccctccagcctgggccacagggcgagactccgagactccgtcttaaac

SEQ ID NO: 657112 - DNA, 364 bp, Homo sapiens
gggtaaaaacttcgggttttgggtgggttattcttcccgggcgggcacccccaacatgttccgggaataccggggcctgacccccgcaggggctgtcacccagtgcttccgagacatgggtgcccggccccgcggccgagccccctcccttcagttcattaaggtggaggagatcccggcccccaagtgcccccggccggctgtcaagcagttccccgactcccagatcaagtttcccctgcccccccgggtcctgggccgtcagcccaagccccgcttccccccccaggggcccccccccttttttttggggccgggccctcgtccgggtgggcccccaattaactccgggaccccccggtta

SEQ ID NO: 657113 - DNA, 626 bp, Homo sapiens
  misc_feature (228)..(228): n is a, c, g, or t
ccgatgcacgatgataaattcttaatgcataatgatttaaagagctttatgcgacagatctatttcaggacgcacctgtcccaggttagaagaggcatcgttatgcatagttgtttggtgaagagcatgcaatgaggcaatgaagacgatgcctatgtcttgctagccgtttctactacttcagacgggggaagagagagcttatatatcgtgtcctgctacaggtgnaaatcttctctttgatgttgacgccggaatatgctctcttgccgacattttcactgttgagaccttctctatcccacttttgggaggctactcctatcaggtggtcccgcgccccttctgtttgtgctcatgtcgtgaactctggtacagatactgaatgatgatcttggagactggatcatctctctgtggagccatcaaatgcactcttcatccagacctacttttgcactctctggggatataacgcatcacttggcaacaatgtcctgtatgctctcgtccgctgcctatgctggatgctccctatgcgaagcgttgaatttatccttgacgcggacaacccatggaatatgtggcaaaccacctggatgccctgaagttccgtgccgtgtcct

SEQ ID NO: 657114 - DNA, 220 bp, Homo sapiens
ccggggggacggagagcgaggatgagatcatagtagtagttccgagcccatagaacacgtgctcttctctctttcatcacttggtggtctttgtggtgatggcagcagcagactccaaggtgggtactgaggttgatggaatgcctctcttaggtggtaagggtggggacggttttgataacaatgtaccactgtttattgcttggccggtacatgcaag

SEQ ID NO: 657115 - DNA, 457 bp, Homo sapiens
  misc_feature (320)..(320): n is a, c, g, or t
cccttttaccccgggggaacccttcccccccccccttttggggggtgaaggggcggtttttaaaagggcccctcccattggggtttgggccgcgccgggggggggaaatttttaaaaggtttggggccaaccctttttaatttttttttttttttaaaccttggttggggggggggggcccccggcccccccctttgggggggaaacccttttccggcggggggggggggggttggtggttttttaaggttcccccccccccccggcccccttttttggggggggtttttagggggttttttggggggcccccccccccntttttgggttaaaaggggccccccctttttgggggttttttggggggggttgggggaaaaaaaaaacaaaaggggccctgttttttttttgaaattttcccgggggttttttttaaaaaaaaacccgccccccccca

SEQ ID NO: 657116 - DNA, 272 bp, Homo sapiens
agtatgatgtgcacgtggtttaactggtatgatgtgccatgtggtttaccatgtacctattgaaggatattttcgttgtttccagtgtggtactattacaaataaaactgttgttccttaatttcttaaaaaaaaaaaaaaaaaaacacaaacttgcacttgcaagaaaactgacagcaagataaaatgattcaatttttttccatttcttcaaattttatccgtaatatgtggttcccaaaatgtatgtcaccctttattgaatagtttta

SEQ ID NO: 657117 - DNA, 232 bp, Homo sapiens
aaacctccctgactgcatgtctggtcataggctatctgcagggggaagcacatatcacgctgttggctcaatctggcagtccaacctggcattgtctttacacaatcctgcatgcaacttagtattaacaataatcaggagcatatcatataatattccgtagcaatagtatcagggggtctgcctacaatgattattgtaagaattcaaataaaacaaaatttttatcata

SEQ ID NO: 657118 - DNA, 827 bp, Homo sapiens
tcaagaaaaaatcaaatcttgaaaaaaaagggagggaaagctgaagcttggtttcaaagctgggggctacccccaaatacccccctatggtccctcctccttatgtctccaacttccctccaaattcgttggtaagccacctccaagtgtgaagcgtggaacccaaaaactcgtggagaagtggcgccgggggaattcttaggacgcgtgcagtggggatacagactccatcagttctcttcagcttcactcagaatcccgattggggacgaggacctatataaactgggagtgggctaaaactcacgcaaagctcgactttctccctcctcgagaaatgtggctcacgttatctacaaggggaacacttcagaacctccagtttatggtgcctcaccccaaagaaagtagtgaagaggaagattgatgatggtggtggcctccttaaaacccaccttattttgacccgtgaagaagagaaaatctttaaggaaagatggggaaacttgatggtaaggcccccccttcagtgagcgtgccgtgaagaagaaaggcaccaattctggccctcgggggaaatcttaggtctcttggacccattctccaagaatgcgccgaaagagctcttctcggaggcagattaacctcctctttgcccctggtgggggggctcttccccattcaggtccctgacgggccccaccttgtcgcccaggtgcttatggcgggttggcacgtaaaaccgggtggccatctgggggagaacggcacgcacagcagggcacagacgccgaaggggtgtccgtgagtcccttacaaaccgcttg

SEQ ID NO: 657119 - DNA, 350 bp, Homo sapiens
gctgactagaggaccccgtcctgttgctactctgatacttctcttcggttttcctattttttaatcagtctttgctgtatgtttgttctctctgtagaagatttagtgttatgtggtttttttttggtagtgctccttattttctgtagtgtcccttttgggttttttccatttcactactcaccctaagccgtgtcacatttccactgtcttttaaaaccctgtcttctgaatccaaaactccagacctctctgctctaccattatttaataactgtttataaagcatcttctctgtgccaggcagtattcatacaaaatttcctgcccccatggagttaaaattctgg

SEQ ID NO: 657120 - DNA, 140 bp, Homo sapiens
tcggacccttagcaggaactactcccacctggacgctccgtacgactaaccatcttctccttacacctagcaggtgtctcctctagatcttgggagctttgatattcatgtcaggcatcttgaatttgggacctttcaag

SEQ ID NO: 657121 - DNA, 979 bp, Homo sapiens
  misc_feature (616)..(616): n is a, c, g, or t
gtccggcaggagggccaacgcccgctgttcggttagcgacacgcagacagggaggtgggcggcagcgtctgccgtgcttcccagacgaccgaactgggaatccccaagtggggcaagtcagatgcgtggtagctttctctagccttgcttaggccgttcgcactcagtgctgcgattgcgtgcttgaccgccccgagctgagacccgtgtgtcggcgcgggagcgtgagtggagcgaccctccagtttcgtcgtggtggggacgcgcgggcttcatatcttcatgctaaggccgcgcctgagccggtgctgacgccgcgtctgcagccaggtggcactccgttgacggaggtgctggttatccgcgagtcatgttgacctgggtccactccttggcagcacgtacttagtgcatacaccacgcagcacaaggtccggagaaggggaacgtgtcagagcccgtcccggagcgcgtgactatccgggagcatagcttgcgcccaggagtagcaccctgtggagcagagatacgtatccaactagtgactatccgtggcaaggcagttaccacaccgagcgccctgcgtcgaggtggcacatgcctgccccgtctctgncgtggcccgcggcgcgtgtggctccaccgtagcgtcggcctacacggatgctacgcatgggctgtgtcatgggtagggccctgaacgttctggctccgtcccctggatggggttctaatccatggccttgatcccccggggccacgggggagagctcgcggaccgagaagaattgcgacagggaaatgcagcgaaggtagcagcctaggtacgtgcccgcacaggacgggggaagccccggggaagcacccaatgcgcggctaggggcgcccaacctggggcgaggggactgatcagcgaacaaggttccatcgcccggaaatccactgcaggtccccacggtccccggggggggaatagccg

SEQ ID NO: 657122 - DNA, 806 bp, Homo sapiens
gaaaatcaggaagagccagcggggagtgtgtgttgccatgcgcgtctccgcctgcaggtatgtgtgtctcagtgacagtgcgtaggcgtgtgcctgggtgtgagccgcgcggcggcgtgtatccgaatgacagtgtgacgcacgtgcgcgcgcgagtgtgtgtgtgcgcgcgccggggtgagtctcccgccccactccttcctttccccatttctattcctctctcctctcccggccagtcggcttcgccatccgcatcatctccatccattattgaagaaacagccgcgtccctccaatcacatcaacaccccgcccctttccgttccgctcgcccagcggcctctgggtgctgacgagaggggaagccaaggcgcggtgggggcgccgggtgggaatgggcttatgacccttgcccaagcccggcaggagccgggacgccggggtccccggggagagcgctttgcataaacagatggcgcgggcggcttgtctcaatcgttcgctcaccggcagtcccggatccgttctgtctggctgatgctaatcatgatcatctcggtgacctcgggacaggcgcccttaataatggccagagggggggtcaggggcaccggggtcccgagacagatgctggccctgtgttattacctttccgggacgcccctccaagtcccacaagcgaaggggaagatcaaaagctgcgcggagttgaacgggcatgtggacggtgaccaggatgaggaccccggggaagaagccccagaggcgtatcgggatgaccagtagggtggataacaacacca

SEQ ID NO: 657123 - DNA, 774 bp, Homo sapiens
ttcttcgaacaggttccccgcctcctctcgaagtttttccctaaccctgcgccccgatacgggctttttgggacctggcagacccagcttatagaggactcccaccggagcttcatggttgtctttctgggaactcattgccatgagatcaggacctccttcgcaaaaagaagaaggtagatccttaaagccctatatagccaaaggagcgcttgaaaaggaagatccggcaactgggaaaggctactccagagcttattcctacttgaagattgtaactaccccctctaaaatttcttggagtaaagcaacgagagcggcctccggtggagctcacccttgaggagacttagaaggagatgctctgcttctgaagaaatggtcccttgtaccacgccacgccacgagccgtctagatggagagggacaccactcacgggctatgctagaagccccgcacgggagcttctggaggaactgcacaactgggagtccccgaagctccacagctgaggccactccaacgggagtccttaacccggttcccccttgagaaggaagggccacccttacataccccccgagtccctaactacccaaccccctgaaggcacggtacaaatgacatcaacccagggggtacacacaaatggagtttaagagatagactgcaggctgctatccttacaagcgcccctgagagtaggaatgacccgggttcaagtctgctttccacagatcaggcattctgttaataaatactggttttatcca

SEQ ID NO: 657124 - DNA, 317 bp, Homo sapiens
cgctgagcaagctgggtaacacaagtgcattatgtttgagtagtgggaccggctctgatcaggtcctgaggccatgatgagaaattgggcttgtttcttcaacttgctctttcctgttgaagtcaaaagatggcttctttcttattttgtgtcctgtactatattgggtaaataaagtgatgtgtactttgttaagtgatccatagatacttttttggttgatgaactcttccatcttctatcatcttaggctgcctggtgtggggttgtactaggtgtatccgatggttctcagtccccttcccagcttgctcaga

SEQ ID NO: 657125 - DNA, 971 bp, Homo sapiens
  misc_feature (971)..(971): n is a, c, g, or t
gctcattgtacccatgctaagtcgcaagggtattcctaatgcttaccgaacgagaaaattctagggctatatacaagctacgcaaaggaccccaacgttgtaggccccgtacggggctactgacgaacccttcgcttgaggccgatgataaactctgtcaccgaagaggagcccctaaaagacccgccacatctacgcgatcacccgtgctacgatcaccgcgcccgaccttgagctctcgaccatcgctcttcgtattatggaaccccctctccgccatacccaatcccctggtcaacctcaacctaggcctccgtatttattctagcctacctctagcctagccagtatactcaatcctctaatcagaggtgagcatcaacacgtcgaaactacgccctgtagtcggctgcactgcgagcggtagcccaaacaagctcatatgaagtcacgctagccatcatgctactatcaacattactaataagtggctcctttaagcctctgccacccttatcacaatagaagaaaacctctgtattactcctgacatcatgagccttgggcataatatgatttatctccacactagcagagacaacgaacccctttcgacttccgaagggagtcggactagtctcagggctcaacatcgaagacgccggagcccattggcctattgctaatgcgagtagaacgtatgataataggcgttacagaagattcctggaacatttggattccctagtaccacaattgtccgacatattaccccttgtaatcagaagagcctcgtgaggctatcctaaagtgcaccccatatagggcgagcagctcacaaaaaacttgatcgtgttctctctcttgcttcctcacactatctcaccagagacgaagaggagacagaggacagcacaagaaatgaaaaagagaaaagaagaaacagaggagagggaagaagagaacaacgn

SEQ ID NO: 657126 - DNA, 83 bp, Homo sapiens
ttaaaaacccccccctttttttgggaggggggcttttccaaaaaaagctgggctcaaaaccaaaaaaagttttttgaaggcca

SEQ ID NO: 657127 - DNA, 83 bp, Homo sapiens
gcggccgcctactactactactactgctcgaattcaagcttctaacgatgtacggggacatgaaataaaagctttgcaaaggc

SEQ ID NO: 657128 - DNA, 333 bp, Homo sapiens
ggcttttccccgtcccagtggagggtggggtggggggggtcggccagcccttaagcctctgggagcacatggagcccaggagggcggcgccggggtgcctgctggggtctcgggaggccgcggtgtcggcatcggccgcggagctgtgtgtaccaatctagccgtgggccctggggcactttgggaagctttgcagggggggcaatttccttgtgggggccgggccggccgtttcggggcccggagggggtgccgggcttgtgccgggtagtgttgcgggcgctgaagctctgggacacaggttgcggtgggccccgccctgacttcggtgga

SEQ ID NO: 657129 - DNA, 320 bp, Homo sapiens
agggctagagctaagattggtcatggaggcagacaactgtgcccaaggtatactctgaatatcagagattgggtgagcttccctgtttggaaatattctgtatatattgttacttgttgataacaggacagtaatgctgtcctgactccactgtgatagacatttgaagctctacgttcaggcttctggcttgcctaaatctctctctgtgattatctgtatcatgtagtatatgaccatacatgatatacagcttcagtgcatctgtgagctgagcatatttgacacaactaatgtcagctagcacagtgcttctactt

SEQ ID NO: 657130 - DNA, 82 bp, Homo sapiens
gctttctggatttattttttcaatattattctaaatcattgatgattactttattaattttcatcccttctgtcgtcttctc

SEQ ID NO: 657131 - DNA, 268 bp, Homo sapiens
ctttgggaggccgaggcgggaggatcacttgaggccaggagtttgagactaccctgggcaacacagcaagacctgtctctacaaaaataaataagtaaataaatagccagatgtggtggcacacgatttgcggtcccattactaggggcggggaggggcgctgaggcaggaggtttacttgagcccgggagttcaaggctgtattgtagtgaactaagatcatgccactgcactccagcctgggctacagagcttagaccctgtcttt

SEQ ID NO: 657132 - DNA, 302 bp, Homo sapiens
ctgcttggcttccgggggggtgcctcgggaaacttcccatcatggcagaaggcaaagggggagccggcccttcccatggctggcggtggtggtgggggcaatatggggggccttcccgcccccttttaagtgaccagatttcatgagaccaacaccaagagggagctctgcccccatgatccagtcccctccccccaagcccccccgccagcattggggatgccaattcaacatgagacctgggtggagacccagatccaggcggagacccagatccaaattatgcatttttcccctaatta

SEQ ID NO: 657133 - DNA, 135 bp, Homo sapiens
ttgaggatcctgaaacctaataatgctttgatgtgcacatggtgctggtggtttaaaaaaaaaaatacactacatttagagatcgttgtaggttatagtagaattgagatcagattctttatcttgcattataca

SEQ ID NO: 657134 - DNA, 230 bp, Homo sapiens
tgccgaatgctttacctaggaggtggaggttgcagtgagccaagatcatgccactgcactccagcctgagtgacagagtgagaccctgtctccataaataaatagaatgaatgaatgaatgaagaattcagtggttattagtatgttcacagtgttttgcaaccatctccactgtctaattccaaaacatttctgtccccccaaaaagaaactccccacagagagagcgt

SEQ ID NO: 657135 - DNA, 898 bp, Homo sapiens
caaatataggctaggtacgagtgctggttgtaatttgtggacgaggcttggctgcaacggttccatggacacaagtcagtacgtgttcagaagctgcagtgcccttgaacagtgagcagagtgcagatagattggcgggcgtgctgaggtggagatgcagctgagtgagcctcatggagtcagtgtgccaacaagctgcaggaggagtgtgctgatccagtgagtggttcaccctggtcaacaagaagaacgctctcatcctggagtgcaggaccagctgcatgctgctcatgtgagtgatgcaggactatggagctgaagtgttcgatgctgctgagccgctgagctgccgggccatgctggccatcgaagactggcagaaaacgtcctgctcagcagcacctgagagcagctcctactggagtgagctggtgtcgcttggtgaaccagctgctgatgagctagtcctgggacctggaccacaagtagcgtgatcgccctggaggatgtgacgagctgcctggagctgctggctggaacagtgtctgccgacaagctgagccgtgtagttgagcctggagggagcgctgcgtgcttagctgatggacgcggcccgggttgcccataacttctctgcgtcccggagatacgtcgtcgaccccggtggccatgctgcatgcggtacgtatcctgtgccgtcccggagggaccaatgccgcgtttttcgctatgggtccggcgggctccctttccccgaaatagggcagggtgagatccctgaaccccagggtatgggatgcagcgatttacttatgtaacggaggatatttagagcactggtgggagtggggtacatccggaggtgttggcttgtcgtgatcatagggggaggatcagg

SEQ ID NO: 657136 - DNA, 270 bp, Homo sapiens
gcgggaggggtcctttaaaatgggtgtggggaccagtgggtcagaaagtgggagcccaaggttttactccctttggtttattttttcgggcccacacacaggtcaaagccaagggcttataaaggtttagtggggtttcaggatgtgacaggcagtccagcctgccctttttgccccctccagacaaacttcccagacaagctcctttgggcctttacgtggagaggggggggaaagttttccccttaaaaaatgggggatttgttttga

SEQ ID NO: 657137 - DNA, 493 bp, Homo sapiens
gtgtgaacactactaatgctaggtacagctgcgtgttaaatcaggccgagggcgagcagagagagaactagtctcgaggtatttgtctgtcaattttttaccctgaacacaccgtggcttaattattaacggatgccaaaagcacatttcccaaaaccgcgctaaaggcgggcccccaaaggcggaggacactacagctccttcctctggggcaaaaaggagggtccctgggaatttcgagggctgcaggtgggcgagcgcagagggtcccaggcaacctgtttgctccacaattgtgcacggcagctggcatgagacggcgcgcgagcggcgttgggccgagcccattgagtccagctgaggcggccgcgacctccaccttgtgaggagcgggtaggaggaacctttgcccgcttgcttgcggattgcttgggatctccgccgcgccctgcgatcccattgaaggctttgcagcaccccttttgttggtgtg

SEQ ID NO: 657138 - DNA, 719 bp, Homo sapiens
atggacgctgaaggcctggctgctgctgctgcctgccctgtcacccttgcagccctggtggacagcgtggctccgagaggactgcccagtggctcaactacgcagccttggtcagcggggcaggcccctccgcagtgcggcgcgttgtggggcaagatcccctgggtgtactggcagtggcagccgtttcgttcgatgccgatatttacccagactcaacttgccaaggtctccttggttccgtcccctgagggcgatcgaagcttggttgcctggttgggccagagttggcctgagtgtcctgtgtggccgctgccgcacttgccttgcttggctggggggaacggggttggccgcgtcaagcactgcttgtgccctggctgcatgttgtgcatttgcccatgtgcttgcctggcctgcttgcatgttgtgagtgcctgcccagtgtggtgcctgtgctgtgagctggtgcacgtgtgtgcagtggcgactgagggaatgacccactgcccgaggggcttcctggcctgtgttggacgcaacgtattggggcgtcctgtgtgggcgggggcgcgcgctctgcaccggcttacggaccctgggtgagggctgcgtgcatgcgtgaaggggattaacgcatgttgttttggcccgcctggtggcgctgtgtgacagtgcggtgctggcctgtgccaacatggcgtgctgacgttcgggtc

SEQ ID NO: 657139 - DNA, 367 bp, Homo sapiens
acacacagagcgttcacccagataggttaatagtggggggtaaggcgaggttcgcgaggcttgctagaagtcatcaacacgctattagtgggagtagcagttagcaagtccttcacagcaggattatgcatgcgcactgtgagtgcgttcagtagttagcagttagcataggcagcaatagtcaatgaggcatgtaagcccagtgggcgcattatgcagcaatgagtgcgccggtgaagcttcagggggttaggatgcagccaatggctgttcctacgagggctcatgtggctgattgaagagtatgcaatgagcgattttaggtctgtttgtcgtaggcagatggagcttgttataaattatgcct

SEQ ID NO: 657140 - DNA, 701 bp, Homo sapiens
gtctttttccaactcctttttgttagtaaaggggggtccaatgtgccctaaggggttcttgcgcccttaaaattttttaaattttgggttcttgcgggggactttagtccataatgtttgttaaagttttcccatttcttgccccctttacaatagtgccaaaatttccaagttgttttgacatgtatcttctttattctcccattcctgaaaggtatatagaccaaaaattaagttttacttttaccaaaagaggaaccacacacactttgattggctcctaggttatatagctaactggtaacaaaccaatttttattaaaattaattttaaaaatttaacttttaaagtttatcttaaatgatgaacatcgcttgtgtttttcttgcatgtagtttctattttaggagaatttgcctaggggtagttcttcaaccaactagtagaaattggtgtattaaggtcttctaccttaaactagctgtcaactttaaactcaaccatttaataattaaatttaaactttacatttgtttattaaagtagtgatgtttctcctcaatcaacttttcttcttaggaaagtaattaatgacaaaaatggaagaacatttattaaagatagaaaaaatgtttaatggtcgtgtacatataaatggtggtaatgttttgacttccttctaattaagctattatttaat

SEQ ID NO: 657141 - DNA, 416 bp, Homo sapiens
ccaaatgtccaacaacgatagactggattaagaaaatgtggcacatatacaccatggaatattatgcagccataaaaaatgaagagttcatgtcctttgtagggacatggattaaactggaaaccatcattctcagcaaactatcacaaggagaaaaaaccaaacaccgcatgttctcactcataggtgggaattgaacaatcagaacagatggacacaggaaggggaacatcacactccagggactgttgtggggtgggggtagtggggagggatagctgaacaagatttaccgtaagctaaatgactcgctgctgggtcctaacatggtgactgatagacatgcctgctccaacaagaattctccacagcgaacatgttttggtcaccgtaacagctatccagcggaccgatac

SEQ ID NO: 657142 - DNA, 178 bp, Homo sapiens
cttagatccgggtaaactagtgcgagtgtaatcgatatggtgtctcagtatgatggagcactgatcacctagtagcagaacctaaacctagaaagacacaaactctcttacactcagagtcaatacactcttctcagtattatctgggtttagatgcatctgtaggaagtaggtaaag

SEQ ID NO: 657143 - DNA, 602 bp, Homo sapiens
  misc_feature (474)..(474): n is a, c, g, or t
  misc_feature (486)..(486): n is a, c, g, or t
  misc_feature (494)..(494): n is a, c, g, or t
  misc_feature (509)..(509): n is a, c, g, or t
  misc_feature (536)..(536): n is a, c, g, or t
  misc_feature (558)..(558): n is a, c, g, or t
  misc_feature (602)..(602): n is a, c, g, or t
agaaatagatgaagaccggatccccaactcacttctcaagtccaccttgtcaatgtctccacggcaacggaagaagatgacaaggaccacacccaccatgaaagagctccagacgatggttgaacatcacctagggcaacagaagcaaggggaagaacctgagggagccactgagagcacagggaaccaggagtcctgcccacctgggatcccagacacaggctcggcgtcaaggccagatacccccgggacagcacaaaagtctgcagaatccaaccccaagactcaggagcagtgtggtgtggagcccagaacagaggattcttcagcccacattgctaccactgggattcccagggagcccagctttgggtctgacagaagttggtatccgggggattcaccactgcagtgtgggaaattcatggacactgggatgtttctttaatctcttgttttttaaaaagtgataanttttggtgtttnggtccttnggagctttttcttcntttccagcccggggatcccttcctccnttaagctcttgtttgaacccantgtccccacccttaaggaccggttaaggaagggaaattgcaaan

SEQ ID NO: 657144 - DNA, 319 bp, Homo sapiens
tagctttctgactcggggctggggccttcaaaatttcaaaaggatttctgctccccgataggaaagcacgcttggaatcctgtgtcacgaacacattttagcacacaagtggaaccaccactaaggcccgtggtgacagtgttcacttggctatggggacaactcctcactacagacagcctttacgctcgtacaccagcacggaacgccctccgaagtctgcgcgtgggcaccacaacaacaacacttgtcagatttgggcgcgtgaccccagcgcctgtatggggcacacaaagggtacaccacatctactgaccat

SEQ ID NO: 657145 - DNA, 262 bp, Homo sapiens
cccccccttttttttcccccggcgtctgtgggggggccccccccccctttttttttccttctttgaaaaaggggggggcccccccccccccttttttttttggggggggggggggggggtttttttttttccccggcccacttttttttcttccccttctttgtggccccccccccccagttttttttttaaacaagggggggggggggggggggttttttgtttttttttttcccccccgcccccccccccctgcccctta

SEQ ID NO: 657146 - DNA, 279 bp, Homo sapiens
  misc_feature (85)..(85): n is a, c, g, or t
ctttggcattttcccgggacaaacccaaaaccctaaattgttccaagaacccctggggtttggttactcccctccatgtggccgnccacattcatgttggaatggaacccccttcccccgttttacaaaatgaagcccccaaatctggctgaatgaaataaattggtgataagtggaaaaaaaagaaaaccccatgtttcatacccatgtatgtgaaagtgtaaaataaaatgttcctttggaatgcctataaccattaaaaaaagcctggaagcttta

SEQ ID NO: 657147 - DNA, 426 bp, Homo sapiens
  misc_feature (86)..(87): n is a, c, g, or t
gatcacggagatttcatgaacctgacgctgaatccgtcgcgttaagcgacgcagaggtccgataaaagcccgccgatatttgccgnnggggctttttttcacggccggcgtttctgcctctgcgattgcgcctacttgcgtgtcgccacgatgaacaggcgcggaaacggcagcagcaccgtgccatcgtcgagtgccggataggcctgggcaatcatgtcgcgatagcgcgtgaggaatacggggcgctcgtcctcgctcagcgctgcgaggaagagccgcagcgcgctcccgttgaaccattcgaccaccgcatcggtactgccttgcagcgggtgcatgtacgtggtgcgccacacgtcgacgcgcgagcacagcggcgcgagcagcgcgtaatagcgacgcgcatcgaagcgctccgtccgt

SEQ ID NO: 657148 - DNA, 266 bp, Homo sapiens
caatgtatcagtagaaatatagtttcatggttagagctttagactgtccttggatgttctggtaggctacagcaatacgtttcacatatggatagtctcctgtacttcaacgtgaaagaagacacccttcagagtcaaatggacaggaaccatcttcagcagtttatccatagcattcattcctagagtaggggtaaaaagaacataggcaaagtttacaaacattttttcaagtagagatgtcttgtcaactggctgtacatctt

SEQ ID NO: 657149 - DNA, 628 bp, Homo sapiens
  misc_feature (166)..(166): n is a, c, g, or t
  misc_feature (172)..(172): n is a, c, g, or t
  misc_feature (193)..(193): n is a, c, g, or t
  misc_feature (309)..(309): n is a, c, g, or t
gcgatagggctgaatcgctcaagtactgcaagggtgtgggttgacctatgtacctctgtgacgatggagtacctacgtccaagggagaggtcagactcacactgcatggattagtgcagaaattgacacctgcagagggatcagtcatatcaatacagcagacttntgaatnctgaacgatgtccgaaatgtnccaacgtgttttgccggtgctttttacctgaacgaagtcgatgtatccatcagatacaatgtcgatatcgtctgtgacctcgcagcgcacactgcggatagtcttgtcacgaagcnttcgggtgacatggtacagcggcatacgcaagacctgaaataagaaacacgtgcttggaggtaaatccggctgaatcgtgacgacatccccactcaagcaaagtcccgtggaacaacaaaaggcaccaaaattaaaagagagacggtaagatgacaacaagagcccagtacggaatacacatgaaatcaaaacacccaagatgatctaccaatacctaacaacaagaccagaaccagaaacggcagagcaagcaagccaatacagaaaaacccacaaagaatggaaaccagacagtcaaaaaagagataataacgactg

SEQ ID NO: 657150 - DNA, 623 bp, Homo sapiens
  misc_feature (465)..(465): n is a, c, g, or t
ggggtcaaattgggctgcatgcaatggctcatgcctgtaatcccagcactttgggaggccgaggcgggtggattacttgaggtcgcagttcgagacaagcctgatcaacatggtgaatccccgtctctactaaaaatacaaaaaaattatccggtcgtggtggcgtacgcctgtaatcccagctacttgggaggctaaggcaggagaactgcttgaacctggaaggtggttgcatgagccaaggtggtgtcattgctttccagcctggacaacaagaacaaaactctgtctcagaaaaaaaaaaaaaaaggaaaaagttgtgcgggggaggttcaattggtagggctcttttctctatttacccattattttctcaaattcccttcttttctcctcttatcaccttgggttccctcttttaaactcgggagttacctcctataatacttctctccgggaacccangtgttgtgttgttgttgttgggaatagcggaagtgggagaagatatatatgtcgtgttaccttgtgaaaaaattttaattggcggtgaaaaaaattctccagttttttaaaagctttaattgtggggttgtgggtaaaatattttgggcaggggaaac

SEQ ID NO: 657151 - DNA, 202 bp, Homo sapiens
catctatcagatggagtctgtcatgctgatggctaggctatgtctgggcctcccacgcagacgatgcacgagggtgacgaggggcctggccaccagcataagccaggcctcggggagggcaccccctaagaccacagtgtgcaagatcacagtggccacggacacggacacagtcatggtggccacggccacagccactaat

SEQ ID NO: 657152 - DNA, 531 bp, Homo sapiens
  misc_feature (197)..(198): n is a, c, g, or t
  misc_feature (377)..(377): n is a, c, g, or t
  misc_feature (392)..(392): n is a, c, g, or t
  misc_feature (404)..(405): n is a, c, g, or t
  misc_feature (428)..(428): n is a, c, g, or t
  misc_feature (434)..(434): n is a, c, g, or t
  misc_feature (442)..(442): n is a, c, g, or t
gtgcagtgccagaatatcattagcgtttcccttctttagtggtttgcttaaatttaaatccctggtaatctgtagaaccttctcctaggaaatggtgaagtctattaggagccacttgtgactccatgacctgttaaaaccagcaatgtgagtatatttggagtaaatttgttccacgtcaagttctggccttctgnngcaatgcaaagaactagtcgttagaacccagttgagacagaccagtcctgtggaataagatcccttaactcttagccatcgtgacatcaaccctagaccgtctgcctggcattgcgtcaacactgcgggctagtaggcagttaatcctccacttctcagtggtgaaccatgtgtttttnggtggtgatgtagangatagttcctgnnccctgccccgtccctgctctttnccaatncctcctangcggactttaaagctaaaaaaaaccgatggccaattcatcctggggaaggtgcttccccggatccctgggcgggtcgggctgcacgggt

SEQ ID NO: 657153 - DNA, 103 bp, Homo sapiens
attagtcttctctaaatgacgagaagatactctgcatgtgtcggtgtggtacatacgacattggaaaatgcagactagtgacatcttacctggcagctcagca

SEQ ID NO: 657154 - DNA, 415 bp, Homo sapiens
tcggctcattagttcatatcattgcagtcgagctactcagtataatcctgatatgaacgagaacacgagcgtgaatataataaactgaaggaacgctctacatcaaccttgtcatgaacaagaaagataagaaaactagctatggacattttgaattatgtcgggagagctgatggaaaagagtcggagatggtaaacgagcaggtaaagccagtttaaattgataaatgtaatcagacttccttctatcctgcattttcatactgacagtttctttctcaggaatgaagagaaatgtataaaatgctctgaatgattatgaatatcgtcagaaacaaatcctaatggaaaatgcagaacttaagaaggttcttcaacaaagtgaaaaaggaaatgatttctcttctttctcccc

SEQ ID NO: 657155 - DNA, 128 bp, Homo sapiens
  misc_feature (103)..(103): n is a, c, g, or t
  misc_feature (121)..(121): n is a, c, g, or t
ctggcatcgccatgaaggtgctgggcgcgtggccctcttctggatcatcttcatcctgggctacctcacaggctactatgtgacaagtgcaaataaatgcgtnacgcatgcacgcgggggntggccgc

SEQ ID NO: 657156 - DNA, 355 bp, Homo sapiens
  misc_feature (6)..(6): n is a, c, g, or t
  misc_feature (24)..(24): n is a, c, g, or t
  misc_feature (50)..(50): n is a, c, g, or t
  misc_feature (86)..(86): n is a, c, g, or t
  misc_feature (95)..(95): n is a, c, g, or t
  misc_feature (118)..(118): n is a, c, g, or t
  misc_feature (154)..(154): n is a, c, g, or t
  misc_feature (215)..(215): n is a, c, g, or t
  misc_feature (246)..(246): n is a, c, g, or t
  misc_feature (280)..(280): n is a, c, g, or t
  misc_feature (292)..(292): n is a, c, g, or t
aggtcnaacatgacgtggtgatgnaaagcccagcagcagcctgccccaanaagctggcactgctgaaggcccccagcccaagaagnaaggggcantgccgcccacctcctcccaaganaccttcctgaggacgctggccccagtgcaggccaanatcccaccccctacctccatatggggccttgcaagtcatcccacaggctgcactgtcaggnagaggaccctgtcccccagcactgggcttcncctagaacttcagtgggggccaagggtgctgagnacccagcaatgnccagggagatacagtcactaacttcatctgtccccgtgccccctcccaggtcctgcctccaca

SEQ ID NO: 657157 - DNA, 612 bp, Homo sapiens
cagataactgattacttctgggctgaaatatgaggattctataaggacgcctggaacccaaggttttaattggggttgggccaagcccattcaccccctctttgggttttttcccccccgggccaattataaacccttggggggggagggggggtggggactcccccagaggggggggggaattttctcttttgcaaaacaataaacaagggggggggggggggcctctttttccccaaaaaacaacacacaagggggagaagggggttttttttccccccccctctttttgggggcccccccccccccggggggggggggggagacgcgccccccccccgagaggggagaaaacccccctttttttttttgggggggggtaaaaaaaaaaaaatttttttttttttttttttttattgggggggcccccccccccgagaaaaaaaaaaaaaaaaaaaacagaggggggtgggggtggtgaaaaaaaaaaaaaaaaaaaaaaaaacccccccccccgcgggcgggggggggtttttttcactttttaaagaaaaggggtttttaaaaaaaaggggggggcgggggggcccccccccccccgggggggggggg

SEQ ID NO: 657158 - DNA, 216 bp, Homo sapiens
tgtagcgcctttctggctctcctcacagattctttcccctcccctccacctgaacagaaggcctccaagtccttttggtgccttgtgaggacttttagaaggggcgtgcagctttaaaaagccggtcctatattacggctcggacgcagtgagcttacgcactgtatatcccatgcagtttgtggaggtcgaggtagtgcagatacacctgcaggt

SEQ ID NO: 657159 - DNA, 189 bp, Homo sapiens
cttgcttgtacgggggacggaaccttgggtggggtcacaccggggacagcgtgtatttccgcgtgacgcccgggagatgtagccatgctcgtctgccgctcctcgtgcttgccgggtgatctccaccacgccatccttggtcttgaccgtcagctcgcccggtcccggtacatgcaaggttacgagctc

SEQ ID NO: 657160 - DNA, 377 bp, Homo sapiens
  misc_feature (12)..(12): n is a, c, g, or t
  misc_feature (40)..(40): n is a, c, g, or t
  misc_feature (95)..(95): n is a, c, g, or t
  misc_feature (106)..(106): n is a, c, g, or t
  misc_feature (337)..(337): n is a, c, g, or t
  misc_feature (355)..(356): n is a, c, g, or t
aaaccttcctgnaaaaaaaacctccccttcccccccgtcnaagtcatttggtgacctttaatggggggatttctggttatgtcaaggctctgganacaggaaaagnctttggccgccttgggtagttgacctgccttttctgactccgggacgagccagtcctaggctgctccgggagcacttgaggtatcccgcaggccatgaggacccactgggcagctcctggacagcctcttggctccagcccccacccgaaagtggacaactgtccgccctggccacctggggactggactgtggtgcacagtggcccaatgtggccaacggaagttttatnaaagacaaaatgtatatnnataaaaaattttataacttgc

SEQ ID NO: 657161 - DNA, 836 bp, Homo sapiens
  misc_feature (329)..(329): n is a, c, g, or t
  misc_feature (513)..(513): n is a, c, g, or t
tacttggactctttcagaaacctgttgaaagttttgaaccaccacttcagaagaatgcttaagaattttggttttctgtactccagagttcctttaaagctctagtgttttagaaacatgagttactacatttaatgtaaattagagtgaggaaatgaaatgaggtaaaatatgtcacttaatcaggaaagagaggtgggagagaaatacagagtagcctccagaaagttgagagcttggatttcaaaagtagaattttcgagcttcttaaatggctggggaaacagaaacatacaattatgtttgccttgagtcccagaagtcctccnacccccaacccccaactgtgaatgtagagggtgggacatcaagaagtggaaatacaacaaaagagacaatttggagaagggatggattgatacagcaccagataagtaggtttgcttaagcataagagaaggaataggcagaaaagtgaagaaaaaaataaaggagattaggagcctgaaatgngctaaagagccctgtcaaaactgaaggtaaggattcttacatgtaaaggccataggaaatctttacagggtattgaacaagaggagctgggatttcgaaggtgacagattagcatataaccagttgtggtggttatagagacttgggtaacaaattggggagggcagagagaaagagaacaagcttggatgcagtttcacctttccatatctgttaatattctgttttcaagtatggatgaagggcttttaaaattttattatttttaaatcttctaaatggcagaatggttttactattaagtattggtgagaaaagaaatg

SEQ ID NO: 657162 - DNA, 1138 bp, Homo sapiens
cggacgcgtggtgaaaacatactttgtgagagaatgaactatggtgcatggcagccagtgattcatttattgtttgcccacgtgtatgcgcatgttatttctctggagttctcaagagttggtgactgtggaaggccgcttcttgcaatggcaagtctcaggaacccagtgcaggtacatctgcttgcaaaccttgttttttagctatatttaatgacgggctttggggaacgagctgcccgcatactgagagacagcttcttataaaccaatggagagtttttggtgtgtgcgagatctctaagccagcgtgggacgggagcgcctcaggataacgttattatattcatttcgtagggtatctctcctgcccaattcttggcacaggcattatgttggaagaaaccaggataaggtacactgcttcggtctgtttaattttttacagttggtttcccttcactttcagtccttccacacacaaaaaatacctcacagagcttcaccgaaatcacagattcaggaggaattgggctttcacactggactcagataccttcttcagtgtgttggaaatcactggcttcacacaggcccaactccagctggtcagggcagagtgatcgtaactaaaggtcagtggggcaatagatccgattcagtgcttttgcttatgcatacagcatcctggctcccagtgtgtgctggagctgatggagtgccacaactgggcacactttcaggacaattcttctggactgagtggtaaatttggctgcaattcaatacttgaggccaaggcaagacccttggattcgataaagaactgcaaagcacggcagccacttatccattgcagccaggccgggaacagacaccgcgatgtgtcaaagtggctacaacttgacccagaaataggcaaggggcagacagcaaaaaccaagtaaagagccccaacactgtaaccagactaacaaggcacggtacaacataacacaccggataccgctgcactagctatacagcaaaacgaaaaaaataaaactgaaaaagctagcagtcacaaaaaacaagcaacagtgacaagcatacacgagtggaaatcactcatgtgtcgtctgctgttcgtgtcttcacc

SEQ ID NO: 657163 - DNA, 371 bp, Homo sapiens
accttcatctcctcccactcgccaaacaggcgtatcggtgcgttctgacagtgtctgtcgggagtcgggagtctccacgccgggtgacctacatgctaagaggtgaggagcttgcctagagtcagtccaggagaggtgcacgcagcctcccatcccaggattcatgttttcatggtaatcagtggtaagaaatctaattgcatctggaaagaatcctcttgaggttaacaataatattctaatttcagactgtacaacacagaaccaaatgagaaacagttccaacatgacttaaataaatacactgactgggctgggtgtggtggctcacacctgtaatcccagcactttgggaggtgggaggagaggaa

SEQ ID NO: 657164 - DNA, 329 bp, Homo sapiens
agacaaccttaggccaaaccatttacccaaattaaggtataggccgatagaaattgaaacctcgcgcaatagatatagtacccgcaaggaaaagatgaaaaattattaccaagcattatatagcaagggctacccctatacctctgcatatgattaactagaatactttgcaagagagcaaagctaagaccccgaaccagcgggctacttagacactaaaggcaaccgctttttgcaaatagtggagttatagtagagcacaacctccggctgtatactgtgccagtagatttagtcacttaattcccaagccctttaaccctttaatt

SEQ ID NO: 657165 - DNA, 133 bp, Homo sapiens
  misc_feature (42)..(42): n is a, c, g, or t
agaggaccttagtactggtctcgtgatccgccgcgtggctcncaagtgcaattctgactctacttaaacatcacctgtatcagggagctcattattccttgaggtcttacatttctttcagcacattttgttc

SEQ ID NO: 657166 - DNA, 936 bp, Homo sapiens
gcaggtgagtaaaaaagtaattaacaaaaacaaataacacaaacaacaatactagaaaaaaaggtcgttacgttatttaaccgtaatttaaagccgcctgctcccggttgacaccctaccgggtggacccccttgtgtttgttcctatgggaagacccttgttctttccctggaacctctttaactgggggtccccctccttccattaatccctgccctcccgtttcccccaggtcaactgagtggctctcccctggctatcccgccagtttcagcaaatgatccaccaaccggacgggttctccacttcccgtttcacaggggggtgtcccccgccccccgtgggcagctgtaaccaagaatttggctgctgtgctccccgccaaaaagtggcgggtgacgcatgtcgccttaccttcagttagtcagaaccattcacccctcctgtcacgggtagtgcactaaccatcactgcaagcccatgtcctcattgaggtttatacaacctgtgttccagtataaacaaacgacgcggggcccaccccccttgctggaagaactcgcgtcctgcttctttccccaagccggagcagccatcacttttgttttaattcccccaccagggtgcacaaacattgatcccaatagcttcccagggcactacttcaactttgtttaatccacgccgaccattctgcaattttatataagtggttcctggcacctccactatcttcgagacatgtttctcctccacccccccctccttctccttgtattggaagaccaattgtaagaacacatgagaaaaataacaacgggaagacctctttctccccgggaagatatttataccaacacaaacagacatacaaacagaataaccagatgataatatagaaaaaacaagaaacaaaaaacagcccacatgacaca

SEQ ID NO: 657167 - DNA, 149 bp, Homo sapiens
  misc_feature (3)..(3): n is a, c, g, or t
  misc_feature (13)..(13): n is a, c, g, or t
  misc_feature (128)..(129): n is a, c, g, or t
gcnagcgtgcgcnccgaccgtatcactccaggcaggccttgtacgttggttcttgttcggcaggagacagcaccatggtgggttctctctgagtctgtggcggccgcgaattccgccgatacttgacnngctccaggagtcgtcgccac

SEQ ID NO: 657168 - DNA, 227 bp, Homo sapiens
gggccgtcatatattggtcttgatgtaaaagactgcaagtacatccctgcattttatatttcccagggtggttcttccggcttaatcagggtagcgttggttggtgaataatgtgcaaagttacaagtcataggttttcaggttatttatgggatttatttctaaattggcctatgtaatttgcatattaggggtctctggtgtgtgcacacatctcgggtttgacc

SEQ ID NO: 657169 - DNA, 439 bp, Homo sapiens
tgttacgcctacccttcttgatgacccttgaaacttcctgcctgatattgccgttgaacccggagcaagccagggctggatcctcgggccggaaactccttgaggacgatgccgtacttcttcctacgagcctcctcccgaagcttgcggttgaactcactgcccgagccgattcgggcatctcctcctcttggtagattatcttgttgctcaagtcccgctccagccgagcctgattccacgtagcaaagttgactttgtcggctgcattacaagccatgatgttatattttttggttgtattcttaggaactcgaacgacgtattcagtgacattctggctgcaagagcctaggaccgccatgggcaatggtcagtggttccgatctggtccgaacccggattcctttagtctcctctggcgtagcgcgtccactcg

SEQ ID NO: 657170 - DNA, 133 bp, Homo sapiens
gcacgaggggtgtccagtggcagtgggagcactcggaacaccacgcaggctgtgtgccatgaatcttgaagtgttcatgtgcatcatgaccaggggttccagactctggtgggaaatcctggatgaccctcgt

SEQ ID NO: 657171 - DNA, 244 bp, Homo sapiens
  misc_feature (57)..(57): n is a, c, g, or t
  misc_feature (61)..(61): n is a, c, g, or t
  misc_feature (98)..(98): n is a, c, g, or t
  misc_feature (124)..(124): n is a, c, g, or t
  misc_feature (228)..(228): n is a, c, g, or t
gaaataatgttatttgcttgcttaatatagtacagtatcgtgtaaacctaattttgntatncactgggaaaccaaaaagttggtgagacttgccttcntgtgatactggctttattgtggtggnctggaactgaacccataatatcttccaggatggcctgtcttgaccgtgggctttctctattgtatctgtgtagttgatccacgaggagactcttttgtttttcntgttgtgcgaccgggt

SEQ ID NO: 657172 - DNA, 385 bp, Homo sapiens
aggacgaggatgaggatgaagatgaaattgaaccagcagcgatgaaagcagcagctgctgcccctgcctcagaggatgaggacgaagaagaagaagaagaagaagaagaagaagaagaagaagaagaagaagaagaagaagaagaagaagaagaagaagaagaagaagaagaagagaagaagaagagaagaagaagaagaagaagaagacgaagaagaagaagaagaacgaagacgaagacgaacgaagacgacgaagaagaacgaagaagaagaagaaggaagaagaaggatggcgaggacgtaaacgcagaagaacggcacgcgacacgcggaggacgagagacagagggagaacctccatagagaccgaggacacgcgctcc

SEQ ID NO: 657173 - DNA, 1128 bp, Homo sapiens
gttataccgagcgtctttaagtggacgcgtgctagttccgccctggggaacccccactcaccccgtgtttggaccctcccatttgaagacccccggggcccgaatctccaagccttctcggactttttatacccttaggccccccgggggccggggatcaccacagtgtgtcaccacccggggaaaccacgcgttaattggccccctttagggcccttaattttagggtgcaccgctgtaattaggggaccaaagtgttgggcagccccaaaaaaagcaagggccttgggtaccccggtcccccggaaatttccccccggggaataatctggtctggaccccccacaagcggttcacgcccacaaacagccggttctcggaggcccccccgggggaggactctcgcacggccacatggatcccttgagggccctggaaatggtggaaaagccccccaagggcccctaatgccccctcgtgggcgcgaagtggcccccccccttgcacgccccacgaagagggctatctggggagaccctctcggtgttcacagccccagtgcaaatggtgagagcttattataaggcacgccctcttcggcgagataagggagagccccacaattgagggcccccccccaaaccgccctctccacacacagggggcaatatcttctctgaggtgttcacatcgtggatatgggctcgcacgaaccgccgaggcgccactctggagggatacccttttctgggcaccctctgcccgcttggcttgttgtgtgaaagacccagaaatgttgcccctaacgtgttttgtgcgctccccaagcacggccctcggggaggaaccctcgtggggttctcccacggcctcgttcactcgccctcgtgttctcgtgcacccactccacaaagaaaggcttcgcacgctgagaacacgcacgagtcccatccacttcacgcacgtccacttgaaaggcttcttagtctaaaacccgtggcctctgccacacgtgctccctgccacgcttcccccctcgagggttgtgtaatcacataattaattctgtgttagccagtagtattttcagctactctctattgttataaaatgtagtactaaatctga

SEQ ID NO: 657174 - DNA, 126 bp, Homo sapiens
aaaaaagcctgaacccccacccccagctggttgagagccccctgcattttgcctcatggtgcagttagcgatcccaggccttcaaaagtacaacatcagctcagcaggaacgccggctccccgagg

SEQ ID NO: 657175 - DNA, 394 bp, Homo sapiens
aagtcttacatctggtgagagatagtccaggcatagcaaccctgactccataaactttaatttaggaagttggtttggcctgctccactggcatgaacatagctgaagggggagtcatcgaccgtggaaatgagatttccctcagtgccaattttaaatccagcctccaggtcatcgtatttttctggatgcttctcacagtcacattttttgtttgtttgttttacatgaaagagcacattccctttccccaagtcaggtttaccattttccattgctcttattaaacgtatcttattctaatggaatgttctcagagtttccgccctccgctggcctgggtaatagaggtctggagttggacgccctaggacggacagtcactcagatgccg

SEQ ID NO: 657176 - DNA, 123 bp, Homo sapiens
gagggctgtagagcagtgtcaaaaggacccggtgggccagacggggtggacatcgtgaataatcatagtgggcttctaaatactggtagcagagatgacttctgattcgtaatcgttagagtc

SEQ ID NO: 657177 - DNA, 455 bp, Homo sapiens
ccgagcgcgcctttcaactgtcttcctcatcctctgtggcgatcgtggcgtatgcccatcgacttcttgcgttctgggtttggattactccccctcaacggcctgctatcatggcataagcattcgacgagagtgaggcgaaggcttacgtttacgtgcgggagagatttggtgtatgattgccatgggggccagtttttgtcgtgtgagaagacgcaggccggatgtcatctctgtccctctgtgtgacatctgggactcagaagtgaaagggggctattcctagttttattgctatagccattatgattattaatgatgagtattgattggtagtattggttatggttcattgtccggagagtatattgttgaagaggatagctattagaaggattatggatgcggttgcttgcgtgaggaaatacttgatggcagtttaccatgcagcgcta

SEQ ID NO: 657178 - DNA, 1469 bp, Homo sapiens
gagggtacatgcaggcgcgagtaggtctagaggcaggctaaatagcaccgcactatcataagaagagcttatcagccgtgtatgcatgagtcgagcggatctgcatgaatgcatgatgccctggatctcgcgtgtacctgacgtccggtgtatcgtcgatgtttcccataactagtcaggagacataaaagtaagctgaaagtactgacacagcgtcaggaccaggctcgaggcaatagtgatggaagacacgggactcgataggtgactcggctagcatggcgcatgaatccattgcccatagtttgccgtaccaattcggcttcgcgtgccacgagtacctccttagcaggcaattcccaggatgaactagttagactcgacgaatcgggcaggcctctaaaggcggaagtcctcctgggccacgtattaagtccaattctagaaaattgcaaccctatggaccgccaggtcgacgaatgtgcttaatctcgggaaaacacttggagcaggcaggtttgaacacatctcgggaaccataaccgggggcaggggaggcggtaagactgcattctacaagaggcatcccgcctataagcaaggtaatcgtgtatacacaccgataacaaagttatacatttcggcccctaaaaggggaaaaaggccctaaggggggacgggacatcgcgctttggggtggaacccttttttccccctctttggcgaaaagcttggctagttcagccagaccagaaatcccggtaaggggattaacgagtccacaacttaaaccccgctgcaacactctggcataacggaaacccgcacagcgaattggaaccgggagcatgaacacaagtaagaatctgcaacccacattggcaaattcccacaatgtggaatcaggttaacctcataggagcgcagatacacttcccctagggttgggacaagggcccatgtggtataccacccacctccaagataccaaactcttcctacagcagcgggtacccttgtttatatgaaaacctacccaacgccaaacgagcaactgttgtagtacccaacacaggctgtattctcccacacgcggggttgggaacagctcgtgcctaaccgttaaaacagccagcgcccaaaagagaagcggccccaacacctatatatcatacacagagaccccgggctgtataaaacgcaccacgacaacaacccgtgagcgagcgagtactaacctaacacagctaatacaagggcggccgtctgcactaggtggcgccggcctcagcggtacagagaagcttccacatagggctgtgtgcaaaagaggactagaaactacaccgctacacccgaacaacatgcgctatccgacattggagaaccaacacccaagaaggctagcgaggatcgacccgttgtaaacggcgccacagagcgatatgagaggagagcaagcaagctcc

SEQ ID NO: 657179 - DNA, 829 bp, Homo sapiens
gagaggacagaaaatgacgcagtgtgcatcatgtgtattctcagcaggtcttcttgaaatttacctaaaaatatgatgctctctcttcagaagaactgctcttgtcagtaccagttacgtcaaacaagaccagcccctagatgttaactatctgctattcttgatcatacttgggacaatcattattaaatatccttacactaggaatgagaagaaaaaacacctgtccacaatttatggaatatttccgcatttcactagcattcgtgatcttttacttttggtaaacacatttccatccatatgtcttgcagggatttgtcacttttaagcacttaggtgcactaaataccacatctggctattatactcaaattatttccttacttatggcttttgtgcattatccagttttcctgacagctgtatagattattgcctgaatttctctaaaacaaccaagctttcatttaagtgtcaacacattatcttatctcttaacagtactttactttggattcagtccttgcttatgtttgggagaccagcatctacaaagctgaaggccagaatgcttatctcgtcatgccttctatgctagcattcagagtactgcctggcattcatgcgcgatcaattggagcttcaaacttgtggaagagtctactgcaaggaaaagatactccattgaggaaattatttccttcacccccctatcggcacccaaaatttccagcagggtgcaccggctgcaacgccggccaaccaccattgaaaccggccgaaataaaaagagaaaaagccggggagacccgagaagtacaacaac

SEQ ID NO: 657180 - DNA, 116 bp, Homo sapiens
actctaaccatcccttatctggaaaaggggaacaggcgggagaataggtaaaggaaggaggagcagtgagaggatttctagagccaaactttcctcagctgctttctggtaatttg

SEQ ID NO: 657181 - DNA, 872 bp, Homo sapiens
  misc_feature (657)..(657): n is a, c, g, or t
gcctagcagtcaacatgaaggctctgatggtctggggcttgtcctcctttctgttacgtgtccagtggcataggtcttatgcaacaggtgtgcagttggcgcagaacgtctgccagcagagatttgggaatggatggtctacagggcgaatcaatgcctaccaaactggtatgtgctcttggcctcaaattgggcagacgctgatgtacaacaacgacgatgcatacataacgctactaatgtctggaagacatgcacatcattcgtgactctcatgggcatatcttcgagcatcaatagcgcgttacttggtcgtaatgatgcgccaacagcccagggagctacgttcaatgcctggtcatctgtatccttgcagtgctttgctagccaagatatacatcgctggatgctggtatgctatgtgcacaagagaggttgtccgttggatcctaccaatggcgattccagcagctatagaggtggcaattggcaagcacagtcggttagtcattaacaccagaagattgtcgctgtcgaagtacattgtctcaaacaggctctcgtagcgcagatggtcacacgttctcgcatgaatatctaatcgctctgcctttcaagtcctcgtatatatagagctcggtccgtcgatccaccgantttcaaacgtggggaagatcacgggacgctctagagagcttgcaccgagggggttcaacgaaggtgatcgcaagctctaattattctcggctcgtctccaaatacctaacacagattagagtgagtttcattgtacccattcgaacccggccaagtggaccgcataacccttggcctcgccgtcggcgtatcccatttgcgtaaagggacgaagg

SEQ ID NO: 657182 - DNA, 888 bp, Homo sapiens
agcggggtttgccccagagatctaaattcaagaaggagggcaccacacctaggaaggtaaatccagtatcagaaggttgctaaaagattaaagatcaagaagcttggaaacatcccatgggtacaatgtcttagaaagtctttaagtcacataccatgaatttttgcttcattactgaccatatatgaccttggaggaactctttttttttttttcccttcctaactcctatttcctggtttcccacctaaccctggatctcaccgtatattcccagttctttcaacccccgcagttatatcctaagtcccagcaaagtccatttcctttccaaaagagactatcatgtgtctggaaaatatatattaactggtgtaatgtctaaattatgagacgccagatgttaaacagctcctctatgggtcatatggaactattgttccagggaacgcagatcaccttggatgcgtcttagaaccccaaccccaagaacgaggggaccatattcctaatctttggaatattatcccggggaatattatttacacctgggggggtatcccatatttaaatcttcctttctcttccttctaagctctttaatatttacaacaatctttgagacactctggacgcccggggatttcttcttaaccaaagagaacacatatgggcgggccctctggacagggaaacgaagatgtgattcctctttatctccaaaacccttggcgaggagaaattcaaggccatattttaaccgggcgcagggggcgaaccacgggggtaccttttcccaaatgtgacatgggggtacaccgggactcccgggccacattttatccacacactttccccaaagttcaatcctccacaccttttcccctg

SEQ ID NO: 657183 - DNA, 220 bp, Homo sapiens
tctgtaggctagatataagttgtatctaaacaagtgatttaaaaaaaaaaaaactaacgaattgccacgatgataacactgaacttgttcccctcttgaaggacatgggaaattgtaccgaggttcatttcccccaccactgaatcatctccctccatgtagacggggatgagaagtcaaaggtggggatgagcacacaggtggaacacacaggtgggga

SEQ ID NO: 657184 - DNA, 1243 bp, Homo sapiens
  misc_feature (10)..(10): n is a, c, g, or t
  misc_feature (833)..(833): n is a, c, g, or t
  misc_feature (860)..(860): n is a, c, g, or t
  misc_feature (877)..(877): n is a, c, g, or t
  misc_feature (913)..(913): n is a, c, g, or t
  misc_feature (1067)..(1067): n is a, c, g, or t
ggttttccgncagctcgccgctcgctatggcgtcgctcaccgtgaaggcctaccttctgggcaaggaggacgcggcgcgcgagattcgccgcttcagcttctgctgcagccccgagcctgaggcggaagccgaggctgcggcgggtccgggaccctgcgagcggctgctgagccgggtggccgccctgttccccgcgctgcggcctggcggcttccaggcgcactaccgcgatgaggacggggacttggttgccttttccagtgacgaggaattgacaatggccatgtcctacgtgaaggatgacatcttccgaatctacattaaagagaaaaaagagtgccggcgggaccaccgcccaccgtgtgctcaggaggcgccccgcaacatggtgcaccccaatgtgatctgcgatggctgcaatgggcctgtggtaggaacccgctacaagtgcagcgtctgcccagactacgacttgtgtagcgtctgcgagggaaagggcttgcaccgggggcacaccaagctcgcattccccagccccttcgggcacctgtctgagggcttctcgcacagccgctggctccggaaggtgaaacacggacacttcgggtggccaggatgggaaatgggtccaccaggaaactggagcccacgtcctcctcgtgcaggggaggcccgccctggccccacggcagaatcagcttctggtccatcggaggatccgagtgtgaatttcctgaagaacgttggggagagtgtggcagcttgcccttagccctctgggcattgaagttgatatcgatgtggagcacggagggaaacgaagccgcctganccccgtctctccagagagttccagcancagaggagaagagcagntcacagccaagcagcttgctgcttctgatcccagtnaagccgggtggggaatgttgagggcgccacgcagtctctggcggagcagatgaggaagatcgccttggagtccgaggggcgccctgagtgaaccacatggaggtcgggataactgttcaggaggagatgatgactggacccaatctgtcttcanaagcgaaagtggtgacccgggcctcaacagcgtgaaattccaagtccctaccagatgccgaaatccgaaggtgccacagcctcctggaacccctccccacgagggaccccaaggcctcgacgcaagctgcctggtcccaatttcccgcaatgtgaaccaggctgactgagtccttc

SEQ ID NO: 657185 - DNA, 1297 bp, Homo sapiens
  misc_feature (459)..(459): n is a, c, g, or t
gcttacgctagtcggggacggtaaccgggacccggatgtctgctcctgtcgcctatcggactactctaatccctagactcgactatgcgtgagtgcgatctccatcgcagcggtcggccaggctggtgtccatgattgggacaattggccgtgcgtgtggagctactgacgtgctctggaacacgggtcgatccgagccctgatggccagatgcctagagttgacgatagaccatcgggggaggagatgactaccttcaacgaccattcgtacagttgagacagggcgctggcaaagcacagtgcccctcgggacatgtgtatctgtaagagcatatggaaaacccaacaggtcaattgactggaaggttcgacactctggacacccataccgcgcaggcgtcgttccactacctcaggcagcatcattgcagcagtgcgaagggaatggaatgcatgnctcaattgtaacctagtgtcccgatgggggcaacataacagccaattggtgcatacggcacggaatcaattggagacgctatgatggtgcgggacgcgaaaatgtacagtcgaaggctcgagtcatgaagcgcaagggtgcccaaaccgaggttgcttctgcagggggaacctttcgtaaaggggttcatacccgaaccagggcgtatacgaagttggaggacgagaaccgtaggagctctcctcgggtgtttcaaacccattcgctcctagacaactccaattggtgcgatgaccaggtccgtccgtcccagctttcgggtatctaaatttgggcgcaaaggaaaagtcacaatagaggccctcggcacgctaggcgtcgcgaaaatctttaaagcgccgagcaagctcccaagggagtggtaccccagccatggcttaggtgaccgctttgaggaaggtctccgcttcacccagaagtgttcctcgattaaggctaacgaaaccgctaagccgccaaagaaggcccgaatcctcttgggggaagggccaacttaccttggcaacttgcgttcggctccctttcgccactgtgggctgacgaacctacaattggggcacggtgcgcccaatgcgtcaagtggaatcgactttcttgggtccgcgtaaacgacagaaccctttcgcgattagtcctggaatgcccggcccctcatatgccgctaatcagaccgtgaaaaggccgtataaaagccagctccttttcaatcctaggcgccaaggaattgtggttgttacccttcacgaagttcaccacttggtctttccgtcttgggaag

SEQ ID NO: 657186 - DNA, 1374 bp, Homo sapiens
taaagaagtaagccttaatttcctggtttggcgaaataaaacggggctaagtgggtgtggcgtttggggggattagtcaaagagaccaaatcccatatcctcgtcccgactcctccgactcttcctgggcttcaaccttagctgggggctgcagcacgcagcagggagcacgctggtgggtgggcagcagccacagggggcagaaggccaacaaagggcaagatgggatacagccaaagaagggcctggacccttttcaagcaagggggagaacggtggtacacccggtgctccaccagacaagggccagagactcggttgggacacccggttggatgagataagaatgggggccctggctggcaaacagtgggggtacgccaatctggcaaacaagacaacgggccacacatggcggagaaacccctccagggaagcagaagaatggcgagagatatctccacctgggggcaatcaagggcaccattcagggtcggtacaactagctggccaattggcgcgagaaccacccggcgagggattagccccagacccacacgggcagaagagggggggacacaatgctgtgacgcacgtggttcaagccacggcggtggcactctcgcgtggcaccaccaactgagggacacacagacacgtggacacaagctgtgcaccatcacacacacggcactccacaacagggcgtgcacccatggggggaacacacatacaacaagcgtcgcgtcgaaatacccacataaaagagcccgtagggaccacccacaaggggacggggacataccacatcggaggagcaccacgaaacacccaagacgagtacgtgagcgacatgacgaaccaagggaggacacttcccccactggcgggacaccagaggggacccccagcacgcagagcaagcaacacaagatcgggaaccactatagtggggcggcccagcgaaaacaagtgactcccacggaacaccacaggggacgggggcccactcctagggtgggaacacaccacaaaaggacccaacaataatccccaagcgggaacataagagggccacacagagatcaccacacgacagcgaggaggcatgcaccacgaagtagacactcataatgcagcgaagaccgaacggaagcagagatagcgacgaaacaagcaaaacaaacgagccacaccgcggaaagagagccatgagcaatacccgcaaacaactgttcaagccaccccacaagtcggtgcccacccacaaaaacaaagtgcaccagcaaacacacacacgcgggcagtcacatccagaataaagagaagcaggacgaaccaccgacatagaacaatcgaacacagcgaccagca

SEQ ID NO: 657187 - DNA, 1245 bp, Homo sapiens
  misc_feature (835)..(835): n is a, c, g, or t
  misc_feature (862)..(862): n is a, c, g, or t
  misc_feature (879)..(879): n is a, c, g, or t
  misc_feature (915)..(915): n is a, c, g, or t
  misc_feature (1069)..(1069): n is a, c, g, or t
ggcagaatcgaccgaatcggctcatgggcgtggtgtcatctctagcaacggctaccttctgggcaaggaggacgcggcgcgcgagattcgccgcttcagcttctgctgcagccccgagcctgaggcggaagccgaggctgcggcgggtccgggaccctgcgagcggctgctgagccgggtggccgccctgttccccgcgctgcggcctggcggcttccaggcgcactaccgcgatgaggacggggacttggttgccttttccagtgacgaggaattgacaatggccatgtcctacgtgaaggatgacatcttccgaatctacattaaagagaaaaaagagtgccggcgggaccaccgcccaccgtgtgctcaggaggcgccccgcaacatggtgcaccccaatgtgatctgcgatggctgcaatgggcctgtggtaggaacccgctacaagtgcagcgtctgcccagactacgacttgtgtagcgtctgcgagggaaagggcttgcaccgggggcacaccaagctcgcattccccagccccttcgggcacctgtctgagggcttctcgcacagccgctggctccggaaggtgaaacacggacacttcgggtggccaggatgggaaatgggtccaccaggaaactggagcccacgtcctcctcgtgcaggggaggcccgccctggccccacggcagaatcagcttctggtccatcggaggatccgagtgtgaatttcctgaagaacgttggggagagtgtggcagcttgcccttagccctctgggcattgaagttgatatcgatgtggagcacggagggaaacgaagccgcctganccccgtctctccagagagttccagcancagaggagaagagcagntcacagccaagcagcttgctgcttctgatcccagtnaagccgggtggggaatgttgagggcgccacgcagtctctggcggagcagatgaggaagatcgccttggagtccgaggggcgccctgagtgaaccacatggaggtcgggataactgttcaggaggagatgatgactggacccaatctgtcttcanaagcgaaagtggtgacccgggcctcaacagcgtgaaattccaagtccctaccagatgccgaaatccgaaggtgccacagcctcctggaacccctccccacgagggaccccaaggcctcgacgcaagctgcctggtcccaatttcccgcaatgtgaaccaggctgactgagtccttc

SEQ ID NO: 657188 - DNA, 113 bp, Homo sapiens
cagccggcgcgcgcgggtatcgcggctctgctcttcctgacgatttgtcgcagcttcgctgcggtggctgtccgccgtcagcgtgaccgcgcctttgttggcttgatattgcg

SEQ ID NO: 657189 - DNA, 133 bp, Homo sapiens
tggagttgggcggtgtgcagcaactcaaggacggcctcccagggccatacctgtaccttggtccacattaatactgcagttttgctttttatgtgtcagaatggttttatgccaaataatggtgatttcctta

SEQ ID NO: 657190 - DNA, 330 bp, Homo sapiens
cacagtcttagcaactggcgcaccaggggattccatcccatgcctggctcggtgggtcccacacccaaggagccttgctcactgctagcacagcagtctgagatcaacctgtgaagctgcagcctggtggggggaggggcatctgcaatgctgaggcttgagtaggtaaacaaacctgctgggaagctcaaactgggtggaccccacttgcagctcagcacagcctgctctctagattataccactgtgggcagggcatagcttgaataaaaggcagcagacaacctctgcggacttaaacatccctgtctgattagctctgaagagagt

SEQ ID NO: 657191 - DNA, 1383 bp, Homo sapiens
  misc_feature (10)..(10): n is a, c, g, or t
  misc_feature (494)..(494): n is a, c, g, or t
  misc_feature (973)..(973): n is a, c, g, or t
  misc_feature (1000)..(1000): n is a, c, g, or t
  misc_feature (1017)..(1017): n is a, c, g, or t
  misc_feature (1053)..(1053): n is a, c, g, or t
  misc_feature (1207)..(1207): n is a, c, g, or t
ggttttccgncagctcgccgctcgctatggcgtcgctcaccgtgaaggcctaccttctgggcaaggaggacgcggcgcgcgagattcgccgcttcagcttctgctgcagccccgagcctgaggcggaagccgaggctgcggcgggtccgggaccctgcgagcggctgctgagccgggtggccgccctgttccccgcgctgcggcctggcggcttccaggcgcactaccgcgatgaggacggggacttggttgcctttttccgatgtgagctgacggagattgacataattggctcgatggtccatagctgtcgaagggcatgacgatcgttgccggagatcgtaccagttgaagccgatgacatagaataggaggttgcctgggcgtggactcacccggtccacactgtggtgtctcacgtgaagagcgccctcgaaaataatgggtgcacctctcaaaattgtgagtcttgcgataggcttgctaaatggggnctgatgggtatggaaaccggcatataatgtgcagtcaggtctgtgcctaggattacgactgtgtggtagcggtgtgccgagggaacagggcgttgcgaccggtgggggcgacaccaaaagacgtcaggcattatcccactagtcccctttcgagtgcagaccgtgtctgagggggcgttcgtcggcaacacgtcggttgcgagtcccggaaagggtgaactacgaggggagcacatgtcgggggtggggcaggactgggaaacaatggggtccaacgcaagtgaaactggagcccacgtcctcctcgtgcaggggaggcccgccctggccccacggcagaatcagcttctggtccatcggaggatccgagtgtgaatttcctgaagaacgttggggagagtgtggcagcttgcccttagccctctgggcattgaagttgatatcgatgtggagcacggagggaaacgaagccgcctganccccgtctctccagagagttccagcancagaggagaagagcagntcacagccaagcagcttgctgcttctgatcccagtnaagccgggtggggaatgttgagggcgccacgcagtctctggcggagcagatgaggaagatcgccttggagtccgaggggcgccctgagtgaaccacatggaggtcgggataactgttcaggaggagatgatgactggacccaatctgtcttcanaagcgaaagtggtgacccgggcctcaacagcgtgaaattccaagtccctaccagatgccgaaatccgaaggtgccacagcctcctggaacccctccccacgagggaccccaaggcctcgacgcaagctgcctggtcccaatttcccgcaatgtgaaccaggctgactgagtccttc

SEQ ID NO: 657192 - DNA, 285 bp, Homo sapiens
ctgcttaatgagaataataggagacctcctaatatcaataacaaaaccgctcaaaacttagtcattgtgactcatgcaaataccttgtaaggtcaacttaatattacaaatactagcatcagcatcggtgcctcttatatccctatttcataacaaaagaaattctcacaccactccagcaagccagcaaacagctctggaggaattacctgtacaaccaagtgctacggtcactctggaattttaatatacacacacacacacccttactacatgtcatacata

SEQ ID NO: 657193 - DNA, 242 bp, Homo sapiens
tataccctgccagaataggttcaccgctgggtggagttgactcagcgtatcagccttaagaggagcttttttttgtcgcgagatatcattctaaataaaatgaaataatcacaaggaggaaggcaaccagctgttaggggaaaaataaggcagattaaggagcggggagagaaattctttgccaacctacgaggagttgggctgtatttttcaacaggtggggagagtggagcacacacctt

SEQ ID NO: 657194 - DNA, 153 bp, Homo sapiens
actcaccactcactcaactagaacaacctctataagtggtcctataagctgcattcaggtgtagcaccttattttcttttgagaccgcgtttcgctgtgcccaggctggagtgcagtggcccaatcacagctcactgcagctttgacctccca

SEQ ID NO: 657195 - DNA, 182 bp, Homo sapiens
aactggagcaacaccagtctatagatatagcaagttgagaagatgaagctcagaaaaataaaagcgaaatgaaaatggttgtggaacttatggagccacaaaaagaaaatatggagcatcttaaacgtgtgaaaatagaagcagacaaataagtatgatgcaatttaattcaaaattaatcc

SEQ ID NO: 657196 - DNA, 265 bp, Homo sapiens
  misc_feature (78)..(78): n is a, c, g, or t
  misc_feature (101)..(101): n is a, c, g, or t
  misc_feature (111)..(111): n is a, c, g, or t
  misc_feature (113)..(113): n is a, c, g, or t
  misc_feature (118)..(118): n is a, c, g, or t
  misc_feature (141)..(141): n is a, c, g, or t
  misc_feature (149)..(149): n is a, c, g, or t
ctcggtcgtctctgaggatccccccttcccccacagtgctgcattttattaaattgaaacaagttgttgattcgatanttacaagacttgtacaaaaattnacagcgcctntnaggancctttggtggaactggtgacacntgtgcctntccggacagaggaaggaagtcccgatcacgtcttacggcaagcagcgagcctagtagtctgagcattccctgttccgatgctgccaccctcactgtgtggaaagggggaaccagag

SEQ ID NO: 657197 - DNA, 112 bp, Homo sapiens
ttcacgctcttttttcgctgcaacatcatctcaaaatctaacataaagagaggaaaacatatggactttctgtcagattttgagatgatgttgcagcgaaaaaagagcatga

SEQ ID NO: 657198 - DNA, 335 bp, Homo sapiens
ctcttccttataaagagggtgtttgaatttcagccatgtgtccttgctttgagtctcatatttgtgggattcccatgtccatgtgcatatgaaatttgtgtgccttttctcctgttaatctgtcatagctcatttcagcaaaccttcagagaggaaagaaggaaagctttacttccatctctgcaatctgtagattacttataatacctaatacagccaggcatagtggctcacacctgcaaccccagtgctttgggaggctgaggcaggaggattgttggagtccaggagcttgagactagcctaggcaatgtaatgagacaccatctctagaa

SEQ ID NO: 657199 - DNA, 1086 bp, Homo sapiens
tagtggagtgggagtcaggcctccccgctttgtgctacctgtggaccggctctcctccgggcctcgtcatcgcgctgcgatgacgcgctcactgttcaagggaaactttcggagtgcagaccatcctcagcaccatcggctatgacaacattatccaacatctgaacaattggccgcaagaactgcaaagcagtttgacagactttctaacacagaacagggccgcccattcgacacgagaggtatggcacaagatctgctcaacctctctaggaaggacagccgtgtggacacgtctgcaatattcaatgagccttgaagcgggtcccttgcaccagtcttcacagcagccaagtacgacaatgtgcgcccacatgtcccattcagcttgccacaagagatataagcaagaacgagcgccagtgacagattggcaacgcactctcacgcggtacaaacgccaaaaaacttacaaccgactatacacgcacagaggcctcatacctggcttgctatcccactacaccccaccaggacgctttaccacattcacgcaacccatggcattgccacgacagaaacttattgacagccagaaacattgccccgggaacaacaggactcgccgccgtactccgcgcccgttcagtccgggaagtgccctaactgggggactccgcgcaggcgccccacgcaacagtcccttttgctgacaccctgggcactttgccaggaccgcagctcaaggcacctccagacacaagccttccctgccttggacgcattcgtgcaccccatgcatcaagggtcccaacaaacaaggtggccgcaggtgtgcacaattcaattccctgcaacggccactctgcaggccacggacaagttacacggcacttaccagcatccctcccggcacttgcatatgtgtaatacattgtacatacccgcccagccacccactctgagtacccacagtacagccacgtccccaacctaccccgacaccgcctccacacctgccacctgacacctaggccaccgtgacccacgcaatacaccgccgcctgtcccccccccaactcccct

SEQ ID NO: 657200 - DNA, 888 bp, Homo sapiens
gctgagaagcggggccggggcaggcctgcgcatagccagcctccgtgtgagtcccgggacagcgctggtagggagtcagaaggagcccagcgaagtgccaactacctaagagacctcggggccgacctaaaggtgataggcataatacaaggtgtgctgccaagacccggaaaaccatcacaacgtcctaggaaggaagaccgataggggcgagacccagaaaaagctggagcaaggagcgaagagcgagggcatcttcgcaggagtcctcggaggaggagcatgtggactccatgcgattgcccgatctgcttaccatcatctggatgggatgccagcattacctatcttgggagctggagagcagcttttgcttcctgtatctcaagggggctgttgcgtctatttcggagagtcccataaactatcatatcggtggtcttggggccacagtgcagcgcgcaccgaatctattcctaactcatgtttgccacgcatcgagaatacgcaatcattgtgaacgactatacattaccgcagttgggcattgagccgctgacgagtgccacattgtggggcccttgccacatgtgagtgctgccaacgtggggtgcacacggcactttgtggtccccttctaggagtgacagcacgagggaccttacttcacccatcgcaaggatgcaactacgttggcgaaacgtcgcttttaacatcgcgcaagtggctgtacgtcctcaatcttaattgggggacccccaatgtcggttttaaggccgccttttcccacaagggttataaaggggccttgttaggcccacgttgggggcaacacttttggcttgcagcggtatctcgccctaaactacctcacttagggggattggg

SEQ ID NO: 657201 - DNA, 1258 bp, Homo sapiens
  misc_feature (792)..(792): n is a, c, g, or t
cccgttcaccactactcacgagggtgcagtcggcgtgagaaactggcagcatgcacttgtcccctctgagaagaagctagccacttctcggcaagcacagccttgacctgtccccactctgaactaaagaaggaactgccgcccagggaagtgagccctctggaggtagttggagccaggagtgtgctgtctggcaatgggggcccgtgccagtgcaagggggtgctgcacgtctgctccctctactgggccctatgcaccctccggcaggatcgagcctgaacgatcgggagtctgctgctgaagcaagaagccattcgtgaggtggactcctcagaggactgactagcctgagggaagggcctgtagaacatgccagggtgcacagtgacgctgatcttggcacctcacccagaagtgacgccagagtgtggcccctaaatggagcaggcagagagtgtcggaaagacggatcctttcactgtccatacgaccttagtgagcctggtgcctcaatggtcccgagagcttatttgacatggcatcaacagctggagcgcctctcgcatagagcgggcataaagtcccagtgttctcctcaccaaggaagactccggggagtccctactaagcacagtatgatcgcagggttgctcaagcctcgcatctcctcaaggagggtgctcctataactttagggtaccagtacgttcgtagtcctattagaccctcaatcccctcccttgtaacttgttacgctgtgaacgtcgcatgtaactccataagtcgaangggcacctaaaccacgcacctatgtttccgcaagtaagctctcggggtaactctaccccatccgaccggagccaccgtttagcatcttgcgtacctgaggtttccgagccttctaggcgcctatgcattcgacgtcattggtgggctcctttgtgaatagtcccccttcttttaggcctgggccccaaggacgcatgcggcatagtcctccgcaataatctattaaacagtgcctacactccattgagagaccagtttgggggacataaggcccataccttccgaagagcattgctcggcggacaaacccctataacgctttcagatagccccatggccttacgagaaaccccttgtttttccccaatgggtcagcacaggggctgaacagaccaacacgtcatacctgtatgatttgccccgcagtggagttgtggcccccaatcccactattataaagggactc

SEQ ID NO: 657202 - DNA, 780 bp, Homo sapiens
cggactgagccccccacccgcgtgcggcgctctcctcctcctcgcagcagtcctgccgctccgaggcgcgcttgtttttctcctgctctcccccactggcgtccccttcccaatctcgccgctctgaccggtccggattcccggatcttcaccacctactacggacgcacctgcgcatcaacgacatctgcaggctaccaagtcatctctttcggccccaatacgaagcagagactacgatctacaacgcagaagctgcctatacgatcatatccacagcacacaaaacaacacatagaaaaatacacataccaaccaggatagcagagacccaaacatagaacaacagtaaaacaacgacaccactaaacaacgggcgagcccgaaacacacacacaaccgacacacgccagcaacaaacaacccaacaccaacacaaacacaaccaaacaccctacgacagcaaacagccaaagataactcccacaacacaaccaaaacagggtcaagctaatacagtaccaccacacagcgaaaatccccaccccataccacgcacgatcgacacccaacatgccacaacaccaacgacacacaccacacaatgcacagccaaacaacacaaggatcgcaaaaatacacacagcaaccacacagaacccgaagcacgccgaggaacgcctaccctgagaccaaagagacccaccgaacacaaacaatcatcccatcacgcgaaaaaacccatgaatccacaaccagaccaacaacgacaccagacga

SEQ ID NO: 657203 - DNA, 189 bp, Homo sapiens
ttttggggaaaatttttttgggccctttggccggaggcctggtttatgggttggggccccatccctgttttttggtcctggtcatcccctttgccttttccgttttggacctgggcctaacccccccccccttttttttaagtgagggggtggggtggtcaataaaaccccatgtgcctttggccccca

SEQ ID NO: 657204 - DNA, 126 bp, Homo sapiens
ctgtggcattcgggaaccactgggctccagcctgggagacaaagtgagatcctgtcaaacacactaaacccttttaacaaaggaacatctactatgtgctaattgtgcgtgtcggggataacatca

SEQ ID NO: 657205 - DNA, 1183 bp, Homo sapiens
ccagagagccctgagcagacccaccgcctgccgacggccctagttaccatcacaccccgtggaggagccagcagctgcctgcagccggccccagtcaccatcaccgcaaccatgagcaagcgaggccgagacccagcagacgaaagaatggacacacaggaacagcgagcgcgacacaaagacagacgcgcgcacaccacagagccgccgctagcaccatacacaggaacgacgcgacacctacagaaaaacacagaacacgaacacagaccagcacgacacccacaaaccgtgacctcaccggaggccaaacacgtgacaccaccaacgagacagacagcaccagcgacaacacagaaaacaagaggcgaaaaacgatcaacgacacaccgacaaatgcgcaaacaaccacacccagccgcaaaaccaccaagggtagacagcaccacagcaaatacgccgggcccgacgcggcgacggagacagaacgcgcacgcgcggcggagacacagcgagcccacaccgccgacgaggcgacagcgacagaagaagagggcgagaagaggagggagggagagcacagagaagggagcaccagacgagagacaggaggccagaagaagaacgaacacagagagcaggggcaacgagggagaagaataaggagaacgatagaaaacaaaggcaagaaaaaaaggagcgaagacagggcaaagagacacgcgaaaaagcgcgagagaaagaaacaaagaaaagaacgagagaagagaaagaatggaaaagaaaggggaggcgagggaaagaggagaaaagagaggaagcaaggaaaggtgagagacggacgacgatagcgagacgcaagcaacaaggagcgcggacaggaagaggagaggagaaggaaagcgcaaacgagaccagacagaaacagaaaaaagacacaaaggacacatgccacgcgcaccaaagagagccaccgaacaagatacggacaagcagagcaggacaaacgcatgagagccaagagaggcaaaagaggaggaggggcgagctgggcggaacagcgcggccaaaacaccgaaaaaaaaaggagaaccagagcggcaggggaaggaggaggcacaaaaacgcgaggggcaaacagaggagggagagaaaggaaggaacagacgtgaaggtaggagag

SEQ ID NO: 657206 - DNA, 368 bp, Homo sapiens
atgaataatttccttaaattgttatcatctcaagttgatatcactttcaggaaattatgtcatatctactaaccattatgcaaaacccctttcttttctgccttaattggatcaacctgaactgaaaatgctgctactttcttgccataaataactgattattgttaagtgcctattatatgcaaaacaagtaatatttaaagaaatatatctgattagttggcatcaaaaggcaaagatagaacaaggaagcatttgtgtgctgagcaagtggtaggcacaggaagtacttagctcagaggataaaagcattctgatgtgactgggataagacaaacattcagtgagtaagcaaaaacatgatttac

SEQ ID NO: 657207 - DNA, 561 bp, Homo sapiens
  misc_feature (222)..(222): n is a, c, g, or t
gtgtgctgggtcgatctacagacctgtgaaggtgagttactgttgagttctttatgagtgtataagggtgacattcctgtgccagtctccagttacaaaccagtatgcccagaatttccttactatcaaggaaatggggctaatcctttctcactggtgttctggtccttctgaatagaccgaactaggtctttactgaagtctgacagagctgagctttgnatattgagactctatactccctttcagctaagaaattaaggagagtcttagcatcttcctgagccttccttgattggggcatagaggaaagtgttatctacatactgcaagaccctgacctgaggacgggaaaacttagaggggtcctttgacagtgcttgtccaaatgagtgagggctgttttgaaatccctgaggcagcaccatccatgttaactgtgtggtctggccggagggatccttacaggcaaacaggtattgagagtcaggatgtaacggtatgcagaaaaaggcatctttaaatctaggactatataacatttagttccttcaggtattg

SEQ ID NO: 657208 - DNA, 247 bp, Homo sapiens
ggccccaaaaaaaaccaaaccctgttgaccccttgattttgggcttttagcccctagaactttgaaaaaattattttttgttgttaaaaaccatccagtttgtgatattttgttatgggagccctaaaaatttagtcatggaaaaacatagtaatccttttatccagacaggaaatgcaaaaaggacattttttttttttgaaatgggggtatgtatgggggggtagccagtaattaaaatgaaata

SEQ ID NO: 657209 - DNA, 100 bp, Homo sapiens
cctatctttatggcccctgggataaacccggtgaggtgatgcgcgccattgaagttatcggttttatctcctgcgttctgttaggggcgtatccgaatgg

SEQ ID NO: 657210 - DNA, 172 bp, Homo sapiens
tggtacataaactccaacccttcacaatcatggcagccaacgccacttatccaggtgaaccactatcacgaaaaaaactctacctctgctatactaatctccctacaaactctccttaattataagcattcagcagccacagtaactaatcatatttttatactctttcttc

SEQ ID NO: 657211 - DNA, 547 bp, Homo sapiens
ggtggtgtctagaggtcccctacatgctcgaaattgaagagacagaaaaaacccctcacccccagcaggatgtgtgacctctggtgcaatggtgagttcatgaagtgacttcttcagtgttcagaattctcatctgagtaaagggagtgggggtggagtgggtcatctctgaggtttttttttttgggctctgatttgggtttcggtcggcccaggattcaggattggagagaagggtaagggttttacctcttatggtggaaaccggttgagatcacagagaatatacggagggcttaaaggggcagaaccatagcagggtgcggtaagtgggggaagagttttgggagagggtgaatttggcatgggacctgacagaatggtgtatggggaaggggagcggtaattcgggtcggctcacatctctcatactcaacctcatttctcctaattctgaaatctggagatcctctatcactaagagggaaaactacggtccaacggggacactttatggctcaccccatatgtgaaagttggtcgagca

SEQ ID NO: 657212 - DNA, 391 bp, Homo sapiens
cgaatcagctctgtaccgtgaacatcgtgtctttcattgtaccaacagaagagtctgtctccatgcgctccttgatcacgtggcccagcgcgggcactgctgccagtgtggcacactgcacggttatttccgttctacaaaatcagtgtgctttccagctctcgtttgtctttttctttttctcaatcacagtggtctcctcattattttaaagtggatttcccatatttatttcttagttctgtaattgaatttaatagggttacaagcagggttacttaaaaatgttcagacaagctagcactgttgtagcactggaactgaggttattctaactaggtgtttaggttatccggttatatactcactgagctttggacacgaatgttca

SEQ ID NO: 657213 - DNA, 353 bp, Homo sapiens
atacacatgagaactgaagtgcagcatccttgcttggccacagcattgtgattaaggacagtctgggccctgtggaactaacaccgcttttaccggctcgactgccatgcaccctgcatgtactgggtacctcgtggacaagttagcagatcgggagcgcaaggtcgccctcacggccatgatcataacgtatgtggtgtcaagctcccttctgcctttgctcttcccatccttccgcctcgaactgcccctcagatcagatcctggccgtaggccaccgcgagcccacaacccttgtcctggtccttgtttccctatcatcttactgcattcagtcctcccctctatagttc

SEQ ID NO: 657214 - DNA, 554 bp, Homo sapiens
accttgccataccagcccatcagtcctctgagacaggcaagcccaagaaagtcaggggcctatgtgagccaaagaggagagaaggtgatgcctcagcccagtgtttctgccccacctcgcttgtggccttcggaacttgatttgcaccacaggaaaatgggcaatgaaaacccctccctaactggcttctcagtccactctgaccagcccagtgcacagcgcccaccctgcagctccagatgaggcctcactctgtcacccaggttggggtggagtggcacagtcacagctcactataacctcaagctcctgggctcaagtgatcctgccacctcagcctcctaagtagctggaactacagatgtgcaccgccatgccaggcttgtctaacatttttatgtgttgcttcatccagtttgctagagtttttggagatttctgtcttcattcatgagagataatagtctgcacttttattttcttgtgatacttttgtctgatttgttatctgggtacatacccgccttgaaaatgaattgatgttttcctgcaaa

SEQ ID NO: 657215 - DNA, 1351 bp, Homo sapiens
tggggtttaaaatttttttatccttaaagaatattaccactaacaaatgcaaacaggctaggacatggtacgggggtggaggacggctatagctctctttgggaaagttgaaaggttgtgggtgtggcgtgtgggccttcatgtgccacacgtgattgtggctcagttaaacagggggcacatgtgccaaacaccacagggcattcaaagtgctgcctctgtgggtgtgcctcacaagtgtgttctcccgtgtgtctatattcttgggcctttcgaagggagcacacccaaaagcagagcaattgtgaagcaaaggggctttccctaaggtgtgcccctttccagggctttgatctcgtgaagagttcccagaaaaacagcgtggtttttaaagccagatatgtgtttataagtgtgggatttatttctccaccaaacttattccagagaaagtgtttctcttaacccattcaccaattttcccgtgtgaaagttacaaaaccaccgtggagttaacgagagccgtggggcgcaagaaacagaggcgagccaccaagtgggtggcccaccctttcataaatacgtgggtggggtccctagggggcagggacaacaggggcaaaagggcccattatagtgtaaaacgaccaagaccccccttcaaatttgccaaagtggagttaccaataaaagagatttatcacgtcgtgaaatcggaattatttttaaactccggtattgggaaaagaccaaagtgggcgagcttaaaagagccaagagtcctaacagtcctagtgatggggggggtggacaacgtgtgcggagcggaaacaccaagggcagtcccatagccggaaacacagaagaaaagggaaacaactaagccaggggacaaacaagggtcccgtgcgcgccaggatgaacccattggagggggacaacaacacacacgagtctggaccccacacaatcaaaccacaagagggaagaggccccacggaaaaggcgctcccgaaacagcgccgacactcattacatcacccgaacggaataggggagcgcaaagtctagcaccagacgggccaacacagaacaacactcgcaacatacccgacaaggttacaggcgaacacccatcccccggaagggcgataacctagcaaccaaacacacgatatgccccataggcgaggacacgaaaggactccataggagcgagaacagaccgctagaaatgcacagccgaaaaagacacgaggaggcgaaatacgcggtcgaagcagacagcgaacccccaaatagagagaaagcactgaaaaactagagagaacaagagagcgacactcacgag

SEQ ID NO: 657216 - DNA, 601 bp, Homo sapiens
gcctgttcgcagctgcggcagtgagtatgtgtgtgacggacccccggccgccgcggtcgggaccctggctaccctccttcttgcccgcgggctgtggaatagcgcgtgccccctcgccggtgctcgacgtcgtcccgatccgcaccctcgactccgtggtcgagggcgcagtctcctggagaatctgagcatggggaagtaaacgtcaggaacggatcgcaagtgaggattatattaatatgataattagcacgcggttcacggttactgactttttatgaggttggtggctatgagactatagaagcatacgaaggatgatctttatcgagatgagtcatctagtgaactgagtgtgatagtgaggtggaatttcaactctatagccaaattcattatgcccaagatcttgatgatgtcgtcagggaggaagagcatgagagaacagaactctgggaattcggaatctccgagtagtgaaccaaatgagaagaagctaatcgtcctttccagatagtgaggtcgtccaggtgtcagatgggtcagaggtcatcactttgtctgatgaagacagtattcatagatgttcgcgacagaatgg

SEQ ID NO: 657217 - DNA, 428 bp, Homo sapiens
gacacagacactgggatactcacatattccagcaccaacacggggacgctcactattccagcaccgacaaggggcaccgacacgggacgctcactattccagcactgacaaggggtaccgacatggggacgctcactattccagcaccgacaaggtggcaccgtcacgggtacactcactattccagcatcgacaaggcgcaccgacacgggtatgctcactataccagcaccgacgcggtggacgctcactattcccgcaccgacaaggggcaccgacatggggaggctcactattccagcaccgacacggggacgctcactattccagcaccgacatggggacgctcactaataccagcactgacacgggtacgcttactattgcaagcaccaacaaggggcaccgacataggcccttagaggtgt

SEQ ID NO: 657218 - DNA, 164 bp, Homo sapiens
ttgttggtgaccacgtttatgctcacgtgccacacgtggtgcccattttctgagcttccttatttagactgtgctcctctgtggtccacgttctgattctaactgtcggctagtatcactgtcacaaggctggacacttggaagggctggggtatgtgaactac

SEQ ID NO: 657219 - DNA, 953 bp, Homo sapiens
tattgatataaaaattaatcttaggttacaatcatagtttttttttctcccctctgctccccagtgcataatttctcgcttgggaagtttctagagttggttaaggtatatggttttggtatattttggagaccaagtctcgctctgttgtccaggctgggagtacagtgggcgtgctctggggtcatttgcaacctctgcctcccgggtcaccaagcaatttcttctggctttcaggcattcccagagtagcttgggctgtaacaaggcatgctgccaccaaaggccagacaattttcggtatttagtggttggaggaccttgatttcacctattgtgtggccaggatgggtctcaatctcttagacgctaattggatccgccctcctgtggcctcccaaatgttgctgggataataggcgtgaaccattgcaccttggactgaaaaccttgtctcttacaaattacataattaactcaaacacaactaactacgtaacacatgttcactggctgtcccaatattcgaccggttggtgcaccatggtctaacaattatttgacatcacccggaacattaaaccgtgtgaaaattagggtgtttgttacgttatgtgttaaaccagctggggtcgatatttgatggttgccgcgccacacacactgacacgttatccctgttgcaaaccgggattaagaagtaatccgtctaaataggtggtacaaccccgcaggtaccggaaactgggcgataaaatacaccgggtggccccctgtggcgaagggaatcggcactgggtgtacgaccggacggtacggaagataccaagggcaatccgggacaggacggaggcaacatccatgctatcaagcgaagaggagtaatcgaaaaatgggagtgctagaaattcacagcagggctcataaaccccgaagaatctagaaacggcgga

SEQ ID NO: 657220 - DNA, 314 bp, Homo sapiens
tcagagtactattaaacactggtgatacaaagatataaatatatacatgttcttatcctcaaggagactctaggttttgtgagagaagcagacatgagacaaattggcaggcaattatccttctggtattaaatagttgatgagaaacagaccaacttgtaaaatagtctctcaatcataaatgaaaggcatattttaaatcattaacaatataataagacttacttaggtctttcctctgttcttgaaccagggtggagatctacattatcaagtttcctgtaactcacagggaacagatcgttgagaagctt

SEQ ID NO: 657221 - DNA, 325 bp, Homo sapiens
  misc_feature (36)..(36): n is a, c, g, or t
  misc_feature (42)..(42): n is a, c, g, or t
  misc_feature (47)..(48): n is a, c, g, or t
  misc_feature (60)..(60): n is a, c, g, or t
  misc_feature (72)..(72): n is a, c, g, or t
  misc_feature (94)..(94): n is a, c, g, or t
  misc_feature (100)..(100): n is a, c, g, or t
  misc_feature (120)..(120): n is a, c, g, or t
  misc_feature (127)..(128): n is a, c, g, or t
  misc_feature (130)..(131): n is a, c, g, or t
  misc_feature (158)..(158): n is a, c, g, or t
  misc_feature (190)..(190): n is a, c, g, or t
  misc_feature (276)..(276): n is a, c, g, or t
  misc_feature (283)..(283): n is a, c, g, or t
  misc_feature (285)..(285): n is a, c, g, or t
  misc_feature (289)..(289): n is a, c, g, or t
  misc_feature (321)..(321): n is a, c, g, or t
ctcatatcctcattatcctccaaagggccaagaatngctcanctganncccctcaggacnaggccagtgccngaaacgcatccgctaccatggnagaggncgctttgggatcatgggggnggggggnngnnattattttgtgaagttggtggaagggnccccacctccacctgagccaccaaagacgggngttgcccatgccaaagagtatattcagcagcttcgcagccggaccatcgttcacactctatgatgaggagattcagactccacagnggggggntnttgncatttattttctaaaaataaacaaaaattganggcg

SEQ ID NO: 657222 - DNA, 102 bp, Homo sapiens
actctagaggacctccagaggcacaaggaggaatggcacggagcgcggcgtagctggttggcagctgcacaggatgaccccactggccagagctcggcaggt

SEQ ID NO: 657223 - DNA, 1008 bp, Homo sapiens
aagatgggaggaattatgcaatggccgaagctaacacgtgccggcgagcatctcacgtacaaagaataggttgctgatcgggagaactactgtggaccgaccgtacgcgtctcggcgtgtcatagatgcgacacaatcgaggtgtggccattcgacgattacgctgagggacgagtctatctcgatggcgcaacgtatcatctctggatcgatcgcaccgtggccgcattaagggtggtacatagtgtgaaccatgcaacgggcaagggactccatcatctggtccgcttgtgtggaacggatgactgagccagtgtgcagcgatcctagtggttgagtccgcctcaaacctatgctgcacatagatccgtgagattcgatcctgcgttagactgatgcgctaaagaaggaatgactcctttggattgggactcgtggttatccgacttgactttgcataggaaccgttcacagcacgcgggtcgtagcaatctgtccacacgcctggggccgaaagtgtccgggccactggtgcagctatgtagaatgtcggccgtcttttctaaacgatgcctaccaagggttacactgaagcgctgggacggtctgcgaaggagaagcacgtggccctgaacgctttagtgaatgcctggatcattcgaggtctcgcttgcaccacccatcgatcatagaacgttaattttacgtacgatttcccgagcaggcagggacttcaggctccaagcctggttggctaccatatcattaggcggttttttgtatacccatggaagaaaattattcggttgaactccaatgcgcggaaggagaacggggggcccccattagtataaagcgaacacctgtgtgtcacgggttttgtccccaaagaaaaaccgggggctaacacaatgggtttggaggtccccggcccataaagattccgcggggggatacccaggtgttccccaagtcccagcggggttccaagggcattgggggcccaaa

SEQ ID NO: 657224 - DNA, 189 bp, Homo sapiens
gctcgaccattccattcaattccattcctttccattccattccattcctttccattccattacggatgattccattccaatccattcgatgccattccattcctttctgttccatctgattccattcatttccattccattcaatgccatttctttctattctattcctttagtttccatgtcgacgcg

SEQ ID NO: 657225 - DNA, 214 bp, Homo sapiens
  misc_feature (1)..(1): n is a, c, g, or t
ntctagagatccggtgagtaattaaaatctcatctgatgggactattctgcttagtcagtttcatagtattaagtcattctggattaaataaatatatcacttatgatatgagtatagtgtctcctgatagaacttttggtactatgaagaatccacattactgatacaaaatttttctggtgccatctattttacctgatattaatatagtca

SEQ ID NO: 657226 - DNA, 846 bp, Homo sapiens
cgacaaacaacagcaccgactcaaggcttagtatatagccggtgcttcatcggccgagggaataacgaatgcatttagctgctgaagactgctattgggacatgctggcatacactgataatatgtggtcatcggcatggacgtagctggactccgagttcttcagtgtctgggaatgtatgaccatggactatcaagtctacccgatgaccccagcaggtacatctcagcctgaccatgctggctgacctgtacaagtccttcatcaatggactacccagatggtgtctatctgaagatccctttgaccatgtgatgacttggtggagcttggcagaagttcacagccagtgcaggaatccagtgtagttggtggtgatgatctcacatgtgaccaacccaaacgagtgatcgccaatggcctgtgaactgagaatgtcctgcaacttgcactcctgctcaaagtcaaccagatctggctccagtgacctgagtctcttcagtgctgtgcaatgctggcccagtgccaatggtatggtggcgtcatgtgtgtactacatcgtcctggtggtgagacttgaagataccttacatcgctgacctggtctgtgtgagtgcttgtgcaacttgggctagaatcaacgactggtgcccctatcactgatattgagcagcttggacaatgttacaaccagactcctcagaatttgaaattgagctgtggcagaaattggctacagtctgccggcaggcacttcagaaagccctttggacaataagctattcgcagtgcacccttcggacacttgtgggacaagacctacctcgttaactaagcagtcagcc

SEQ ID NO: 657227 - DNA, 890 bp, Homo sapiens
tatttcactcgggaatcaaaaagggggggttccgggaaaaggggtctctttgtgtgccctctccccacttcttctccctgtggtgtgtgggcccccgtggtggccttattagcccttttacccgtgagcacccaccccaaagagagtgtggggacaagcccccttcgcgtgccgtgtgtgttttttccccaaaccccttttaatgtgggagaggggaaaagggaggagaaaggggagaggggagcactgtgcgcccctctctctctaggcgcatctctgtggagaggggccctgtgccccacagctgtgggctttaccctttccctgtgggggtctttctctccccgcggaaaaattgggggaaacaaacccaaaccccgtggagactaaacaccccacgagaggtgtcacaatagtagaaaaaaaaaaacaaaaacaaaacaaaagaggggcgcgggcagaacaagaagaaaatccccgcggagggggcgccaccaaagataatagacgaggcaaaccgcgcagcaaattcggtgataacaaagagggggcccccacaaccagaggagaaatgcaatataataaaaaacaagagagacaggcggccccgacacttcaaaacacggcgccagagaaggcgggaaaaaacacgcaaacaaatggagagaccaattgtgaaagaaaaaacacaccctaacaggaaggaggggagtgagaacaaattggcgggcacaaaatatcccctcaagcaggtcttaaaacgctctaaggggaacaataaaaaaatttctaccggtgctttaatcgtgtgtaaccaacgagccgaatttccatggtcgtaaaaaaacatttgtgatcagggcacaatgaatggaaaaactatttacggc

SEQ ID NO: 657228 - DNA, 349 bp, Homo sapiens
cttgttatttagtgtttccatggaatacagtgggattggagggagctagaaaaattcaggatctggtccaatctgccagtcttccttaaatatcgaaaatacaccaggtgtgctatttcagagccaccctggccagacactccaatcgttatgcctgaaggttcggccatcggctgataggaccggagcacttccagatactgtgatcatcgtgactttgctcctcttgagggccagtggctgaattatgggcttggcacatataggatccgctattattcacagtgatgttggggatcaagagctcttgtgtggattgctggaacgtcccattgataaaccaagagta

SEQ ID NO: 657229 - DNA, 436 bp, Homo sapiens
cagcagcagcaggagaagaaggcagggataggcctcatgttgcctccaccccctgcactcgaggatgacatggagtcccagctggccggctccctcatctcacggcgggcagtttatgtgtgacctggacacagacagagacagagccagggccggcccttccgcccccgacctgtccacgccggcctagggttccagactggttggccttgtttgtttgggcggccctggagtggacccctgcctccccctttcttggggcttggagggaggtggcacagccccctggacttctcccgtctctagggctgcatggggagcccggggagctgagtagtgggggtccagagaggacccccgcccccaaagaattggttttggctccagccttcccctggccccgtgacactcaggagttaataaatgccttggagga

SEQ ID NO: 657230 - DNA, 827 bp, Homo sapiens
caaacacgaacaggtagcagaccacctataattctcacattgtcctccgcgtgttaacgtgctcttctcgcaataccggctccctctgcggcccgcccctttgaatcctgtgctatatctaaactccgccaccccctctatagctggtcgggtccctattagggcctcagaatatgaaaaaatctgcgttttacagtcccccccagacccctgctcttcgagaaccttattgccgctcctctataatgcaaaacacctccgggcttctccctctaaccaaacagcgacaatcacaatgtccggccccccctcccccgtatccccttttccccttaaattccaacacctcttcccactcctctgggaaacccccccctccgcgaatattggacccctctgccatgaccccgcccatatactgtttaaaaaaccccccgccccctcaattttttagaaaaaaaatcgccatcacccttttatataatacctcacgagcactcacggttcaaaaaacaacagggaacttgttccccacccacatatttttaaacagtttctcccgcagcgactcactaataacgcgagaccaacaatctggctccaactaaaacatctgccccgagtttgtgtaccccctatagtagctcaccccaacataaaacctttagcgtctttaatactgtccaaagagaacgggccattctttcagactgcccagtttcagagaacgacccgttattcctctgcaaatatttctcgcgcccccagagagcacccctcaccctttcttttcaaaaaaaaaacccgggagtttttcaaaacaaaac

SEQ ID NO: 657231 - DNA, 152 bp, Homo sapiens
  misc_feature (1)..(1): n is a, c, g, or t
  misc_feature (23)..(23): n is a, c, g, or t
  misc_feature (78)..(78): n is a, c, g, or t
  misc_feature (104)..(104): n is a, c, g, or t
ngcattggttcccttcatttcantggatttgacagagttgattacttttttgggaaacacttctttctctgcttccgntacaccaaactctcctattttttttnggttggttggttggcctctcactggttactctctctgttccacctctc

SEQ ID NO: 657232 - DNA, 325 bp, Homo sapiens
cgacatgataccctgcgttatgtacccggaatggtacgctgttactgtatgaaagcagagagaaggcagtaatagggactttagggggaagagactcctgaagagcacacgtggtggtactttggaggcaggactggctaataaggcaagcgaggtgaaggcactttatgagcagtcaccgaataagaaaaggctccacaagggcttttcactcccaagtagcaagcagcttgccatggcaggctgggaacccagatttgacaatgcttctaagatcagagagggaagtcttgggaaggagtgtaggcatctgtcgttgtgatta

SEQ ID NO: 657233 - DNA, 1161 bp, Homo sapiens
  misc_feature (111)..(111): n is a, c, g, or t
ggagaagctggccacaatgctcaatctgggcccgggcaccggactgggcgctccctctgatcgagtgagtgtggtgagtcccagtagcccggagtcgccctctaatcacgntcgtgacttctcgtgactgtgtctacgctgttacatgcgcagcagataaccctggagccacgagggagtgtagacatgcgccatcgtgccgtgccccaggccgttcctgacgagcccaggcgcccccgtgacccccagtgcttccccagtggcctggtcagcgagtgcgaggagactacagatgcatccactatggagcgaaagtcctgttagaccacttggacttctaacgtcccccttaggggaaccggtggtactgaatagcagccggggactgactgagcccgtgagcagccacgtgctcctaccatgtgggatgaccctcgtggcaccgagtgaacaaggtagacggaccggtcaggggcccgtggccgtttgcaggatcgggggcctttgtgccccctgtggcttgtcgtaaagggagtgcctgtggccttgggagctcttcggtggacatggtcgggcacggccgtagaacctcgtgggctgtcccaagacggggggccgggcggggcctcgcattgccttagcagttcctctgggcgaagctttggcttggggtggcggtatccccttggggggccccccctacgctgtattgccgccccttccggagttggttcctccggcacactaaagcgcgctcggggggtctcgccgctaagtgcttgggaatcgacgcctgagagtcccccgaatcccgtgggtgaagccccaagcgtccgaattggaaaagccgccattcgaactaactttcgccggaccgctagggggggccccccacattacgccgtggaaaggccccgccccccttttggcccttttggcttgggggccttaagggcggccctagggccccgttaaggcggaacttggttggggcggtttaccaaggataggggaactgcgcaaggaaagggcgccggggcgcaataaacatcggggggggaacagcgaatatgaagaggaggacaaataccatcacattccccacaatattaggccctgcccttcgtccacacttacatatagcacctctcctggggcgcc

SEQ ID NO: 657234 - DNA, 179 bp, Homo sapiens
tgttgtaacacatccgcatgatcaacagatgaataagcaagaacgtggtatatacactcgagtggtagtattattcaaccattaagaaggaaggaaattctcgatacatactacaacatgaactgaacagccatttaaaaattcaatgggtgacaacttcttggggtgtgctttcaggt

SEQ ID NO: 657235 - DNA, 261 bp, Homo sapiens
agctggataatctgcgacatgatgcatcactgggtggatggcgttgtataagaaaaagtgcagaaggatgagttccgctatcgaatgtaccagactcaggtctcagacgcagggttataccgttgcatagagacagcctggtcacctgtcagtggcagcctttgtagagaagcagcaaccagtctctccgatcctattgagatagacttccaaagctcaggtcctatatttgatgcttctgtgccttcagacacaccatca

SEQ ID NO: 657236 - DNA, 877 bp, Homo sapiens
  misc_feature (8)..(8): n is a, c, g, or t
  misc_feature (83)..(83): n is a, c, g, or t
  misc_feature (100)..(100): n is a, c, g, or t
  misc_feature (196)..(196): n is a, c, g, or t
  misc_feature (202)..(202): n is a, c, g, or t
  misc_feature (208)..(209): n is a, c, g, or t
  misc_feature (221)..(221): n is a, c, g, or t
  misc_feature (251)..(251): n is a, c, g, or t
  misc_feature (257)..(257): n is a, c, g, or t
  misc_feature (259)..(259): n is a, c, g, or t
  misc_feature (279)..(279): n is a, c, g, or t
  misc_feature (290)..(290): n is a, c, g, or t
  misc_feature (296)..(296): n is a, c, g, or t
  misc_feature (298)..(298): n is a, c, g, or t
  misc_feature (322)..(322): n is a, c, g, or t
  misc_feature (350)..(350): n is a, c, g, or t
  misc_feature (382)..(382): n is a, c, g, or t
  misc_feature (384)..(385): n is a, c, g, or t
  misc_feature (391)..(391): n is a, c, g, or t
  misc_feature (400)..(400): n is a, c, g, or t
  misc_feature (402)..(402): n is a, c, g, or t
  misc_feature (407)..(408): n is a, c, g, or t
  misc_feature (412)..(412): n is a, c, g, or t
  misc_feature (424)..(424): n is a, c, g, or t
  misc_feature (429)..(429): n is a, c, g, or t
  misc_feature (436)..(437): n is a, c, g, or t
  misc_feature (457)..(457): n is a, c, g, or t
  misc_feature (468)..(468): n is a, c, g, or t
  misc_feature (475)..(475): n is a, c, g, or t
  misc_feature (518)..(518): n is a, c, g, or t
  misc_feature (524)..(524): n is a, c, g, or t
  misc_feature (526)..(526): n is a, c, g, or t
  misc_feature (567)..(567): n is a, c, g, or t
  misc_feature (775)..(775): n is a, c, g, or t
  misc_feature (865)..(865): n is a, c, g, or t
tttttgtntatcttagccgcaaactacttctgagattctctttcttttttgttcttctagtttttttaaagaaagcataaacnatgtatattagtatggnatgtcagcaaatcccctcttagtcctttattctgtgatttgggccttctacaaaatactttgtgattctcactaatgaatattaagaacatacccnattttnactaannagtagtgaaacngtggttggtagaatctttctcactatatcncggtcncncattatatttgagaataacnaatgagccccntataancnggtaattgtgtgtgtgtaaactcnatttttaaggtgtaatagtagccccctngataacttagccctgtgactatccctttttcncnntttggngatataccncnttttnncccnatccgataaacncttcnccccccnnttgcttgtccctttcccccntccttaatagncattctntatatcacctgacaaactgcctacacacatatgtgtatatatncacacnanagtatatgtctatctacctctttcgctttgcctaactttcncaactgagatgaggcccaccctctcatttatatcttctagaatacaatatcaccaactgaaagtttctaataagagtttcaacttagttaatcagaaatactggctactgaaaattctgaggccaaagagctgttattcagcttagtatattctaggcttacaaatcagtcaaagactgaaattatcaaatgcccatgaaagaaaganatttttctctttgtatttccttctaataacaaaaagaaaatatctttacaacaagctttcactttttaaagaattaaaattattacaganatctccctagtc

SEQ ID NO: 657237 - DNA, 333 bp, Homo sapiens
ctcattgtggggcactccgaggctgaggactgcaaaacctgtggctacaattacaaacaacttccgtgctgggagactgtcctgggccaggaaatgtacaacacttctgctcttatgatctgctgactagtcttggacagtcgcgctagctcatccagttttcctacgaaagctcctctggtggcctactgtcctaggggcgctagggtcgtctagagcgggcgacccaggcagttccagtgtgcccgactgaggtgctggggcgtcatcttacgcgcagacggtggtctgggtggggagttttttctgccctttactgcccctgcttaacac

SEQ ID NO: 657238 - DNA, 1103 bp, Homo sapiens
  misc_feature (152)..(152): n is a, c, g, or t
ccgatttctctgtgggggggacctcgccacgagggacttattattgggcccctctccactaattttgcgtctcatagtggttgtatcctcccacacggggggtccaaatggaccacaatctccgtgcttgggtcttctaaatggggacacancacttcatgcaattgtctgtgctagtaccgccaaatttgtcgcaccgccaaacccgtgggtttgggtgaatattcgtccccatatttcctccaattgggggaatttgtcttcttacacaagattgtctgatgcgtttttggcgacacgagcgcagtgggcgcccttccaatagtgttttttatggggacaaattctccccctatcggcgttgtggcgaccctcccctcgggcttttttttggtggggccgccctaacgcaatcgctgcggtctcagggccccccctccacacccttggggatggcccttctagttcgcgtgggggacccgtcgtctctcccccaaaatggggcaaatggccccccccccgcgaaggagccgctcaccaaatgtccggagtcgtttccccccaataggtgtcaaacacccaggtgctctatagatggccgtccccgcacgtgggtatatgccctggacacctgccgctcgcacgcgtagagatgcccccccccaccgtggaaacacacgtggcgcacatccaccagacaccccccacacccttattggcgtacaccaaacagggggccacatcttctcacatcgccacacccatgacacccacatccaccacggcgcaacaccaaggttctcacccctctgaggcgcccacacttcgaaggcccatcttctcctccatgtaaagttctacaatttgtccttctctctctgttacaaatttcgcccaaaatctttttcttaattccttggagcccaatcaagaagaattctgtagctcccttggggccaaaggtactaaatctccctttcagcacccccactcccttcccctttttaaagtaactttttccacacacggaggtatttctctttttatgttggtcctgagtattttgccaaagcacaccgagaaaataaactaaactcccttgt

SEQ ID NO: 657239 - DNA, 1662 bp, Homo sapiens
gtctcttcaccctgccgtcatgtctaagtcagagtctccatcaagagcccgaacagctgaggacagctcttcattggcagggttagagctttgacaacaagctgcatgcagcagcctgcaggagcccattttgcagccaatggggcacacgctctacggcactgctgtggctaatgcagcagcatcccaaacacccaagcgctcctaggggcatttgggtttgtcacatcatgccactgtgcgcaggcaggtggcatgccagcctcatgccaatgccaaggccaaccccaaggcgcgcatggcacagcagctagtaggcaccccaacagcagcagcatgtcatcccagcagcaagcattcatcaaaagcacccaggctgccccacatttcacctgttgcaccaacaagcatcatatcagcatagcgtgcgcccatctacacaagccaagcaccactgcaaagcatacatccaaccctcaagcagcattcatattcgtcacaccagctcatgcgcccccaccttagcaaagttgccacggcaccttctatgtaccctggaaaccagacggcgccagatggcgcaaagacaacaaaggacggagccaaacaggcccaaaaacgactaacccacaaacagaaccgaaaacacatgaaatatacactgaaagagcacctaaaagacaaactagaccacataagaagacaaacaaatcacacaacaccactcggctcgcacacatagggccccacacaacacctcgacatcacaccgcgaaccgcaccaccaccgccccgccctcgcgcgcagcacacaacccaacacaactcactgacgcactatgttggactatcacacacacacacggaccacacgaagacgcgatctcgacaagcaatggacaaccacagcaacacacaccaccagggaccaacggacgggaacccagctatgctacaacaccgggagacacctcaggcactagactacacaccacacaaactaactcagctaaaatctagacagcagccacccaagcaaacaaaacagacaaacgacagcgaacacacacccaaccaagaggagcacgcatacccaccacgtcagcaaccatacgccacagcactctaaacgcacaccacaccactcgacggtacaacaacgacgaatacaatcaacacagccagacacagcagaactcacaaggaacaagagaaacactcagcacacaagcgacacacaaccacaacaagatacaccacaatagacaccactcaacgcaaacccaaacagcgcaaaaacttcaacttacctatcagatcacaccacactacatctcactctaactccagcacctactactcacactactcactgctactaattgaaagaccatttactacagatacatactatctcaaactgtcgacactaactcacatcacatacacatctctgccatcgatcctatgtaaatacacatttacatcatacaaactaaatacaaactcaacacaatcaaaaagactacattatcaatctactcgttacactccacctcatcattcaacatctataacgtaatcattataccacagcagtctacaacacacacaccaacaaatataccacatgcatatcttccaacaaatcaacccaactaa

SEQ ID NO: 657240 - DNA, 372 bp, Homo sapiens
aagctcgcccgaattaagagagagagagaaagaaagaaacaagaaataagaaagagaaagaaagaaaggaaggaaggaaggaagaaggagggaggacatgaaggagagcgaaggagacgaggtgaagaagacaagaaagaaacgataatagtaaagaatgcttcagacacctgtctacattactgtcttccttgctaattctatacaaggtctcaccactaatcttcccatgtgctctctccttcattccttcctttccttccattcctttccttccttctttccttctcttttctcgtggccctctctcttccattccgtccctgtcttgccttccctacgcttcgttccttgccttgcctgtccttacct

SEQ ID NO: 657241 - DNA, 105 bp, Homo sapiens
ccatagagtgatcctgagacacactgctatttatgtcttagtgctgtattgccttgtatttccttctcagttacatggacacagaacggtatgaacaacagtgca

SEQ ID NO: 657242 - DNA, 101 bp, Homo sapiens
gcctactactactaaattcgcggccggtcgaccgctttgtgattccatggattgattcatcttctggatttttttttctttatattttgggtactggagct

SEQ ID NO: 657243 - DNA, 160 bp, Homo sapiens
gctggacccagcttaaatggtcgtctgcccacaggacatgggacaagccaagctccctgcctgttcttggtagaatccaacaggacaatggaatgcattcctcatcttgtggaatagcttccttcaggacacttaacgcatcccagtccgtcctgactgg

SEQ ID NO: 657244 - DNA, 526 bp, Homo sapiens
  misc_feature (4)..(4): n is a, c, g, or t
  misc_feature (36)..(36): n is a, c, g, or t
  misc_feature (98)..(99): n is a, c, g, or t
  misc_feature (103)..(103): n is a, c, g, or t
  misc_feature (113)..(114): n is a, c, g, or t
  misc_feature (157)..(157): n is a, c, g, or t
  misc_feature (167)..(167): n is a, c, g, or t
  misc_feature (174)..(174): n is a, c, g, or t
  misc_feature (205)..(205): n is a, c, g, or t
cacngagtagacctgttgctagcccattgaagttanctgtccccctggtattggtttaaatccctgtccaatcttgagtcaccctttagtacgtgtgnnttgngtccttcgtnnctaaggtaagaacgtgcttgtggaagacaagtctgtggcttgntgagtctttntggccancagcctctgatctgtgcagggtattaacgtntcagggctgagtgttctgggatttctctagaggctggcaagaaccagttgttttgtcttgcgggtctgtcagggttggaaagtccaagccgtaggacccagtttcctttcttagctgatgtctttggccagaacaccgtgggctgttacttgctttgagttggaagcggtttgcatttacgcctgtaaatgtattcattcttaatttatgtaaggttttttttgtacgcaattctcgattctttgaagagatgacaacaaattttggttttctactgttatgtgagaacattaggccccagcaacacgtcattgtgtaagg

SEQ ID NO: 657245 - DNA, 1607 bp, Homo sapiens
  misc_feature (88)..(88): n is a, c, g, or t
  misc_feature (374)..(374): n is a, c, g, or t
  misc_feature (538)..(538): n is a, c, g, or t
ggggcggctgaggattaaacgctatcctgactggcattgccacaggcttcagtctgaccgatgctactggtcagacgcgctcatcccntggcgtcgtcccacgtactgtgaatggcgagtctgctgtgcgcactggtttgtcaggcgttcgatgcagacgggcagcagaacctcacgccgtctggagtcctgacttgacgcctgacgtcgttgccgtgtgttgcttgctccagtcggtgactctgcccggctggcggcggggcctgtgctgcgaagcttcggtgggagagcgttgagtgatccgcagtctgtgttgctgcgtgcacgagccaggtgacagtcacgctgcagtctgtcggcttgagactccatgntgtgcgcagccatccgactccctgcctgactgctggcgctggcacgctctggttgacggctgaagactctgagtgacttcgactgtgtcattggactttggccttgtagcggttgacgtccggcttagagcactgtaaggtgggccctatgtcccgttcgacgngttactcgctaacctcgcgtagaccgcttgttggtgacttccgtggccctttgcgtgctttggcttagccccgtgcggcgccccgaccgtgatgagcgggcttagagctcgagcgttagacactgggcacgccttcgccgtgcgggacctgtgggcctagttcgtgtgtctcgtgtgcgtgtggtcatatccgcctttattgttagcacgagtcgccggccctgcgcctagccggcggcctttacgcctaagcgttggcgccatgtgtctgccctaggacccaatgctttcacccagtgtgcacatattgtgcccttacagtgcgaaagtttcaggggaaggcgacaatgaacctctggcacatgcctggcccaggggacaaaaggtcggtcgacgacggagtggctccccggtgtccagttcattccactagcgactcggagaacgcaggaggtgggttccttaggatacgcactaagggtttggcaaaccacccgccttctcgagtttgtcgaggcggcattaacattgactgccactccaagggcaaatacggcgggtcagttgcgtcaactccgacactagtaccagggtcggctttaccacaaacggtttagagttaaccggaaggtcttcaaggaagcaacaaagaaatatccccaaggaaaaccatttcttcccttaccggaacgatcccaaacgccgaggggacgaaccacggacctttttgggtcacctgaacggtagtagaacgaaaatgggaagaacacaccgcggcaaattacgccttgaagcattcctcaaaacgttgctggaggtcccagggggggtgttccaccattttccccatgcgtggcacccggacggggccgtttatatagcaaaaagcaagggttgcccttcccaaggcacggaaacaggagcgaacttgcggggatcgaacaacaacttcggcgaccccctacagctacaaccaagggaagaaggcaacatgaacatcggagacagacacgacccgatgactagcacaacacccactaacaccgcagcaacactgatatacacgttt

SEQ ID NO: 657246 - DNA, 135 bp, Homo sapiens
acgcacgcgaccaaacgaggtgccgggtggtgaggcaagagcgttttgcttacttttgcgcttttcaaaagtgagccgccgtcagggcggaaccctaagtggccgttacctaaataacggatatgtacgcggcgt

SEQ ID NO: 657247 - DNA, 870 bp, Homo sapiens
  misc_feature (38)..(38): n is a, c, g, or t
  misc_feature (90)..(90): n is a, c, g, or t
  misc_feature (94)..(94): n is a, c, g, or t
  misc_feature (126)..(126): n is a, c, g, or t
  misc_feature (149)..(149): n is a, c, g, or t
  misc_feature (154)..(154): n is a, c, g, or t
  misc_feature (162)..(162): n is a, c, g, or t
  misc_feature (210)..(210): n is a, c, g, or t
  misc_feature (216)..(216): n is a, c, g, or t
  misc_feature (226)..(226): n is a, c, g, or t
  misc_feature (230)..(230): n is a, c, g, or t
  misc_feature (269)..(269): n is a, c, g, or t
  misc_feature (274)..(274): n is a, c, g, or t
  misc_feature (296)..(296): n is a, c, g, or t
  misc_feature (308)..(308): n is a, c, g, or t
  misc_feature (324)..(324): n is a, c, g, or t
  misc_feature (328)..(328): n is a, c, g, or t
  misc_feature (330)..(331): n is a, c, g, or t
  misc_feature (335)..(337): n is a, c, g, or t
  misc_feature (342)..(342): n is a, c, g, or t
  misc_feature (352)..(352): n is a, c, g, or t
  misc_feature (355)..(355): n is a, c, g, or t
  misc_feature (368)..(368): n is a, c, g, or t
  misc_feature (391)..(391): n is a, c, g, or t
  misc_feature (425)..(426): n is a, c, g, or t
  misc_feature (429)..(430): n is a, c, g, or t
  misc_feature (442)..(442): n is a, c, g, or t
  misc_feature (574)..(574): n is a, c, g, or t
  misc_feature (577)..(577): n is a, c, g, or t
  misc_feature (588)..(588): n is a, c, g, or t
  misc_feature (611)..(611): n is a, c, g, or t
  misc_feature (622)..(622): n is a, c, g, or t
  misc_feature (624)..(624): n is a, c, g, or t
  misc_feature (689)..(689): n is a, c, g, or t
  misc_feature (694)..(694): n is a, c, g, or t
  misc_feature (698)..(698): n is a, c, g, or t
  misc_feature (722)..(722): n is a, c, g, or t
  misc_feature (744)..(744): n is a, c, g, or t
  misc_feature (750)..(750): n is a, c, g, or t
  misc_feature (859)..(859): n is a, c, g, or t
ttacactgatttgtgatacaacggacattaaacttccntttaaaaagaaaaaaacaatttggtagctctcccttttctgtccagaaaaantcantctttcataatcaaattaccctaaaatttggnggcgttaagaggcaacaaaagtnaagcntccaacgnatccctcctctcaaccggaaatgtcttctatttccaatcaggataaanccttgncttacttgcnaggnctatcacggttagcccttcagtgattcctgacaccagtnctgtnaaaaagaaaatttcctgcgggngaagctcatgtnttcattttggagatcngttntnntttnnnttttnttcctttatnacngtggcttcttggnttgtgggacaaagggggccaacnttccctttccaaaccatccatcaccatgggtggnnggnngcgccacctgcnggccatcatattatggctcacatacccataatttccttgcggtgctgaattccaagtggggattattagagacccctcagagccaaaaggggaccttagaggtcttctagatgagtcccctcatttgtaggnggnggtttctgganaactcagagtggcagggacacanacgagcctttngnaaggtatactgctttaagattgaaaagaaaaccatttggcgccctaattttgcctggatggtgcnctgtnagtnaaagaaagggaacaggtctggggngggggtaagggcaccctgagtncctgtnccatcacttcccaggcagtagaaggctgttcaggaacagctcccatccgcagctgggcatgttttggctcttacacaagaaaatttaattttacttgaagaactaaganctaaatcttgt

SEQ ID NO: 657248 - DNA, 746 bp, Homo sapiens
  misc_feature (76)..(76): n is a, c, g, or t
ctcgatttaaagcaagagcttctaactgatcttgccccactacataataatctcactccagctttcttgctgcttnttagacacactaggcatatattttcctgtcttagggcctttgtgattgctttatcttctgtctggggccctttgtccccagagcttgtaatgccaggtgcctttttgtcattcagctctcagcccaaatgccatcctctcagagatagcctccctaaccaccagtttaaatgggctctgcacctccttcttagtcattatttgttactgttttatttcttacaagcagttttaactatttaaaatgcttttgtttgggagcttgtttattgtcattacttgccctgcttctccaaacaaatttattgaagatatgggtttagctgccataacagggtggctaaaacaaaatagaaacttatttccctatttaataaacgtttaggtgggtgatataacatcagcctgggcgacagagcgagactccatgtcaaaaaagaaaataaataaataaaacttgttagaataaaaagtttagggattccccccgtcaatcctgtctgtacatatgagtgaattgagaggtctggaaacatacccacccactgttaacactgttgatttttttaaatggtgggattatgagtgactgtactcttctgtatctatcaaatataatgaatgttgtatcatttttataaaataaagtctttcttttttaaaaaaaaaaa

SEQ ID NO: 657249 - DNA, 559 bp, Homo sapiens
tggcattcaaataaagttaaatttaaaacttgtttgctggccgggcacagtgagtcacgcctgtaatcccagcactttgggagcccgaggtgagtggatcacttgaggtcaggagtttgagaccagcctggccaatatggtgaaaccccatctctaataaaaatacataaattagccgggcgcagtagcatgcacctgtaatcccagctacctgggaggctgaggcaggagaattgcttaaacccgggaggcgaaggttgcagtgaaccgaggccacgccattgcactccagcctgggcgacagagcgagactccatgtcaaaaaagaaaataaataaataaaacttgttagaataaaaagtttagggattccccccgtcaatcctgtctgtacatatgagtgaattgagaggtctggaaacatacccacccactgttaacactgttgatttttttaaatggtgggattatgagtgactgtactcttctgtatctatcaaatataatgaatgttgtatcatttttataaaataaagtctttcttttttaaaaaaaaaaa

SEQ ID NO: 657250 - DNA, 729 bp, Homo sapiens
tgttacaaatagctatatttttaccaccttagagaacctaaccttaggattaattttatgcattttacacttagcaggaaagctagaaacacaggaaaagccaatctctccagagataggcctatgtacaagaggttcacaagtagtattcaagtggttccaggaagcttttaaaataatcctgggaattagaggctactttgcaacccaattaaacccaaaagtttaccattctgtttaatcctaaactgaaaagagatacataacttaaataatcagcattaactcttcctaccaaacttttttttttttaaacggagtctcgctctgttgcccaggctcgcgtgcagtggcacgatcttggctcactgcaacctctgcctcccaggctgaggcaggagaattgcttaaacccgggaggcgaaggttgcagtgaaccgaggccacgccattgcactccagcctgggcgacagagcgagactccatgtcaaaaaagaaaataaataaataaaacttgttagaataaaaagtttagggattccccccgtcaatcctgtctgtacatatgagtgaattgagaggtctggaaacatacccacccactgttaacactgttgatttttttaaatggtgggattatgagtgactgtactcttctgtatctatcaaatataatgaatgttgtatcatttttataaaataaagtctttcttttttaaaaaaaaaaa

SEQ ID NO: 657251 - DNA, 981 bp, Homo sapiens
gtttgtgattttgtatgaatatgctgtctgtctacaaagtcagttaaaggtacgtttaatatttaagttcattctcatcttggcagcatccaacatctgtcatgtgcaattccaccggtcattcaccagtttcattcatgtcaaacgacagcagcattatggcacatgcaccatgtacctgtcatgtcatccagggcacacacaatgtctttacatgcctttaccacagcaactcaaccaccagttcattcctcatcactggcattttaggtcgtcatgaagcaactgctggagttataggaatcaagcaatgtgcatgaaagccgtaaacataccaagcaaagcgtatcatactgcaattacagcaagagaaatacaaggagaaaagagaagaatctgcaacattgggagaaggcaatacagcattccccaataccaacaccaccaaccacccaacctcaggaagcgtaacacataagacccgggacgccccaagtaccacacacacaaacgttacaacacacacggggcagccacaatacagccaccacgcacgcgacacatccaaatgcacacaacatgcacaggccacaggactaaaacccccgcacacacaaaaccgacaccagacgccaccgcgtcacaccatccgctacacaacgacgaaggcgggcgaacacctaaaacaaaccgagaccctaaccgacgcaggaacacgtccaccagaaaagacatgaaaaagagcaaagaagccacagccacagcaaacaatacaacacaatgacaccgcacggacacaagagcgaaacataagaaaaacgtgaacgagagacagggcgaacataatccgacaacaaaggacagatcccaccaagacagcagaacaacaaacaaaacaacacaagcagcaccagggaaaaagagacgcaaaaaacacacactgcgaccaacaagagcaagagaaagacgcaggcagcagca

SEQ ID NO: 657252 - DNA, 274 bp, Homo sapiens
tgagtttagctttgttcagtcacagagactgcccgaacgatactgtgcctaaatagaggctggctgtacagtgccagcatcagagaccatggacacagtcgttgggcctaagcactagcccaccctactcaccattgccaatgcccaagtacactgccaatgcccaagtacattgccaatgcccaagtggcctgagatacccacccattgtatcctgtcacctagctcggccacagctggcaccaaacatgctgaccagggacccaagaaactg

SEQ ID NO: 657253 - DNA, 407 bp, Homo sapiens
ccaaattcccaggatttttcgccccttttcaggggttaaaattgggcaaaccttccccattttctttccggtcccggccaactgggtgcttttaaaggaaccccccctgttgcttttaaaaacccccggagcccgggggttttactaaagattttaaggggttaccggatagggggggaagggtaaaaacccccaaaaaattttgggccccggggttttcggcccccttttaaaacccggtttttgggccgtttttttcccttgggggttttttgcccttagccccccttttttaaatggttgcccccccccccaaaaaaaggatggggaaggggtttaaagtgggtatttttttttaaaaggtggtgggctttttaaaacctttttttcaaaaaaaaatttagcca

SEQ ID NO: 657254 - DNA, 352 bp, Homo sapiens
aataatgagcttaggagtaaatagcacctgaccaaaaggtttgtttgtttatttatttatgagacggagtctcgctccgtcacccaggctggaatgcagtggcgtgatctcggctcgctgcggcctccgcctcccggattcaagtgattcttttgcctcagtctcccgagtagctgggactgcaggtgcgtgccaccacgcctggctaattttttgtatttttagtggaaacaaggttttaccatgttggccaggatggtctctatctcctgacctcgtgatcgtcctgcctcggcctcccaaagtgctgggattacaggcgtgagctactgcacccagccatttattttct

SEQ ID NO: 657255 - DNA, 442 bp, Homo sapiens
ttgctccctctcgtgtggtccggcggcccgcgcccctcgcctcccccccctcgctgtcggcgtctgtgtctgtgctgcgtcctgctcctctctctccgcccccgtcccgctctcccccctcgccgccggccgttcgggctcgccgcctcgccccgcctcgcgcgctggctaggcctgatgcctctttctcttagagagatgggcggagacgagtcgggtgctcccgcccgcccggcgccgcccgccgcgctggctcctgcgggtcgcccgccccgctccctgcctccgcgcctgtgggtcgcttagctgggcgcgggagtggtgcagtgtaattcctgttaccgttctgctcgtcgttcatgaccgaagtgtccgcggagccgatggaatatctgggcctagcacacaagaaaaagaaaagaaatagaaaaagagacaaaga

SEQ ID NO: 657256 - DNA, 285 bp, Homo sapiens
tcctagtacctgcctgtgggggtggggaggattgtaatcctttttaaaaagtacaggttaaaattatagattgatataccctgcgattttcttcttcattcaacaacacagagattggccgggcgcagtggctcacgcctgtaatcccagcactttgggaggccgaggcgggcggatcacgaggtccgtagatcgagaccatcctggccaacatggtgaaaccccgtctctactaaaaatacaaaaaaattagctgggcttggtggcagacacctgtgatcccag

SEQ ID NO: 657257 - DNA, 140 bp, Homo sapiens
gggtgtagaagagaagaagaaggaggttactgctgtgccagaaacccttaagaaaaaggcgaaggaatttcgcagagctgaaggtcaagcgacttagaaaggaggtttcccacatggtgcttcggaaggcaaggagggag

SEQ ID NO: 657258 - DNA, 152 bp, Homo sapiens
ggacccgaagcctaaattcaggaggggtgagcgagtgctgtgctttcatgggtctcttctatatgaagcaaagtgtgtaaaggttgccataaaggacacacacgtgacatacttcatacattacagtggttggattaaaaattgggtgactc

SEQ ID NO: 657259 - DNA, 130 bp, Homo sapiens
actcgacggtttctcttcagaaagtgctacgacgcccggttatcagctgaatatgagaaagttgagctgccctcagaggagcactgtcagtggctcacagggaccttctgaagagaaacctgctcctgtt

SEQ ID NO: 657260 - DNA, 737 bp, Homo sapiens
  misc_feature (90)..(90): n is a, c, g, or t
  misc_feature (150)..(150): n is a, c, g, or t
  misc_feature (206)..(206): n is a, c, g, or t
  misc_feature (415)..(415): n is a, c, g, or t
accagccctcttcccttgcaaaataagtttcgggacttccagaaacaggccttcaacggaatgggggagcagttttcctacagcaccaanttggccagcttctttttccccggcattggaagggggggctcaccctccctggttatggtntttattttcacctatgggctgcagggcactggggtaaagagcttccctcttcctantgcagcatgaaatgcaagctcccctcagcccatcttggtcccttttcaggccggtgaggagctttattggggtgcccccatctcttcccacaaggtggacatattttgcgtaaatggttaacccaccagctttccaaggtttgttcctgttaggggtaaaggacaataaattttaggggttcccctttcccttatttatttttgtgggnacatcatccccggctgtggaaaggggttttgtgtaacaaaagctccccccctaaggttatagggcccccttagtttgggagtgtggaaggactacttaactgtttgtcccgcttggccgtcggtatcgttttttggggatgttgggctaacaataaaaaggacccgggtttttttttttggccttaaaaagaaggggccccccccccaggtggggtgggggcgattcccggctgtttggcatgtttcccccgggagggccgggcaggagcatggggggcttggttgtttccttcctaataaaaaaaacccggggcgccctga

SEQ ID NO: 657261 - DNA, 981 bp, Homo sapiens
taaaacgggaaacaaagaaatcggagcaatttattattatttttttatttatggaaacagagtctcacggtcacccaggcgggagtgcaggggcgtggggtcagctcacagcaacctccacctcccaggttcaagtgaatctcgggcctcagcctagggaacagcgtggggacaacgaggcttcccgccaccagtgccgtgggctactttttttttttttgtgggtgccgggaaatttcatttgtgtggtcccccggggggtggaattgtgcgggggccaccaatcatagttctcagcgggcagcccttggaacagtggggcttatagccctcccaagttagcttgggaactgtgcgagggcgcctcacccaattctttgcccaagccaaaatggaaagaactttagggggcctagggtgggggagtacacgttcacgagcttgcaagaaggaacactcgagggaagtgtggacggggaaccacgctgtgtagaagagttataacccagggggggcagcacaggccctgggtccaggtggtggagggtaggccgacccgaggagcgggagggcggcacaataaagagggcctaacggaggcatcggaagaagatcccagcaggggaaggggccaggaagagggagagggctaaacttttcccagaaatgggtgaaactccggggcccggggaaagctcaggggggcacacagcgaggtttgtccagggtgtcctggaagagctcagaagttcggggggggggcacgaccttgttgtggacagagctccactctaaggagggcaagggggcagggaaaaagcccaaaagttcggggggcgcgaccttgttggggaccaaggcctcccccggggggggaaagggcttggcgcggcaacacaaaaagaattccgggagaaaggagcctaatacgaaggggaccgggttagtgaaaacaccgtgtcaccacgggaagccgctgta

SEQ ID NO: 657262 - DNA, 219 bp, Homo sapiens
cctgcgaggactgatcatgctatttccccctctattgatccccacctccaaatatctcatcaagaaccgagtaatcagcacgcaacactgactaatcaaactaacctcaaaacgaaatgataaccatacacaacactataggacgaacctgatctcttatactagtatccttgatcattgtaattgccacaactaacctcctcggcagggacccactcg

SEQ ID NO: 657263 - DNA, 137 bp, Homo sapiens
gagagaagctttctggcttgaaagaagatataacccaagagtttccgggaaaagccaagctttgttccaggtgactcagtggctaacctcgttagaaactcctgaagaggaggagtcagaggaggacgctcactaaa

SEQ ID NO: 657264 - DNA, 81 bp, Homo sapiens
tgctggtgcaatacaactaggcttaatagggactcgaattcgagattcaagcttctaacgttagaagctctgaattcgagc

SEQ ID NO: 657265 - DNA, 950 bp, Homo sapiens
acagaacctgtgttagtttcacctataatggccgtgcgggtaatgacaatgtctgcgtaactggaagtacttgcactcgtgcatgctcagggctttgatgacagatatacgaaggatgccacggcttctatttgcctaatgacatccgcctcatgcgaagggacgccatttgccatctatgtctcctaatattgtcatctttgcttggtgtctctgcacttggtggtatatattgcctggtattggtagtattctgtcttaattaatctgaccgcgtgaggcctagcgaaatcatcgggagatttataccccccagaaatctattaattcactatatggtcatcttgttctcactaacttgtggcagtatatgtttatgatgattactcacctagcctgactatgtcaaaatggtggagtctaccgattttggaagtagtatggctgtcagaactgttgtgttgtagacatgccatttcttgacagagccatatagtatcttacggagcactgtatgcaggtcactgccttttctggggtcgtcggtgatccctggaatctactgatatgaccgtgctcattgactggaccacaccacatatacgaccactaataaatctattgttgctattggaccgttagttgatcagtagctggaggatctacgcaatactaaaacacctcttattttgccctttgatggatgtgggatgcattatggaagctccctacgatgaccatgatcggcggattagctagcacttgaataggtatttactccctttctcattgttggttagactggcgtacatgaagtgcaatacggggatgatttaacacaactcaactcttgctgatttagaacctaatcactttttgaagccgaaatgtctctcggggacacgcacttcggctttgttttgcaccccctccgttatttggtgtcacac

SEQ ID NO: 657266 - DNA, 410 bp, Homo sapiens
taattactagtcccaatttgagctcaatattaccaacaattgctttatagttacttatgagtcaggttcaacattttatgctgattttacttgcacttaaacaaatagaaagtatattttctgggccgggcgcggtggctcacgcctgtaatcccagcactttgggaggccgaggcgggcggatcacgaggtcaggagatcgagaccatcccggctaaaacggtgaaaccccgtctctactaaaaatacaaaaaaattagccgggcgtagtggcgggcgcctgtagtcccagctacttgggaggctgaggcaggagaatggcgtgaacccgggaggcggagcttgcagtgagccgagatcccgccactgcactccagcctgggcgacagagcgagactccgtctcaaaaa

SEQ ID NO: 657267 - DNA, 513 bp, Homo sapiens
actccacagtttaactcaaggtatcttgtaaaattaaaatattatcagaaaaaaagaggagtgttccttaaagcaccagatcattatgatttctgaaggatcatctaacacaaagcgctgtattaatgatgcggaaaattctgctttaaatgccaggaatatttttaaaaataattttaacgcacattcaataaaatgataaaagagttttaaattaagtcagtaaatgcagccttggtgagcagaatagacttcttttaaaccatttaaagccttatcgatcccaaatccttttaatggtagtgtagactgtaaggaagttgaagccagaggctatggactgtcaatagcatttcaatctttgtaagatattactttttaatccaagttttcaatatttgcaaataaaaatgcaaaataaaatgcattttcttttgtaaatgttatttaatgatgtatttttctgtctataatctaatgtctgtacaacaataaaacatttcataagaccca

SEQ ID NO: 657268 - DNA, 324 bp, Homo sapiens
cagcacaaatatacaactgggtactgccagagaatgatcaatttccaagacaatatttcatatcacaaggatagctacaaaatgtgttatttactacctctacttttaacatactttgtgcacttctaaacatctagaaagactagatgtttcaaataaggacttaagtttgtccgctatatacacagtagggttgaataaactacacacatgtaacaatggttatatctgatagtgtcttctaattacgaacattctggtctagaacccttcattccttccaactcctctccaccaccaacctgatggcgtgaggtaggaggt

SEQ ID NO: 657269 - DNA, 491 bp, Homo sapiens
  misc_feature (293)..(293): n is a, c, g, or t
  misc_feature (301)..(301): n is a, c, g, or t
aagtttcaaagaaaaagctactactcagcaataaaaatacatgaaaccacacagatgacttgcagaaacatcatactgagtaaaagaacccagacagataaactggaatagtgtgtgattccatttacatgaagttcttttttaaaaatgcaaaattattatatactgacgacaaacaatgtatcaattgctgggtctggagtggagaggattgcctgtcaagggagtgaaaaatgttccctattcgactgtggtggcagttacacaggggcggacatgtgttaaaagtcatngacttacncacttaacatgggtgaattttactgtaggtaaattatatctcaattcaacaaggaccttctgagaaaaaagaaaaaatataagctaccctaaaaatacatctaacacaaaatctctgagatgtgtatggagaaaacttaaaactctacacaccattaaagaagatataaataaagtgaaaggaggtctta

SEQ ID NO: 657270 - DNA, 682 bp, Homo sapiens
ggtttttttgtatgtattccttgttttcatattgatagcatctaattcttttgacaatcttaatatgtagattcatttaaattttaagacagttcagtgcatatataggtagaagccttaagaaaaaaaaaaatgagcaagcaaaatatttgaagaaatgtaataaaaccatagatttctttcagaaaaaaaaaacgggcattaggaacagttttctctctcatatatttatgattactgacataataggaaagtgggtattaattcagtatccgtcattatgcagtattttaatacctacataagtctatcccattattatatttgggcgctgggcaatatttatccctttatggcttttaatcactaacattttttaccttaagagtttaaaaactatgctaaataaatggtactggtatattggaatatgtttgccattttttgaagaacaagctgcgttatcccattttattccaggttacataaaattcctgaaattcctattaagtttttcaacacacttggtgtacaattcccacgtttaaatgtgacagtgttatggatattttaaggctggaccattattttcttatagaccctaaaattaaggttgtgttaattttccagggtgcatcttttcaacacgcttttgtaattggcattgggttttccaatgctt

SEQ ID NO: 657271 - DNA, 455 bp, Homo sapiens
aacctgtctcattaccttgagtcacaggaatgagatgtgtgagatttccgtatgattgtggaacgctactggctttttagaagacgcctcaggcgactgactatcatttcttgaaaatcttaaatttaggccaggcagccaggcccggtggttcacgcctggaatcccagcactgtgggaggcttgcgccggcggatcacttggggtcaggagtcccagactacctgggtaacagtgtgaaaccctgacttactgaaaagacaaaatttgctgactgtgctgcaacacgcctgtgatcccagctactgaggaggctgatgccggagaatggcttgcacccaggaggcagaggttgtcgtgaacccgcattgaccactgcacttcatcctgggtgacataccgagactctgtctcaaaaaaatgattgccggcctactcacagtagtctctccctc

SEQ ID NO: 657272 - DNA, 103 bp, Homo sapiens
cgcaaggatctgtgggctccgtcttcacacaggctggagtgcatcccagaggttagggtttgggtgcacagtcttcatacaggtctgtagtgcacccctagga

SEQ ID NO: 657273 - DNA, 224 bp, Homo sapiens
ccgtgttgtactgccaccgcgatgccgaaggcgcccagcagcagccgccggagcccgagtggatcggggacggagagagcacgagcccatcagacacagtggtgaagaaagggacagaaggacagaagatcaagaagacgttcttggaagagctggcagtagaacataaacaggctggggaagaagagaaagtgctcaaggagaaggagcagcagcagcagcga

SEQ ID NO: 657274 - DNA, 260 bp, Homo sapiens
agatgtatgacatgagcagcctcaactcacacagatgcttcacctcctagcaccgcaacagcccctgttgacgaatctacaacctaccaccgcagcccaggctcgactccaacaacacacttccctgccagactccacaacttgcgggccacagtagagaaatcaacaatattccacacgcagcccagtatgcaagatggaacaacacccatcatctgcccacatccacaaccatcagcgtcgtggaagaatccacaaca

SEQ ID NO: 657275 - DNA, 935 bp, Homo sapiens
  misc_feature (222)..(222): n is a, c, g, or t
gctgtatgctgacagcgtgtctcccctgtttgcggcctctgtcccgttctggcgtatctccctctctgggcccccccctgtccatggataccactgccgagtaattcggggcagccgcaaacttttgggaaaacatggtgcaccgcttaggtgtggaactggcaatccccatggacgggcttcacaagcctaccaatcctgggcccctgcagactctggttncccaccgcgtgcagccggtgtcttaattttcccaatccgggcccacaataaagtcggccacaccagaaatttgccttcgtttggccgggaatgtggtctccgcccgcttccccaagcggcaatggggttcgtccggctggcccacccccgagggttttccccgcggcggtccttctcccctgcaaaagaacaatggggcccacccgaacacccacgggcggacatttaaatgttttcccactcataaaatgggaaaaatatcacaaagggaggggcagaccaatgtgtgtgtgcgcgcaaaaaggcccaaccatgatgggtgtcgcgtccacaggtgtgcatgcctcttttttccaggagcagagtgcaagatccgtgagacatctcttgtccacaacaagaaacgaccagccccacatatgtgtacacccccatgcttcttcctaaaaaaaagacattaaatacaataaataaatcaaacatggggatctctataaagcatttaatgtttactatatcggcacccactatatcatacctattctcttaattgaagatccacttttaaataacattaatctttgaagaactactagttcaaacaaacactctgtggggttttcttatacaccccaataccaccacgcttactctggcccccaaaaaatacaaactctttccaattcgtcccttaacccaacaaaccacaaaac

SEQ ID NO: 657276 - DNA, 919 bp, Homo sapiens
  misc_feature (23)..(23): n is a, c, g, or t
  misc_feature (589)..(590): n is a, c, g, or t
  misc_feature (645)..(645): n is a, c, g, or t
  misc_feature (650)..(650): n is a, c, g, or t
  misc_feature (709)..(709): n is a, c, g, or t
  misc_feature (821)..(821): n is a, c, g, or t
cctccatggacactagatctttntcttcagactacacccacctcccagaatgccaaaacccctgggactcagagcctccgatgtaccacaccattgagcgttccaaaagtagccgctacctagccaccacaccctttcttctagaagaggctcccattgtgaaatctcatagctttatgttttccccctcaaggagctattatgccaactttggggtgcctgtaaaaacagcagaatacacaagtattacagactgtattgacacaaggtgtgtcaatgcccctcaagcaattgcggacagagctgccttccctggaggtcttggagacaaagtggaggacttaacttgctgccatccagagcgagaagcagaactgagtcaccccagctctgacagtgaggagaatgaggccaaaggccgcagagccaccattgcaatatcctcccaggagggtgataactcagagagaaccctgtccaacaacatcactgggtccaagatagagcgcgcaacagctactcggagaggagccagtgcgcatatgacacaccagaagagcctctcatcagtgccaaatcgcgcgcgagnngacacagcaggcctgcaaaatcctttcagagaagcaagtcctccaagcctgaggnccgangggacaggcctgtcatgaagagactgtcacgacaatggcctttcaaagctttgaagcangcccacctaaccttctaatatcggccaggaaggctcagattcaggccttaaatctctcaactccagtctttcctcttctgaacaatctgctaatctaactagcaaaaagcangcctggaaggtaactcaagggcttttggccacataagagccttgtgtgaccgggccaaccagggataagcggttcacttgcttgcaggagggagggct

SEQ ID NO: 657277 - DNA, 127 bp, Homo sapiens
aagaatatacatgaacggacggtctcagtgactgagcatgcatacatcacccggatgctggaccacagatagggatgggagcgttgtcagaagcggaagttcaggccctcctcagtgagcgacgagt

SEQ ID NO: 657278 - DNA, 925 bp, Homo sapiens
gctacggatgcaaatagtgtgggggatgccggtggctctgcccccagtatcctggacactcgtgatgccttgcagctggtgaatgagatcatcgataaggctggttacgcgtcattcatatcgttgctctggtatggcatgttgctgcctcatatgtcatatcgtgatggcaagattatgacgttgagacttcaatgtctcgccacatgctccttcccgcatgacatcactggggcagcagatgggggataatctatactaggactatgccagagagactatctctgtggtctcgcattgactggcaacccctttgaccaggatgattgagctgcttggctccaagttcagaggccattggtagggcatccaggatctggtgggctgcagtgacctgcccacggttgaccgatcccaatcatgtattgactcgggcatggtcgggaatcagggccgttgacttaacctgtctgtctgctcaagggtaggcctagattcggattcggtcagatgaagccattaccatagagtgcaggttgttccaggagaatggtgtggggtatggcgagttatcggtctggaaagactgaggattctttttgcatgacctgaggtgtgtatgggtccaggtcatatgtagacatgagggtccgggagtcggtgattgtgggataatttccgtctcattggctagtttcatgccgccactggagtgattcactttgccgtcgaagaactcacttttgggtcagccgcgggggctgagattggcatgtgcgagggggtgacatcgtggtgtccctgtgaggggggtaaatggaagacccatgaataccgaaccagggcaaacctgatgcggcgggctggacacatgggttttcctagcaaaggagggcctcttttccacaaaggagaaagggcaatg

SEQ ID NO: 657279 - DNA, 315 bp, Homo sapiens
ggggctcccccctttgccccgggtgaagggcaggggggcaattttagctccctgcacccttgcccttttagggggaaagggtcctttcttttcagcctccccgggaggtggggatacagggggatgcccccccgcccgactaatttggggtttttttgtaaaaaagaggtttcccccatttgggcagggggggtttcaaactcctggggtcaagggttttgcccccccccctttttcaaaaatggacaataattttacccgggtgcctgaaaaaaactttttttaatccttttagtaataattttgggccaggga

SEQ ID NO: 657280 - DNA, 968 bp, Homo sapiens
  misc_feature (285)..(285): n is a, c, g, or t
  misc_feature (557)..(557): n is a, c, g, or t
  misc_feature (624)..(624): n is a, c, g, or t
  misc_feature (766)..(766): n is a, c, g, or t
  misc_feature (790)..(791): n is a, c, g, or t
  misc_feature (821)..(821): n is a, c, g, or t
  misc_feature (861)..(861): n is a, c, g, or t
  misc_feature (863)..(863): n is a, c, g, or t
  misc_feature (866)..(866): n is a, c, g, or t
  misc_feature (946)..(946): n is a, c, g, or t
ggacaagggtcaccatggcaacagtaccacgccagcggacgggagtaacaggggacgtctctactgcatttccaccgcttcaggtcgcttctctgggagtcacccccttcaccttatgtgctctgtgcatgagccgctgtcgtgctgccaccggcgtacggatgtactacgaaatgatcgaaaactgctcctgaacaactgccaaacttcgctgttatatggagtgggagctgttttgttaccactttcagaagttgttccccgcctgctgagcaatgaggattnagggtatactggcccgagcccccggcatacaggtgcactcttaagaccgctgctgatatatcgggcacgatgcatggcctagtccttagcctaccagagtggcagattcgtggggagagttaggttggttcttttcggtggcccagtcatgttccccatccccttactatctacgatgtctgcgtatgcaaaacgccccgacctgacaaaaagcctggacgctcgggagagagaacggcgcgtcacatgtcgcaaggcagaagattttgtgncatgatggggcctcgtccataattctcgagggtctatagaaaataactccacaaaaaaagggcgacnttaggacccgggctgatagcgcccatgtgggggtcacagggccgcacatgagcacattctgaaacaagtgaacgcgtacgttctttgcgtatcttctatgcgatagcacacactccagtcctcgctgtgttgcagtacctcnacacttccgcctcgggccgcagtnnccagaagagggatcactattcgtccggccnaacgctgctccttaagtccacgatgagtgggagccttgtncnccntgcacctatactagcacagctgtaacaggcatcacttccacgctacttccttatgccgataaacggacgctttcggtttnacgtgtgagggaacgagcagag

SEQ ID NO: 657281 - DNA, 651 bp, Homo sapiens
tgccgccttgggggacgctccggatcctgtgccttggctgcggtcagcggggagcccgggcctgctgtcggggatgggggctgtttcctacacgcagggccagagtccggagccgcggacccgcgagtatttctactactgtggaccaaccatgggcccaagctttccctggatgattccaaaagtgaagaaatttcatcacctggcttcaaagacccgcagattcctggatcaccgttcgttcatcaccgccttgagacccagaccgctagtggtgcgctacgaaggaccgcctttacccctttcacctctcgacccttgctggcaggagagccgcaagcttcctgtcgctgccgaggcaccggcacggtggatcttcacagcaccttgctgaaccgcggaccagggtgcctccgtcgcactctcctactgacggacggtggcagaaggccctggcacgtgccccataagaagcacaggagctgcaatggcatgccccctgagcccgggacaaaacgggggatgcccttgtagcgaaacacggggaagccggagagcagttgccggagcaggacgatgtggcccattggttgcgcttcacggcacctgggaccatagggaagcatacagagccattggttacgaagtaag

SEQ ID NO: 657282 - DNA, 214 bp, Homo sapiens
atagattcttacacattaaaaaagcatttatcttggctaaaaatgaaacgacttttcaatgatcaacacatggtttaaatctgcttgctaatttatatctatccacaagtctgtctagctgttcagctaccaggaaattcaattatgttctgtaaacctttgttgaacacctactatgtgcctgtggcacatttgtgaattgcataaacagaaa

SEQ ID NO: 657283 - DNA, 117 bp, Homo sapiens
acctcccctgcgccatgtatgtcttggccttggacaggaaggggttgtggagatcttttctggggagttgctggattgcagagaaggaacactgctgcccaggagaccaaacctcag

SEQ ID NO: 657284 - DNA, 925 bp, Homo sapiens
  misc_feature (2)..(2): n is a, c, g, or t
  misc_feature (91)..(91): n is a, c, g, or t
  misc_feature (95)..(96): n is a, c, g, or t
  misc_feature (103)..(103): n is a, c, g, or t
  misc_feature (105)..(105): n is a, c, g, or t
  misc_feature (130)..(130): n is a, c, g, or t
  misc_feature (144)..(144): n is a, c, g, or t
  misc_feature (147)..(147): n is a, c, g, or t
  misc_feature (155)..(155): n is a, c, g, or t
  misc_feature (160)..(160): n is a, c, g, or t
  misc_feature (165)..(165): n is a, c, g, or t
  misc_feature (167)..(168): n is a, c, g, or t
  misc_feature (174)..(174): n is a, c, g, or t
  misc_feature (202)..(202): n is a, c, g, or t
  misc_feature (216)..(216): n is a, c, g, or t
  misc_feature (225)..(225): n is a, c, g, or t
  misc_feature (231)..(231): n is a, c, g, or t
  misc_feature (255)..(255): n is a, c, g, or t
  misc_feature (259)..(262): n is a, c, g, or t
  misc_feature (264)..(264): n is a, c, g, or t
  misc_feature (268)..(268): n is a, c, g, or t
  misc_feature (279)..(279): n is a, c, g, or t
  misc_feature (287)..(289): n is a, c, g, or t
  misc_feature (299)..(299): n is a, c, g, or t
  misc_feature (303)..(303): n is a, c, g, or t
  misc_feature (308)..(309): n is a, c, g, or t
  misc_feature (313)..(313): n is a, c, g, or t
  misc_feature (319)..(319): n is a, c, g, or t
  misc_feature (323)..(323): n is a, c, g, or t
  misc_feature (326)..(326): n is a, c, g, or t
  misc_feature (333)..(333): n is a, c, g, or t
  misc_feature (347)..(349): n is a, c, g, or t
  misc_feature (359)..(359): n is a, c, g, or t
  misc_feature (364)..(364): n is a, c, g, or t
  misc_feature (367)..(367): n is a, c, g, or t
  misc_feature (374)..(374): n is a, c, g, or t
  misc_feature (378)..(378): n is a, c, g, or t
  misc_feature (392)..(392): n is a, c, g, or t
  misc_feature (407)..(409): n is a, c, g, or t
  misc_feature (412)..(412): n is a, c, g, or t
  misc_feature (446)..(446): n is a, c, g, or t
  misc_feature (455)..(455): n is a, c, g, or t
  misc_feature (490)..(491): n is a, c, g, or t
  misc_feature (527)..(527): n is a, c, g, or t
  misc_feature (608)..(608): n is a, c, g, or t
  misc_feature (917)..(917): n is a, c, g, or t
tngttaaaaatttagatatcaaaagggtatttcgtgaagaaaaacagaacagtatcagagcatcaaagaggaggaaacactactagtttcntttnnccaaaananttaaacttttatggtttagtggttnaacactagcttcgnttnttagaggnttatntaaananntttctnttggtgttagcaccaaacaaggccattngtatttctggcatnttttgcttngctganagttttagttggttttccaaggtntttnnnntntttnttttttgtttnttattgtnnnttttcacacnttcngttgnntttntagctnggtntgnttttttntttttttggttttnnntatgtttttnggaanttnttatgtntttngggttggttttttntttagcagcgtccannnggngggggtcttgtggccggcagcgtacaatcatcanaggttcttnattgttggtgcagaccctggagcaccagtttattnngcagcccctggtagacctatgggtcctccatattcntgctgagtgttagcttaacctcactgagcaaatctgagatgaggtcatttcgggctctcaggactttcagcctcgcctgantcctcatggtggacatcaggattttcttctgctgctctatctgcttctcctttttctcataatactccataatcttcagtcgttgggtttgcacgaggcgtcctttctcaatgttaaactcttcctcagccttggcatcgatttcctctgctttctcattggcttcctgctcaatgaaagccatcatgtgcttaatctgctttttcacatcgacatcactcagggccatggctgctctcagaggggacggcagagagggagctcgtacaccgtttggctcctttgacttaggacaatttcaggagtgtntctggagt

SEQ ID NO: 657285 - DNA, 259 bp, Homo sapiens
gctcatggtaccagaccaagtcacggggttggtctgttccaaagtaagccttacagggctgcatcggcccaggggacgggctcttttgtttaattctcatgcccattgagcacctctacagttttcaaaaaggtatgccataaattgcctacttattgctgtctgcctatttgtgagaggcaccctatctggcttacggcatcacaaagagcatactttttgtactctgtactggctgatgattgaccagaaggtgcct

SEQ ID NO: 657286 - DNA, 944 bp, Homo sapiens
  misc_feature (1)..(1): n is a, c, g, or t
  misc_feature (314)..(314): n is a, c, g, or t
  misc_feature (324)..(324): n is a, c, g, or t
  misc_feature (332)..(332): n is a, c, g, or t
  misc_feature (346)..(346): n is a, c, g, or t
  misc_feature (353)..(356): n is a, c, g, or t
  misc_feature (358)..(360): n is a, c, g, or t
  misc_feature (365)..(368): n is a, c, g, or t
  misc_feature (370)..(370): n is a, c, g, or t
  misc_feature (375)..(375): n is a, c, g, or t
  misc_feature (378)..(378): n is a, c, g, or t
  misc_feature (399)..(400): n is a, c, g, or t
  misc_feature (405)..(405): n is a, c, g, or t
  misc_feature (407)..(407): n is a, c, g, or t
  misc_feature (413)..(413): n is a, c, g, or t
  misc_feature (416)..(416): n is a, c, g, or t
  misc_feature (418)..(418): n is a, c, g, or t
  misc_feature (422)..(423): n is a, c, g, or t
  misc_feature (428)..(428): n is a, c, g, or t
  misc_feature (444)..(444): n is a, c, g, or t
  misc_feature (446)..(446): n is a, c, g, or t
  misc_feature (473)..(473): n is a, c, g, or t
  misc_feature (509)..(509): n is a, c, g, or t
  misc_feature (588)..(588): n is a, c, g, or t
  misc_feature (595)..(595): n is a, c, g, or t
  misc_feature (939)..(939): n is a, c, g, or t
ngggggatcctggagcccagggaatcgacctggagggccagtggagggagcggagggtgcgaggatcggctcctccgcagccggccctggaggggttcttgggggatcgcgccaggccaaaagtctgcatgggcggccccgagcctccctgagccggcgcgccccgggcgtggggagatgccgctctgggcgcggtgccgctgcgggcccgggtgcggcgctcgcccagggctaggtgccccgtctcaggcgagaccccaggagcccgccgcccccgctgtctcttcagccgacgtagacacgtcgggcgggancccagtctangcgtgttnaagctctgggtccncataagnnnngnnncctgnnnntngtgtnttnttttttttttttttttattgnnccatnantaagtngangnaganngtgtncccggcctgcagcggnangatgaggctgaagatgcccagggtgcncgggctgggctggctctcggccaccggcttattctncaggccctcaggctcgtagccaccggagtctacgcgggccacgccctggttggagcgggacagcacggcctccactttntcgtgcnggtgcccagtcagcaccgcgctcagcaagtagcgtccagccagtggcgctgtgaacacgcctgtctctggatcataatagcctccatcattgagcaggactctgtcgaaggggaccgtgcctggttcagaccggggcaaactcagagcagctgaaaatgccacttggggcacaggggctgctggtgccccctccactccctgttcaccttgaggacctggtggcccgatggggccctcttgcccgtccttgcctggtgatcctggaggtcagcaagggctgggggtcctgcagcccaggaggccctgggggccagcctctcctgcaggccagtgaggtcttcangctga

SEQ ID NO: 657287 - DNA, 1010 bp, Homo sapiens
tattcatgcttggcaacatttattggatggattttccccaattaaatatttctcatcatttcctcacatgattagtactggctagcggacctactaaaaattttaacactggactttattaattaagagatgggcttggctattttgccctaacaccattccaaagggagaactattagatggtctggttattaatattcaacgcaaaatgttgtgagacgaaataatttcagctatgtctcaggtgtctcgctgggctcttaagggtggcaatacagcggtgggtggtgtgagactggtctctggcagagatgttctctcataacgcagggtgggacgcattggggacaccacagggtctcacaggttttacctcttggaagagacactttggctggtcccggaggatcaaaccctttctgggtgggcatctccttcttggcttaaggggcacccatttgaggtgtgcccaacatttgaaagactttatatccattcaagggcctcgtgtactccatgtccgtcttcttagcaaataccaaacagccgatgtgagcagttaaaacctccccggggtatccatctggtcagtgatgccagatccccagggggccttctttacggcgcgtggtgtgtcacgatgtgtggccgtggccccttttctggggggtcaacccctatgagtatgatgtggaggcatcttctctcctggggcattcttgggtcagggggtcaggggccacgaggaacacccttcctataaatgagagttcctcgtgaacatcgcgacgacctggggcctccatagggaccgggtggccctcggaaggagagacaacgtctgcggcttgaagggccccacgttcgtagacgcggggcaccccgatggttgtgggcagtggaagatccccggtctttctcgggttctgcaaagggtccggggagctttgacgttgtccttctgcgacgggggcaccgtgtccggctttgtggtaccctgttgtgtgctc

SEQ ID NO: 657288 - DNA, 521 bp, Homo sapiens
tgagtagggagacagagggcagattcaggagaggaatagggtagtcacctgtgttgggagcaaatccttcctgtgattccaatgcacaacgtgtgagaaccactacttgctgataatagtcattctgtcctgtatttcatgcgacatttcatctcctatcctgatatttacatgtattcttccgtttccctcactgtagtgataaacaacatatcatttacctagatgtgccatttttttcttatgtaggtctgtgaaatatgaatcatttagtacatattttcttaagcacacatcaattttctccttatagtagttggaccgattatggacacggaataattttatactgtggctatgagagcatttaagagattattaggagaaagtattctattctagttacttcaagttttcttacttcaactatacttttagcaggacctatatcttatgaattttgcagtctatatgtatcacatgtgacaaagattcttaggactagcaccaaatgtggaata

SEQ ID NO: 657289 - DNA, 329 bp, Homo sapiens
  misc_feature (92)..(92): n is a, c, g, or t
  misc_feature (256)..(256): n is a, c, g, or t
gaagccattgaataccctattgaccataagaaaaaggcagggaaagttgttcaacggcaacccaggcactgaaggaaaaagaacatggagantgacaaaagcccagagggaggagtaaaaggacacaaacaccattctcagggaccaggactgggcgctgttctcagggaccaggactgggcactaatcacagaactgtaacaggcgccccatgggaatgaccaactgttagatggggcctgcagggcagcacctncctcctgcctcccaccaacagcttcttaaagggaaatgccgactcttttcacaccagtcccctcactgcggct

SEQ ID NO: 657290 - DNA, 543 bp, Homo sapiens
tacaaaaatacacaagcttatatgcattaacaatttacaccagttcacaaaaaaaaaaaaaaaaaaaaaaaaaaaaaaaaaaaaaaaaaaaaaaaaaaaaaggggggcgggcaaaaatcccccggggggcccatctccccccgtttttcttcttcgaaaagagggggcccccagagagggggggctcccatctataatcaaaccagccgaccagagcgcggcgccggcgttaaacaacacgcgcggggggagcggagaaaacaactcagcacaccaggcggactacttggggggaacggaccccacacctggcgggggggggaaacaaacagtggctgaacaccaccccccatgacagagaatactaacacacgccccgaggagaacaaaatacaacactctgcacacgacgtgcactagtggcgggtaaaccccaccgaccagcgattagaagacgccccggcgagaacaagcagttggcgcaccagcagagacttatcgttagaacaaactttatatccagggagtgacaaagagaaaaac

SEQ ID NO: 657291 - DNA, 193 bp, Homo sapiens
agaggcgaccaacctaccgatgctggtgatagctggatgtagaatatggaatcttagattcaactttcgatttgcccacatgaaccctctagctccccttgtagatttaactgttagtccaaagaggaacagctcttcggacactaggaaaaaaccttctagagagagtaaaaaattaacacacccatagtag

SEQ ID NO: 657292 - DNA, 315 bp, Homo sapiens
agcggagttgccagattaccagcatctgggttgctattccaaggctcattcagatgaaagacgcaagaagatcaagaagacgataacgagttctctctctttgaagttgctgtgcaggatgagtatatatcgagtcgatctcactcagtgcatctgtgctcatcgatgtgacaagctgtgcacagcgtattgtattagtaaatgagtcacagtgcgggctaatcgactaagatccgttgctccagtgataggtgacagtgtcgtaacgattttatgaggagacaatgctcgaagaaatttctagagaaaatctta

SEQ ID NO: 657293 - DNA, 289 bp, Homo sapiens
gcagtaagacatattttcatgtgggtggtcacgcaagaaatcaagtaacacaatgaggaattgctccccacgaagacttagacctgggacaaatgggtcgttaactttcatttttacatcttctctcaccacactaaacctcgaatggtcatccttagcaacctaaaagactatgcaactccaccactgaactggtatcttattccactgactgctcggacactctgcactcactacagaaaaaaataaacccagaccattttgcctagagcccttcaaccaccaaaca

SEQ ID NO: 657294 - DNA, 132 bp, Homo sapiens
gcgctggggcggtagctccgtggccggatgtgaggccttcccgcctggcccttgtgttagccgcctcgcggcagcgcgatctcccgcccttggtgctgcccccgggcggtacctgctctctcccagcgccac

SEQ ID NO: 657295 - DNA, 205 bp, Homo sapiens
cttcttatgcccaactcttctgctgtctgggacggcctgcggtggatcaggagtgagtctggacaccacacatataataaccaagagaagtgtgcattagacggcatcaaaacacatttaatgagacttcaactgtagctttccctggtatccagggagaataaaggcacacaaggcaaaataaagtaatggcgaaggctgatgg

SEQ ID NO: 657296 - DNA, 618 bp, Homo sapiens
  misc_feature (19)..(19): n is a, c, g, or t
  misc_feature (22)..(22): n is a, c, g, or t
  misc_feature (42)..(42): n is a, c, g, or t
  misc_feature (44)..(44): n is a, c, g, or t
  misc_feature (142)..(142): n is a, c, g, or t
  misc_feature (180)..(180): n is a, c, g, or t
  misc_feature (182)..(182): n is a, c, g, or t
  misc_feature (186)..(186): n is a, c, g, or t
  misc_feature (192)..(192): n is a, c, g, or t
  misc_feature (200)..(200): n is a, c, g, or t
  misc_feature (206)..(206): n is a, c, g, or t
  misc_feature (208)..(208): n is a, c, g, or t
  misc_feature (216)..(216): n is a, c, g, or t
  misc_feature (219)..(219): n is a, c, g, or t
  misc_feature (223)..(223): n is a, c, g, or t
  misc_feature (234)..(234): n is a, c, g, or t
  misc_feature (238)..(238): n is a, c, g, or t
  misc_feature (246)..(246): n is a, c, g, or t
  misc_feature (258)..(258): n is a, c, g, or t
  misc_feature (267)..(267): n is a, c, g, or t
  misc_feature (273)..(273): n is a, c, g, or t
  misc_feature (314)..(314): n is a, c, g, or t
  misc_feature (317)..(317): n is a, c, g, or t
  misc_feature (320)..(320): n is a, c, g, or t
  misc_feature (326)..(326): n is a, c, g, or t
  misc_feature (341)..(341): n is a, c, g, or t
  misc_feature (360)..(360): n is a, c, g, or t
  misc_feature (368)..(368): n is a, c, g, or t
  misc_feature (371)..(371): n is a, c, g, or t
  misc_feature (375)..(375): n is a, c, g, or t
  misc_feature (379)..(379): n is a, c, g, or t
  misc_feature (386)..(386): n is a, c, g, or t
  misc_feature (395)..(395): n is a, c, g, or t
  misc_feature (422)..(422): n is a, c, g, or t
  misc_feature (428)..(428): n is a, c, g, or t
  misc_feature (438)..(438): n is a, c, g, or t
  misc_feature (447)..(447): n is a, c, g, or t
  misc_feature (459)..(459): n is a, c, g, or t
  misc_feature (476)..(476): n is a, c, g, or t
  misc_feature (506)..(506): n is a, c, g, or t
  misc_feature (520)..(520): n is a, c, g, or t
  misc_feature (524)..(524): n is a, c, g, or t
  misc_feature (542)..(542): n is a, c, g, or t
  misc_feature (546)..(546): n is a, c, g, or t
  misc_feature (563)..(563): n is a, c, g, or t
tgcaagttttttgactttnatnaaatctttacaaaacagaananaaaattccggcattgacagtgggggtaaaggaaaacttctgagccccgtcagtccacctggtacattggaataaaagtgcttggatgtttttcccccnctttaaaaaaacttttgaggtttttttttttttttttntntttnaaaaanatcgtaanaataananagggccgnccnccgncccccagcgangggngcgggccnggggcccagggncccccaggntcttcnctcattcacagtaacggttctgaccagtcccccagggcgcncgnggntgcganagggggggggggggngggggaagtgactttcccncccctgcnggnccangggngtgggcnaggggttcnccggggcgcacccctgaacccaggggngccgcngggctggggnggcactaancctctgcttggngtaacggaccagccgcntggagaagaggtctttggcagccgcagganaggtgggcccagtncttntgggggaactcgttcttncccncctggatgccctaaaanagcatgttctggcaggcagggcaggcctcgccgcggtcccagccgcagttgctgc

SEQ ID NO: 657297 - DNA, 252 bp, Homo sapiens
aatatgtccacaacatcttcaacattcctccctccaaaagcaccagatctactggctggacataggggcttgtatctaatgaatacatgcagtggaggtgatggtagtgtgactacgttcctaaactgcatcatggcgttcctaccttgagtaccttttggactgactacgccctaggggcaagctaggctgccactgtcacactggccacctcaactacccggtgtgccgacgctcgcaacttcgtcactc

SEQ ID NO: 657298 - DNA, 878 bp, Homo sapiens
gatctaattagtcatctattgaagctagcttttacagagaaatatagatataaatattaaaaggaatccgtgtttaaaattatatgtaattactcgataacacgctttagctctgcataagcaatcaaaccaatgaaatgttgctgtcatctaaaagggtgtataacatacatcgcttttgatgagaataggccttagtgtatttattttatgtaggagacgtagtcgggtctgttagccccaggttgagtagggcagtggagcgatcttggtcagatgaaactctagcctcctgggattcaagagattgttccttgccttcgagccctcactcaagtagctgtggctatcacaggtcgtactaaccatcatgaccagttacatttatatggtcgtaccgagtagacgacctgggtttcaccatgtcgagtcaggctgttgcccaaagctcactgtggctcagggtgatccggctgcctctgtctcccaaagtgctgggattacaaggtgtgagaccagtcttgccaaatgcccttatgttagattgggaagtctcgattggatgatatatgtgttctcatcttcttagcatggactgggtggagactctgtgtggcccaatacatgttgctgtttcaagggattgaacaatgtctcagtctttaaatgacgtgtatacaaggtagttgactagttttgaaatatctgagtttattgggcaagttatttacccaactcagggtcgtgctacatggcatgggcaggtgaaatggcaacggttttctacattcattccctctatgggtaaagtggggggcaaattatatttttgacttaaacggtgctcgaatttatctccacaggaaggtgttttaaaa

SEQ ID NO: 657299 - DNA, 329 bp, Homo sapiens
  misc_feature (58)..(58): n is a, c, g, or t
  misc_feature (62)..(62): n is a, c, g, or t
  misc_feature (205)..(205): n is a, c, g, or t
  misc_feature (217)..(217): n is a, c, g, or t
  misc_feature (256)..(256): n is a, c, g, or t
  misc_feature (274)..(274): n is a, c, g, or t
  misc_feature (291)..(291): n is a, c, g, or t
aggagcgtaatgaggacgtactggggtgaggaacgttatgggatgaggaagtactggngttnactggtagtttcataaaattttttaaaaacaaattaaaggctgtacatgatttactttattgaacgaatcacaaacagtaatattaagaacatacaattaaactttatagtttatttcctactcactgtttagggatactttnatctattattgnaatatgactcttacaatttcaaggtccataggcaatatntttataggaatgatgtantaaacatatttgtgttncctagcactgcatctaaattcctacttgtcagccgtac

SEQ ID NO: 657300 - DNA, 680 bp, Homo sapiens
  misc_feature (1)..(1): n is a, c, g, or t
  misc_feature (104)..(104): n is a, c, g, or t
  misc_feature (109)..(109): n is a, c, g, or t
  misc_feature (117)..(117): n is a, c, g, or t
  misc_feature (119)..(119): n is a, c, g, or t
  misc_feature (123)..(123): n is a, c, g, or t
  misc_feature (125)..(125): n is a, c, g, or t
  misc_feature (127)..(127): n is a, c, g, or t
  misc_feature (131)..(131): n is a, c, g, or t
  misc_feature (133)..(133): n is a, c, g, or t
  misc_feature (146)..(148): n is a, c, g, or t
  misc_feature (151)..(151): n is a, c, g, or t
  misc_feature (158)..(158): n is a, c, g, or t
  misc_feature (178)..(179): n is a, c, g, or t
  misc_feature (188)..(188): n is a, c, g, or t
  misc_feature (192)..(192): n is a, c, g, or t
  misc_feature (198)..(198): n is a, c, g, or t
  misc_feature (202)..(202): n is a, c, g, or t
  misc_feature (209)..(209): n is a, c, g, or t
  misc_feature (219)..(219): n is a, c, g, or t
  misc_feature (229)..(229): n is a, c, g, or t
  misc_feature (233)..(233): n is a, c, g, or t
  misc_feature (239)..(239): n is a, c, g, or t
  misc_feature (241)..(241): n is a, c, g, or t
  misc_feature (244)..(244): n is a, c, g, or t
  misc_feature (249)..(249): n is a, c, g, or t
  misc_feature (253)..(253): n is a, c, g, or t
  misc_feature (268)..(268): n is a, c, g, or t
  misc_feature (273)..(273): n is a, c, g, or t
  misc_feature (275)..(275): n is a, c, g, or t
  misc_feature (278)..(278): n is a, c, g, or t
  misc_feature (280)..(280): n is a, c, g, or t
  misc_feature (283)..(283): n is a, c, g, or t
  misc_feature (293)..(293): n is a, c, g, or t
  misc_feature (300)..(300): n is a, c, g, or t
  misc_feature (302)..(302): n is a, c, g, or t
  misc_feature (334)..(335): n is a, c, g, or t
  misc_feature (345)..(345): n is a, c, g, or t
  misc_feature (354)..(354): n is a, c, g, or t
  misc_feature (386)..(386): n is a, c, g, or t
  misc_feature (437)..(437): n is a, c, g, or t
  misc_feature (469)..(469): n is a, c, g, or t
  misc_feature (481)..(481): n is a, c, g, or t
  misc_feature (484)..(484): n is a, c, g, or t
  misc_feature (493)..(493): n is a, c, g, or t
  misc_feature (501)..(501): n is a, c, g, or t
  misc_feature (607)..(607): n is a, c, g, or t
  misc_feature (617)..(618): n is a, c, g, or t
ncctttcatgtgaccccccattgggccttaatagccctcctgtttgaccgggctaataaaccccggggtcctctggaaaccatggtgcagtgtgcacacagacnaaccntattctcngnatantntncaancnttaaccatgtgannntcnagaaagntctttagcctgctctctaannactccgggntcancaaatnaacntgtaaanagtctgtggnctctcttggncttngttttnanatntattntggncccaggcttgtctgntaaanancanantgncaaatgtgtncaggcgncnctccatatcagaacatcattgtgtggaccttnnaggcggattntgagtttgnattgctggcatctgctctccctctccctgcantgattctcgggttcttgacctgagcagggtctcaccactgagacacagccntggagggtgggcttacatgaaaacatggccgnatggggagtggncgncagaggagnccagaggncaatatccagagactcccagtttagctgcatgcagagacctgttgtttgtatatttttgctttctaaaagaaatgctagagatagctgggcccagtggcatgtacntatagtctcnnctactcaggagttcaagtccagcctgggcaacatattgagaccccgtctctaaaaaaatcac

SEQ ID NO: 657301 - DNA, 569 bp, Homo sapiens
ggattcgccacgagccagctttgagatagcggcacaatgctgagtagatcagaaaagcaccttttaatagtcagttgagtagcacagagaacaggctaggggcaaataagattgggaggggaaatcaccgcatagtctctgaagtttgcatttgacaccaatgggggttttggttccacttcaaggtcactcaggaatccagttcttcacgttagctgtaacagttagctaaaatgcacagaaaacatacttgaagctgtatatatgtgtgtgaacgtgtctctgtgtgagcatgtgtgtgtgtgtgtgtgtgtgtgtgtgtgtgtgtgtgtgtgtacatgcctgtctgtcccattgtccacagtatatttaaaacctttggggaaaaatcttgggcaaatttgtagctgtaactagagagtcatgttgctttgttgctagtatgtatgtttaaattatttttatacaccgcccttccttacctttctttacataattgaaattggtatccggaccacttcttgggaaaaaaattacaaaataaacttttatagaaaaagtaaaaaaaa

SEQ ID NO: 657302 - DNA, 705 bp, Homo sapiens
taggagctgctaaaatgcctggattacctcggtgccgatcagcggatgaccacagaggatgagaaggacgacaagcccatccgatgctctgtgctgagtggggatattcgccttgcttgaaaaccttatggtcagcagcacttactctagagctggatcaagcaagttagaaggatgacattcacgcgaaacattcgtcaagaagaatttaatagaagctcactgggtattaacacgaaatctgacactggcctggtccccgaccagcactctgggcatttggctgccatggatagcagtacgactccagaggtgaacacgcgctttacaagagttgccagggtgtaccatagcatgagtcagatgctgattcgtgaggacccaataatacattattcatagcgtaagatgcaggtcttgccgagagttttgatggtggagcctgtagttggatcagcgtggcagcctactagacacttgaatgcacaggcatgacgagtggagcgtgcgagtatgaatactaacatatcaagattccacgattccattgggcctcctgaagattgacccaacagttaccatgattgacgagtgggagagaagctgatgtcgcatacagtgatgttggctggctgtcaggaaccgattgaagaaactgcggagaagtactttgaacccatttacttcatccagagagggttggga

SEQ ID NO: 657303 - DNA, 165 bp, Homo sapiens
gaaaaaagacagctaggaaacaaaagctaagggcaaatgtacaacttagaagaaaattggaagatagaaacaagatagaaaatgaaaatattgtccagagtttcagattagaaaaatgaaaaacaatgcttaggacaaagtattgggagaagttataggaagata

SEQ ID NO: 657304 - DNA, 668 bp, Homo sapiens
  misc_feature (92)..(92): n is a, c, g, or t
  misc_feature (97)..(97): n is a, c, g, or t
  misc_feature (105)..(105): n is a, c, g, or t
  misc_feature (107)..(107): n is a, c, g, or t
  misc_feature (111)..(111): n is a, c, g, or t
  misc_feature (113)..(113): n is a, c, g, or t
  misc_feature (115)..(115): n is a, c, g, or t
  misc_feature (119)..(119): n is a, c, g, or t
  misc_feature (121)..(121): n is a, c, g, or t
  misc_feature (134)..(136): n is a, c, g, or t
  misc_feature (139)..(139): n is a, c, g, or t
  misc_feature (146)..(146): n is a, c, g, or t
  misc_feature (166)..(167): n is a, c, g, or t
  misc_feature (176)..(176): n is a, c, g, or t
  misc_feature (180)..(180): n is a, c, g, or t
  misc_feature (186)..(186): n is a, c, g, or t
  misc_feature (190)..(190): n is a, c, g, or t
  misc_feature (197)..(197): n is a, c, g, or t
  misc_feature (207)..(207): n is a, c, g, or t
  misc_feature (217)..(217): n is a, c, g, or t
  misc_feature (221)..(221): n is a, c, g, or t
  misc_feature (227)..(227): n is a, c, g, or t
  misc_feature (229)..(229): n is a, c, g, or t
  misc_feature (232)..(232): n is a, c, g, or t
  misc_feature (237)..(237): n is a, c, g, or t
  misc_feature (241)..(241): n is a, c, g, or t
  misc_feature (256)..(256): n is a, c, g, or t
  misc_feature (261)..(261): n is a, c, g, or t
  misc_feature (263)..(263): n is a, c, g, or t
  misc_feature (266)..(266): n is a, c, g, or t
  misc_feature (268)..(268): n is a, c, g, or t
  misc_feature (271)..(271): n is a, c, g, or t
  misc_feature (281)..(281): n is a, c, g, or t
  misc_feature (288)..(288): n is a, c, g, or t
  misc_feature (290)..(290): n is a, c, g, or t
  misc_feature (322)..(323): n is a, c, g, or t
  misc_feature (333)..(333): n is a, c, g, or t
  misc_feature (342)..(342): n is a, c, g, or t
  misc_feature (374)..(374): n is a, c, g, or t
  misc_feature (425)..(425): n is a, c, g, or t
  misc_feature (457)..(457): n is a, c, g, or t
  misc_feature (469)..(469): n is a, c, g, or t
  misc_feature (472)..(472): n is a, c, g, or t
  misc_feature (481)..(481): n is a, c, g, or t
  misc_feature (489)..(489): n is a, c, g, or t
  misc_feature (595)..(595): n is a, c, g, or t
  misc_feature (605)..(606): n is a, c, g, or t
tgtaagccttccctgggcccaaaaaatcttctggtggaccagcctatccaaaccgggggtctttggaaaccagtggccgggtcccacagacnaaccntattctcngnatantntncaancnttaaccatgtgannntcnagaaagntctttagcctgctctctaannactccgggntcancaaatnaacntgtaaanagtctgtggnctctcttggncttngttttnanatntattntggncccaggcttgtctgntaaanancanantgncaaatgtgtncaggcgncnctccatatcagaacatcattgtgtggaccttnnaggcggattntgagtttgnattgctggcatctgctctccctctccctgcantgattctcgggttcttgacctgagcagggtctcaccactgagacacagccntggagggtgggcttacatgaaaacatggccgnatggggagtggncgncagaggagnccagaggncaatatccagagactcccagtttagctgcatgcagagacctgttgtttgtatatttttgctttctaaaagaaatgctagagatagctgggcccagtggcatgtacntatagtctcnnctactcaggagttcaagtccagcctgggcaacatattgagaccccgtctctaaaaaaatcac

SEQ ID NO: 657305 - DNA, 1203 bp, Homo sapiens
gtgcgcgctgtcatggctgctttgagacagccccaggtcgctggagctgctggcctgaggccctggctgagccttcctgggatggagttcgtgtggcctgatgcccagagcatggcctgtgtcatgctgcctgtgtgcctgtgtcaacctcatctgtgggaacacactggactacaaccagtggcctggtgctgcctatgtgctctgtgagctcatgacggtgctggtgggcagaccccgcaaggatgggctggtgtctctcctcaaccacctctgagggtgccgatgagccccagcggctgcagtttccaatgcaccacaagcaccagcgctcgcatggagacctgggactccatcggtgggccaactatgtcaaggcgagtgattcagtactacccaagctgcccccctccctggcttcagtagcagtggttgtgtcagactcaggtgcccactgaggagagaagatggactgtccacggctcaggatccttgggcaagtggacacgatacaaccttcctacagacacgctacagtccagagctcggagcaccaatagactagcccgcgacccaggtgatgtcacacgctaggaccggaacaccacacagcattcgacaagggaatgccctgatgagcaattccatggacccacgagcattctgactgactgggacaggacacagcgccacgcgcattgatcaatatgacgtgatgcggtccttggcagacacgcactaggggatgggaaacacacagagaaaccgccagacgccatgggcccgatgagcccagcaagaaacgcgacgaagtggtcgcgcacaacacccatgagcccccacgcgaacgttccccgtgcgacgagaggagacccactgaggaaggccaggtgcaccgggcggagtgcacagcgagaagcccacggggaaggaacaagggggcacgcgtaacaggccggcgaggcaaacccaggaatgcgccaacgaggggatgccgcgcggaacgcgagcacacgtcgggggacgaaacagggcgcgagaacctaacagcgacatacgggacgcagcgaggccccgcaaaagcaccaactccgcaccgcgaccgaagcagccgccaacgaacaagagtcagccaacacaaacgacgagacacaaagcacctgaacgaccacgcaagtgcaagcacgcacaacaagaccagac

SEQ ID NO: 657306 - DNA, 261 bp, Homo sapiens
ttagaggataaggtcatttcagttcctcagagcacttatattgcattttttaaacatcttgtctatgtatgcttgtaatttttgtttgattttaacttgctgcacttctcatgacttagcaaaaaaaaaaaaaaaatagggggggaattgtgtgatgacacgggcctttaatatcatacatttcggcatgtaatgggctaaataaattttgagaatactggataaacccctgagggtatcatggatagaccggaaatggag

SEQ ID NO: 657307 - DNA, 329 bp, Homo sapiens
  misc_feature (21)..(21): n is a, c, g, or t
  misc_feature (166)..(166): n is a, c, g, or t
gtcactgccagcgcagactcngtctcaaaaacaaaaacaaaataaagagaaatgtaagttaaaaagtactgagaaagggtttagtttttaatgtttaaaactctttaacgctctgcactcgatatggtaggaaaaaagatctttccggggccgggagcggtggctnacgcctgtaatcccagtactttgggaggccaaggcgggcggatcacgaggtcaggagatcaggaccatcctggctaacaatgtgaaacctcgtctctactaaaaacacaaaaaactagccaggttgtggtggcgggctcctcggggctccccttgctcagctg

SEQ ID NO: 657308 - DNA, 212 bp, Homo sapiens
tccagtacccgagcatgcatgcatgcgtgcagggtcgacgtgtatacaccactgcggtgcatgcctccctgaacaagtaccggcgacacgtgagcaccgtgctgacctccaaatatcgttaagctggagcctggtcgacgtgtattcaacattgcggtgcatgtctccctgtacaagttccgtcgacacgtgaacaccgtgctgcactccaa

SEQ ID NO: 657309 - DNA, 185 bp, Homo sapiens
ctagaggatcccgggcagaggcttgggaagaggagggtggaggctgagcgttatctaggttcccctaacttcaggtactgcagacgagcctccagttctggcttccgaattgatgtcccatatagagtttccaagtctgagaacattggcttgacgccttaattgatgtccaccaatctctcgga

SEQ ID NO: 657310 - DNA, 229 bp, Homo sapiens
  misc_feature (162)..(162): n is a, c, g, or t
  misc_feature (174)..(174): n is a, c, g, or t
  misc_feature (197)..(197): n is a, c, g, or t
  misc_feature (209)..(209): n is a, c, g, or t
tgttttcagacggagttttgctcttgttgcccaggctggagtgcagtggcatgatctcggctcactgcaacttctgcctcccaggttcaagcgattctcctgcctcagctacttgggttgctgaggcatgagaatagcttgaacctgggaggtggaagttgnagttagccgagntcatgagatcgtgccattgcacnccaggctgggcnacaagacaaaactctgtctc

SEQ ID NO: 657311 - DNA, 359 bp, Homo sapiens
cggtccagtctgtttacacaactggtaggtgtggacatatggaacatcacacccttaactaagaatgcaaaccttggcctgcacttagcacacaaagcaacttaccaagttttatcttaaagttaaaaattgctaggagttaattaaaactactagaaatagatttacatgcagggtgtgtaagaacagtaaaatgttttttttagtaaaaggttataagaaggcttggaaatgtaaacttttgcctagggttaaagaattgttttgagttaaattaggaaaaagctgaaggttcaaagaagtggtgaaagaactgtggaaattaatctttcagaagaggttctttgtgtaaactgatt

SEQ ID NO: 657312 - DNA, 887 bp, Homo sapiens
gggacatgctgagctggagccgcggtccggacggcagctgcgtgccccgagctctcctgcctcccccctgcccgccaagccgaggcagctcgagcccagtcacgctggcccaagcagcagcgccgagagcatgccccagtagcagcgccattggccgggtgagaacgcctacatcgacaacctcatggcggacgggacctgtcaaggacgcggccatcgtgggcctacccacaggacactcagcccatccagatcttggagccggcagatccccggggaaaaaacgttacagttcaacaattcacgcccaagattgagagctgagttgtccctgggtatgacaaacagacccgtgttccaacgtctcattataacggttgacattgtggcatgcccaccctatgggcggtgccctagcacaacgtgatccacggtggactcccgtgggaccatcaacatggactgcacgacacttgcggcggcaacttcaagaccattggcgatacttatcagtataacccatcagagaagtgcaacccacgagttgataggctccccaccagcacgttctcacaagtggccaatctttgtatccaacctcaggtactttgtacagacgtgacggccatagcccgcgtggccttcagatagcgcccaaaaacagacaggctttgttccacctcgtgtatgcggctaaatggatatcaaacaaagtgaacactgggcatttatgacaaaactttgggccctatccccaagcacttttctggagcagttattaccacaaaggtatagcattgagccctttagatatcgtagcacacccttttcaccacatttcaacacccggcattccgctcagtcaggtcttattgcagcacgcaatc

SEQ ID NO: 657313 - DNA, 870 bp, Homo sapiens
  misc_feature (6)..(6): n is a, c, g, or t
ggctcngctcagcatttggggacgctctcagctctcggcgcacggcccagcttccttcaaaatgtctactgttcacgaaatcctgtgcaagctcagcttggagggtgatcactctacacccccaagtgcatatgggtctgtcaaagcctatactaactttgatgctgagcgggatgctttgaacattgaaacagccatcaagaccaaaggtgtggatgaggtcaccattgtcaacatttttgaccaaccgcagcaatgcacagagacaggatattgccttcgcctaccagagaaggaccaaaaaggaacttgcatcagcactgaagtcagccttatctgggccacctggagacggtgattttgggcctattgaagacacctgctcagtatgacgcttctgagctaaaagcttccatgaaggggctgggaaccgacgaggactctctcattgagatcatctgctccagaaccaaccaggagctgcaggaaattaacagagtctacaaggaaatgtacaagactgatctggagaaggacattatttcggacacatctggtgacttccgcaagctgatggttgccctggcaaagggtagaagagcagaggatggctctgtcattgattatgaactgattgaccaagatgctcgggatctctatgacgctggagtgaagaggaggaaggaggtcccaggggctcagatccttgacggcgggcgtgcccacttccaaagttttgaagggcaaagtgcagcctttgacgtggaaagattcgccacgggtaacgggacggaaggtctggcagttgggcttaaaaacccctttgtgaccgtttcacacaaggggggcaagcgacacaagacccaaaga

SEQ ID NO: 657314 - DNA, 254 bp, Homo sapiens
tgactctgaggatcccgtctagaaataaaacaactgctaccacagaaatacaaaagatcattcaaggctaccctgaaaatctttacatgcataaactaggaaacctagaggagatggataaattcctggaaatatacaaccctcctagattaaactagtaagaaatagaagctctgaacagaccaataacaagtagcaagattgaaatggtaattaaaaagttatcatcaacaacaacaccagtgtggagagag

SEQ ID NO: 657315 - DNA, 132 bp, Homo sapiens
ctttggtcgagacacattagaaatgcctgtatagattctcaaggaacttgtacttttgagtccccatgattttctacatactctggttccccttctacaagcacaaccattgtacttaccatcacagtaata

SEQ ID NO: 657316 - DNA, 1318 bp, Homo sapiens
  misc_feature (1)..(1): n is a, c, g, or t
ntccggagacacacattccgggggggaaacctttcccgccccacaccttgatgtggtttgcccccctgccaccaaaaggggtttaataagagagccccaatgagaattggtccttctgttcccatgtgaatttattgtgagctggaagtgttggacgccacagaaatcctctccggagaattcttcttatttgaccgcccttggaggtgtgaaggaacggaaaaacggggacctttgaatgtgttttcccccaccaggtgggattccataggccattctacttgggcccccggatgtccgggtaggccgttggccccccccccccctcctcgaggaagaaaggtatttttttgaaataagggtcaaccacaagggagggttaccacagcccccctttgatttggaccacaatgttttgtgtaaaaagcccactctcacgggtatatagaaagggttttaaaaaagggaagcaacacccttgggagagaaaatatgccgcttttcctctgttggagacaccctggggttttccacgtgggcccacatttttcacgagaatctctcagggccccccctcgttaatattttttgcgcttgaagattcgcgcgcctgtgtaatttgaaaccttcccccacttgaaaaagggcgcacaaaggggggacaccgcccgaagatttaaaagggtgtccctcgagatccacgaaacttacactggggttcttcccccgccacagctggaaaaagttgggacacacaggtgtgagaaaatattttataggttccttgagaattccacacagagagagaaatagtatcccggcccacacagtgtcccctcgtgacactcatatgtaatatatcccacgccacagaccacctcataaggggcgacactacccacgagaaggcgctctgtgctgttaccctcgtttgttgtgtggagtgaaatgagtctgataaccccgcacacaccgcgccctgagggcgctcccacgaaaatggtgctccacccacatggctttccacggctaaccacggttctatgagaaacccacgccttgcgagaaataccacgttccccgctggaccactcccctcgtgaggggtgaacgcttatgcacttataccccccacctcattttagttgcctaagcattgcctggccttcctgtctagtctctcctgtaagccaaagaaatgaacattccaaggagttggaagtgaagtctatgatgtgaaacactttgcctcctgtgtactgtgtcataaacagatgaataaactgaatttgtactttagaaaccaaaaagaaaaaaa

SEQ ID NO: 657317 - DNA, 438 bp, Homo sapiens
caatccatctttttcttgtaatatcatgacttttctctgcttcttgggagcacttgcagcatcactagtggtacttcatatgggtccaatagtgttattcagtgtttatggaaatgcactaaaaatgatgaaaaatatgtgaaaactgtaagaggttacttttactgtcatatgcagtttactggagaaatgaactgctcacacaaagatgattagctttacatgatattttaagcggatacttcagctcaccacaacagcaacaggacttggctctgaaattattatagtagtatagtatatactacaggtaattttatgccattatgattgaatactacctcttcacgtctgttaacatttctcttgacagctaatggtaccatgtacagtctttatttgtgtatgttttaatccattttagctttttataaaaaa

SEQ ID NO: 657318 - DNA, 1398 bp, Homo sapiens
  misc_feature (6)..(6): n is a, c, g, or t
ggctcngctcagcatttggggacgctctcagctctcggcgcacggcccagcttccttcaaaatgtctactgttcacgaaatcctgtgcaagctcagcttggagggtgatcactctacacccccaagtgcatatgggtctgtcaaagcctatactaactttgatgctgagcgggatgctttgaacattgaaacagccatcaagaccaaaggtgtggatgaggtcaccattgtcaacatttttgaccaaccgcagcaatgcacagagacaggatattgccttcgcctaccagagaaggaccaaaaaggaacttgcatcagcactgaagtcagccttatctgggccacctggagacggtgattttgggcctattgaagacacctgctcagtatgacgcttctgagctaaaagcttccatgaaggggctgggaaccgacgaggactctctcattgagatcatctgctccagaaccaaccaggagctgcaggaaattaacagagtctacaaggaaatgtacaagactgatctggagaaggacattatttcggacacatctggtgacttccgcaagctgatggttgccctggcaaagggtagaagagcagaggatggctctgtcattgattatgaactgattgaccaagatgctcgggatctctatgacgctggagtgaagaggaaaggaactgatgttcccaagtggatcagcatcatgaccgagcggagcgtgccccacctccagaaagtatttgataggtacaagagttacagcccttatgacatgttggaaagcatcaggaaagaggttaaaggagacctggaaaatgctttcctgaacctggttcagtgcattcagaacaagcccctgtattttgctgatcggctgtatgactccatgaagggcaaggggacgcgagataaggtcctgatcagaatcatggtctcccgcagtgaagtggacatgttgaaaattaggtctgaattcaagagaaagtacggcaagtccctgtactattatatcccagcaagacactaagggcgactaccagaaagcgctgctgtacctgtgtggtggagatgactgaagcccgacacggcctgagcgtccagaaatggtgctcaccatgcttccagctaacaggtctagaaaaccagcttgcgaataacagtccccgtggccatccctgtgagggtgacgttagcacttaccccccacctcattttagttgcctaagcattgcctggccttcctgtctagtctctcctgtaagccaaagaaatgaacattccaaggagttggaagtgaagtctatgatgtgaaacactttgcctcctgtgtactgtgtcataaacagatgaataaactgaatttgtactttagaaaccaaaaagaaaaaaa

SEQ ID NO: 657319 - DNA, 198 bp, Homo sapiens
gtagagacggggtttcacctgttagccaggatggtcttgatctcctgacctcgtgatccacctgcctcggcctcccaaagtgctgggattacaggcgtgggcaccagacccgggaaaaagatttttaacaggatgccgtaaaattatatgccattaagattcagagagctttttggtgcctttatttgttagtcgacg

SEQ ID NO: 657320 - DNA, 1457 bp, Homo sapiens
gctctcagactctcgggcacgggccaggttatcttgtagacataacaacattcggattgcactctacccggagagtttcccgcttggttgaacacatggcctcaggcagcttccttcaaaatgtctactgttcacgaaatcctgtgcaagctcagcttggagggtgatcactctacacccccaagtgcatatgggtctgtcaaagcctatactaactttgatgctgagcgggatgctttgaacattgaaacagccatcaagaccaaaggtgtggatgaggtcaccattgtcaacatttttgaccaaccgcagcaatgcacagagacaggatattgccttcgcctaccagagaaggaccaaaaaggaacttgcatcagcactgaagtcagccttatctgggccacctggagacggtgattttgggcctattgaagacacctgctcagtatgacgcttctgagctaaaagcttccatgaaggggctgggaaccgacgaggactctctcattgagatcatctgctccagaaccaaccaggagctgcaggaaattaacagagtctacaaggaaatgtacaagactgatctggagaaggacattatttcggacacatctggtgacttccgcaagctgatggttgccctggcaaagggtagaagagcagaggatggctctgtcattgattatgaactgattgaccaagatgctcgggatctctatgacgctggagtgaagaggaaaggaactgatgttcccaagtggatcagcatcatgaccgagcggagcgtgccccacctccagaaagtatttgataggtacaagagttacagcccttatgacatgttggaaagcatcaggaaagaggttaaaggagacctggaaaatgctttcctgaacctggttcagtgcattcagaacaagcccctgtattttgctgatcggctgtatgactccatgaagggcaaggggacgcgagataaggtcctgatcagaatcatggtctcccgcagtgaagtggacatgttgaaaattaggtctgaattcaagagaaagtacggcaagtccctgtactattatatcccagcaagacactaagggcgactaccagaaagcgctgctgtacctgtgtggtggagatgactgaagcccgacacggcctgagcgtccagaaatggtgctcaccatgcttccagctaacaggtctagaaaaccagcttgcgaataacagtccccgtggccatccctgtgagggtgacgttagcacttaccccccacctcattttagttgcctaagcattgcctggccttcctgtctagtctctcctgtaagccaaagaaatgaacattccaaggagttggaagtgaagtctatgatgtgaaacactttgcctcctgtgtactgtgtcataaacagatgaataaactgaatttgtactttagaaaccaaaaagaaaaaaa

SEQ ID NO: 657321 - DNA, 118 bp, Homo sapiens
gtcctcatgtaacatttaaaatgcttattaaattcaatttcatcaaaatattggaatgagagttgttactgaaattgagatacaaatgtatcctctccctgaagaaaagagtgcttgg

SEQ ID NO: 657322 - DNA, 734 bp, Homo sapiens
cctcagatgaatgcggtgttaagacctgcaataatccagaatggctactctgatctatgttgatacggacaatggagaaccaggcacccgtgtggtttgctaaggatgggctgaagctgggtgtctggaccttcaatcaaagccttagcatgggcgatctcaagtttcaacaccacgttctggcccacacgttcgatgccccaccagccttacctaaagctcactcagcaaccggcattaggggacactgtcactcagcagctaacacgacacaagctctgtctacagtacacaacgggcgtagccccctgcaacagcatcacaaaccgagcgcaacgcgctgtctacgtgccccaacaataggattgaccctgcagcacagaccagctctgacactgccctcactcacgtcctcatgtctcctctgcccttctgccacttgctatcggcggtattacgcggaagcaactacacaagagaagcttgtccgtacttcgcggagctcggcacccgtgcgcggtccatacgaacgcgtttctgccgcaacaggttgcaaggctagccgttgacgcttaggcaagtacagccaccgatatggaattagggtgccttggcattctacacaagtgtgaagatgggcagcgcggcgccaggtgacatggcatacgccatgcactgtatgtgactgcagtcggtagaatgtgtccactgggcagggacgctagcagtaggtg

SEQ ID NO: 657323 - DNA, 1238 bp, Homo sapiens
  misc_feature (6)..(6): n is a, c, g, or t
ggctcngctcagcatttggggacgctctcagctctcggcgcacggccaggtgtggatgaggtcaccattgtcaacatttttgaccaaccgcagcaatgcacagagacaggatattgccttcgcctaccagagaaggaccaaaaaggaacttgcatcagcactgaagtcagccttatctgggccacctggagacggtgattttgggcctattgaagacacctgctcagtatgacgcttctgagctaaaagcttccatgaaggggctgggaaccgacgaggactctctcattgagatcatctgctccagaaccaaccaggagctgcaggaaattaacagagtctacaaggaaatgtacaagactgatctggagaaggacattatttcggacacatctggtgacttccgcaagctgatggttgccctggcaaagggtagaagagcagaggatggctctgtcattgattatgaactgattgaccaagatgctcgggatctctatgacgctggagtgaagaggaaaggaactgatgttcccaagtggatcagcatcatgaccgagcggagcgtgccccacctccagaaagtatttgataggtacaagagttacagcccttatgacatgttggaaagcatcaggaaagaggttaaaggagacctggaaaatgctttcctgaacctggttcagtgcattcagaacaagcccctgtattttgctgatcggctgtatgactccatgaagggcaaggggacgcgagataaggtcctgatcagaatcatggtctcccgcagtgaagtggacatgttgaaaattaggtctgaattcaagagaaagtacggcaagtccctgtactattatatcccagcaagacactaagggcgactaccagaaagcgctgctgtacctgtgtggtggagatgactgaagcccgacacggcctgagcgtccagaaatggtgctcaccatgcttccagctaacaggtctagaaaaccagcttgcgaataacagtccccgtggccatccctgtgagggtgacgttagcacttaccccccacctcattttagttgcctaagcattgcctggccttcctgtctagtctctcctgtaagccaaagaaatgaacattccaaggagttggaagtgaagtctatgatgtgaaacactttgcctcctgtgtactgtgtcataaacagatgaataaactgaatttgtactttagaaaccaaaaagaaaaaaa

SEQ ID NO: 657324 - DNA, 182 bp, Homo sapiens
  misc_feature (39)..(39): n is a, c, g, or t
  misc_feature (61)..(61): n is a, c, g, or t
gtattcttgtctcctcaactcctcattactcttcactanctactctcagctactttcttanttacttttgtctgttgtttggacaggatctcactctgtcgccaggctggagtgcagggtgcgatcatggtcactgagccttgaccttcccggtcaaactattctccacctcagcctccaag

SEQ ID NO: 657325 - DNA, 1444 bp, Homo sapiens
  misc_feature (6)..(6): n is a, c, g, or t
ggctcngctcagcatttggggacgctctcagctctcggcgcacggcccagcttccttcaaaatgtctactgttcacgaaatcctgtgcaagctcagcttggagggtgatcactctacacccccaagtgcatatgggtctgtcaaagcctatactaactttgatgctgagcgggatgctttgaacattgaaacagccatcaagaccaaaggtgtggatgaggtcaccattgtcaacttgtggtaccgagctcgcagtcgacagttgcgaacagcacgaacatggatgaattcgtcctgtacgacctgactcgagatgaatatggaccaatgaaggaaacttgtcgatccagggagcatggagattcaaggactgtagtctggggcaccctgtgagtacccggtgattttgggcctattgaagacacctgctcagtatgacgcttctgagctaaaagcttccatgaaggggctgggaaccgacgaggactctctcattgagatcatctgctccagaaccaaccaggagctgcaggaaattaacagagtctacaaggaaatgtacaagactgatctggagaaggacattatttcggacacatctggtgacttccgcaagctgatggttgccctggcaaagggtagaagagcagaggatggctctgtcattgattatgaactgattgaccaagatgctcgggatctctatgacgctggagtgaagaggaaaggaactgatgttcccaagtggatcagcatcatgaccgagcggagcgtgccccacctccagaaagtatttgataggtacaagagttacagcccttatgacatgttggaaagcatcaggaaagaggttaaaggagacctggaaaatgctttcctgaacctggttcagtgcattcagaacaagcccctgtattttgctgatcggctgtatgactccatgaagggcaaggggacgcgagataaggtcctgatcagaatcatggtctcccgcagtgaagtggacatgttgaaaattaggtctgaattcaagagaaagtacggcaagtccctgtactattatatcccagcaagacactaagggcgactaccagaaagcgctgctgtacctgtgtggtggagatgactgaagcccgacacggcctgagcgtccagaaatggtgctcaccatgcttccagctaacaggtctagaaaaccagcttgcgaataacagtccccgtggccatccctgtgagggtgacgttagcacttaccccccacctcattttagttgcctaagcattgcctggccttcctgtctagtctctcctgtaagccaaagaaatgaacattccaaggagttggaagtgaagtctatgatgtgaaacactttgcctcctgtgtactgtgtcataaacagatgaataaactgaatttgtactttagaaaccaaaaagaaaaaaa

SEQ ID NO: 657326 - DNA, 608 bp, Homo sapiens
  misc_feature (6)..(6): n is a, c, g, or t
ggctcngctcagcatttggggacgctctcagctctcggcgcacggcccagcttccttcaaaatgtctactgttcacgaaatcctgtgcaagctcagcttggagggtgatcactctacacccccaagtgcatatgggtctgtcaaagcctatactaactttgatgctgagcgggatgctttgaacattgaaacagccatcaagaccaaaggtgtggatgaggtcaccattgtcaacatttttgaccaaccgcagcaatgcacagagacaggatattgccttcgcctaccagagaaggaccaaaaaggaacttgcatcagcactgaagtcagccttatctgggccacctggagacggtgattttgggcctattgaagacacctgctcagtatgacgcttctgagctaaaagcttccatgaaggggctgggaaccgacgaggactctctcattgagatcatctgctccagaaccaaccaggagctgcaggaaattaacagagtctacaaggaaatgtacaagactgatctggagaaggacattatttcggacacatctgttaattcctgcagctcctgcgtgttctggagcagatgaatctcatgagagat

SEQ ID NO: 657327 - DNA, 286 bp, Homo sapiens
ttgaatattagagaatatctgtagaccaagtagtagtctaataacatactgtgtaaaactatgttttgttaatgtgttatcttttcccttttgtgataaaaaaagaaggtaaggggagaaatttaccagctgcttggaattatttatccatggaagatctgtagaaaaggtccctagatatacagatagacctcctgcaacggacttcatgaaaggccaagagggggagagtttgtgtactgtcctagacttgtagcctagggagcttgcctacatgtgtaagagc

SEQ ID NO: 657328 - DNA, 737 bp, Homo sapiens
gtgcgggtggagtcgcggagctactcctcatggccgccccgccggagccccggctgagcccgaggcagagcgaagtcccttaagctcctaggattcccacgcactgtcgaaacatactcccatgcgccccggcaattcaactactggtcatggtctcacttaggactctgtacgctggcctggcctttcggcaccaatttgcctctggctcccacctaagtagcacacttagcacagatcactgctgacttgcttgcgcacgctagcgcacgggctatcacctcattgggctggaccttatcgggcgcatggcctgggcttcccactgtgctcacgcgctacttacacctcaacttgccacaacggcccacacaggaaacttcccaaggcgcacacaggaaacttgggccccagcacgacgaggcacaccactttccccacagaggaacaggacttcttgcacttacttgcacacggggctagcccacagctcttcgcacctcccccttggcaacagacgttagaggaaacccaaaccacactcggggcccagcggcccagcgccacggccacaccctgaggaccacccgaacctcccttctgcaccgtccccaattagggacacagcttcaacagctgggttacccccccgaagcactgcttcgcacaggaaatgtccagatcgcccaagcgatattagaccaacccacttcttcccacgtgggttgcgccacaat

SEQ ID NO: 657329 - DNA, 1386 bp, Homo sapiens
  misc_feature (6)..(6): n is a, c, g, or t
ggctcngctcagcatttggggacgctctcagctctcggcgcacggcccagcttccttcaaaatgtctactgttcacgaaatcctgtgcaagctcagcttggagggtgatcactctacacccccaagtgcatatgggtctgtcaaagcctatactaactttgatgctgagcgggatgctttgaacattgaaacagccatcaagaccaaaggtgtggcatgcaggtccacccattgtcaaaccattttgcacccacaccgccagcaacatagccacagcagcaccaggcatcattgcgcttcagccgtcacccagcagcaaggcaccaaacaacaggcacactatgccatccagccactgcaagtccaggccttcatcatggcccaccctggcagcacgtataaagcatttatagggccatcattagcacaagcaccaccatagactccaggtcatagcaccgctctcatgcagactaaaacagctatacccatgacaagcgcggctcggagacaccagcacggcaggcactctcatccatagcagaatccatcataggatcccaaggaaacccaaccgcagggcaggcgtagacgaggcaacacattcacaccaagcaagtcataccaaagggcaaacatggtaccaaagcacatgcatcgtgggcagcaaaggaccaatataatcatccagggcaccaccaatcctgggtagcacttcccggacaaacagcagtgcacagcggaacaggcccacatggccaaaaagggggacacagacaacgaaccgcagcgacgggaacgggcctacctgaccactaggccgtcatcgaacccgagcactatgcaccccaagcaatgcctccgggagaaacgatcaaatggaacggccagcggacgtccacagaaccgaacccgccgcacccgcgaacggtaaccacaaacggcggcgaccacgcaaatgaaggaacccgcagcggggccgacgagggccccccacccatcacaagagaaaagaaatacgaaaaaaaggtaccaaaggacggaagcacagcgcaaactcgcgaagcatgggaaagcgagacagaagaaaacagggcacacaggaagacccggcacacaggcagcaccagaaacagaaacacggcacccagacaaccgcccacaccagcacaggcgcacaacgcagcggcagccccgcgacaccgcacacggcaccaccgcaaaaggcacacacaaaaaaggaaccacaccaagcacggcccgatcacacaccaggcgtcgaaccagacgacgagagaagcagcacataaaccaccaacaaccaggacacaacacgcggcaccacgcagagacagcgcacaccgcgaacgtccgaccgcagacacc

SEQ ID NO: 657330 - DNA, 199 bp, Homo sapiens
ctaccgaggctccagcattactggtatttggagtgtcagcacgttgctcacagaatgccaggcacttgtccagggaggcgtgcacctgagtggtaaactcggagggaagttggacggccagggtcactagcaggcagtgacttaggagcttgacgttgaccgggtccacccgaagtttgtgcgcgttgccggtcgctca

SEQ ID NO: 657331 - DNA, 249 bp, Homo sapiens
gtagctgggaggagctgaggacaactataaagagcaggtgtgagacaatgcacaacttggatctactcaatctactgattggcatgccagaggaccacagagaggggtcggtcacattttgctcccaggttgtgagcttgagagcccgggttaaatgacagttgttctcccatgggaatgggaaaaatctaacagaaactggttttgagagaaatgcggatgagtctaacaatgggaacacatttgagg

SEQ ID NO: 657332 - DNA, 1138 bp, Homo sapiens
  misc_feature (283)..(283): n is a, c, g, or t
agacaagtcaatcgcccttgggagactctgcaacatacgccgttgcccgcgcattctatagatatggcacacatgtgtccaatctgcgggcgatcttgcttacccatcacgggactgcaaatagttgtccggatcgcactgtgtgactaccactcgtgttttgtgagcaggtacccactggccttgtcaccctcgtgcgaagtacactcactcgcttattcacgcagtgtcctttctagatgctagacacaggtagggggacaaacgttgcgtcagccggttntgaactgttttgctgtgcgccgttaggaccccggggtgcaatgtctcgtccggcgaacctctcattcgtggtttctctcttgtgtgtcttagtccgatcggagcacggttgcaatgagggccagccggggggaacgctcgccaatccttctctgggtctactaaggggaagggtaaacgtccgcgagcttgcagagaggccgattttgcctgagtatgctatgatcatcgcacgctgtattggcgttactcaaagtgcccaggggacattggctgagtggccagtggcggcggaaagcgagcaaggagagaacgcgcaagccacgcgtacaaagcccgaactatgcacgtcgcagtgccctggagatcgcgaggcataggcgcgatgtgccccagggacagggggagctggcgacggccaatgcaagggggatcacgcccatggagcgacggaaccgtgcctcccaactcgtgtcccagggatgtttcagagcctacttggctcaatcgctgctcagcacccatgccgggattacagctgtgccgttatgtgagggggctggagagatgggcataaggtcaggaaacgttgggatggagccaaccagccactgtatagacggcgtgaggccctctggggccctgccggaaagggagccacccgtgctcctcccaacaaacgactcagaagcagcagaaagacgggtgactgtagaggagcaactcagctctacggggagggagctcattgggtgagcttctacagggctgagaactgcgctttggggacttcagccttccggttccagtcgtgggctgagtggggggtccagaatacctggatgccccttcccca

SEQ ID NO: 657333 - DNA, 136 bp, Homo sapiens
gtcagcaacttcctatgttggcctggaaaggactgggattacaggtgtgagcaccgtgcctggcatcgattctcgacaaagaaatgaaataaaaaaaaagttagccgggtgtggtggcatgtacctttagtcccag

SEQ ID NO: 657334 - DNA, 357 bp, Homo sapiens
acaaggaggcctccctacctccacttcatcccacacaggagtcttgatgctgggtgggagtccaggagtctgtctaggaatccaggaaggcttcctagaggaggagccattgcatctgggcccttgaaggatgaatagaagtttcctaggcagcgaagggccaggtactcagaagaccacaggcaagacccagccccatggcctgccccaaagagttcacatctcataaatgatgcttgaataataacaataatagtaacagctcccacatgctgagtgtgcgctgctaggacacagcatgtgacaggaattcagtgcctgaatgaatgagcccattaattaaaccttctcctttaa

SEQ ID NO: 657335 - DNA, 738 bp, Homo sapiens
  misc_feature (154)..(154): n is a, c, g, or t
  misc_feature (619)..(620): n is a, c, g, or t
  misc_feature (648)..(648): n is a, c, g, or t
gggcagctttgtggccggaggcaggtctgggttactgagggttgacagctgtagagtatgacctcaggttttcttcttttcagctggccatcctctctggacctgtcctttgactcattcatacagtgggggaggggtacctatcttacggagntgtcctaagttctaaatgcaaagcgctcccatctggcatctatggcacagatatatgttggactcacaggagtgatgctgagtggcggaggcagtgcttttcttttttttttttctgttttttgtttttttctggtgataagagtctcacccaggttgaagtgtagtgacatgatcccacctcactgccactgccacctcctgggtttaagcaattctcgtgcctcagccttctgaagaggtggatttctaagcacacaccaccacgcctggctaatttttgtatttttagtacagacaaggttttaccatgttggccaggctggtctcgaactcctaacctcaagtgatccgcccgcctcggcctcccaaagtgctaagattacaggcgtgagccaccgcgccgggcaaatgtttttatttggactgtcaggaagctccagagctgcagctggtggaaggcggnnaaaacactgcatgcgtctagatgcacanaacaaaatccaggagcaggatgggttgggaaggccttgggtggatctcaagagaaaagacttttgcttctagtttaagagtcagacagag

SEQ ID NO: 657336 - DNA, 266 bp, Homo sapiens
ggaggccgaggctgcagtgagctacgattgtgctcctgtactccagcctgggccacagggtcacaccctgtctcaaaaaaaaaaaatggcgttccaaaagcccctgggccaagttttcaagggttgggggcccttgggggcctaccgggaaaaccttaaggccgggggaaacctccggtaatgaaaaccgtttcctgggttgcccccggcccgaatggggacccggcctaaatttcaaaacatgggccaaggtggttcctgggggg

SEQ ID NO: 657337 - DNA, 208 bp, Homo sapiens
tggctagctgcagttgacgtgagcaggaggcattgctgatgatcttgagtgctgttgtcatacttctaaatggttcaaacccattaagaacatgggggcatcagcagagggggcagagatagatgacccttttggctcccccctgcaaatgagccccagccttctccatggtggtgaagacgccagtggacctcacgacaactgcagc

SEQ ID NO: 657338 - DNA, 666 bp, Homo sapiens
tggaccagtcggctctctgtaaaatggaccaatcagcaggatatgggtggggccagataagagaataaaagcaggctgccggataacgcagtggcaacccgctcgggtccacttccgcactgtggaaactttgttctttctctgtttgccataaatcttgccactgctcactctttgggtccacactgcctttatgagttgtaacactcaccgcgaaggtctgcagcttcactcctgaagccatcgagaccacgaacccactgggaggaacaaacaactccagaggctccgccttaagagctgtaacactcaccgcgaaggcctgcagcttcactcctgatccaggagaccacaaacccaccggaaggaagaaactcctaacacatccgaacatcagaaggaacaaactccggacacaccgcctttaagaactataacactcacctcgagggtccgcggcttcattcttgcagtcagtgagaccaagaacccaccaattccggacacataactagcaaagctacctcaggatggagcagagccagcccctgggcacaaagtggaatggcgatgtgagctgttggaaaaacgcaacacttctcaattcggtatccatttaccagcgagacccggttcgggctcacgcatgtgaccacacttctgttg

SEQ ID NO: 657339 - DNA, 861 bp, Homo sapiens
ggctgctatttctctgtgaggtaggaggctgccatctgtaaaatgagtgggaactcattatctttctgatgtctgtctgtgccaccacaagttatctgttctacagctgcaagtttcccactctctttgtgtcagtggctggcaaatatccaggcatgcaagcttcctatcagtacactgagtaagaaggtgtttcactctgtgtggcccaggctgaagtgcaatggcacgatctcggtcactgaaacctcggtctcccgggtcaagtgattcttctgcctcatgcctcccgagtagctggaattacaggcatatgccaccaacccaagctaattttccatttttagtagggacgggtttaaccatgtgtgtcaggctggtctgtgaatcctgacctcaggtgatccacctgcctgtgttctcctaaagtgctgggatagcaagcatgaaccgtgcgtcttggcccattttttcttattcttaaacatcctataaacattgtggagctagtgtatggggaggttattcctatggtggatggagcagtttaaaaaagctgaaattagtgaaagtcttcccaaggtgatttacacaaatttataagccccatgttcttacgtagtaaatttcaacaattttttctattggaagatggcatggttttcttatgacaggtatttaatttcaagggataaaagggttaacttttggaacatttggcttaatatgctggagcataatatgagtggaacgggaagggtcaattccgcgaagaatacccaaataagaggggggtcacagaacggtggacgatttggtagtagggaaaggtaggcaaagtaggtattagatccgagcggg

SEQ ID NO: 657340 - DNA, 108 bp, Homo sapiens
gttttctccatgagctgtgtctgattagaagtagagttccaaccattcaatattccaccaactgccatgccctgtgtacaactgcagaaaaatttccgtccaacctat

SEQ ID NO: 657341 - DNA, 1228 bp, Homo sapiens
  misc_feature (240)..(240): n is a, c, g, or t
  misc_feature (454)..(454): n is a, c, g, or t
  misc_feature (787)..(787): n is a, c, g, or t
  misc_feature (791)..(791): n is a, c, g, or t
  misc_feature (796)..(796): n is a, c, g, or t
  misc_feature (804)..(806): n is a, c, g, or t
  misc_feature (810)..(810): n is a, c, g, or t
  misc_feature (819)..(821): n is a, c, g, or t
  misc_feature (824)..(824): n is a, c, g, or t
  misc_feature (829)..(829): n is a, c, g, or t
  misc_feature (835)..(835): n is a, c, g, or t
  misc_feature (839)..(839): n is a, c, g, or t
  misc_feature (844)..(844): n is a, c, g, or t
  misc_feature (847)..(847): n is a, c, g, or t
  misc_feature (950)..(951): n is a, c, g, or t
  misc_feature (1040)..(1040): n is a, c, g, or t
  misc_feature (1047)..(1047): n is a, c, g, or t
  misc_feature (1052)..(1052): n is a, c, g, or t
  misc_feature (1055)..(1055): n is a, c, g, or t
  misc_feature (1057)..(1057): n is a, c, g, or t
  misc_feature (1061)..(1061): n is a, c, g, or t
  misc_feature (1064)..(1064): n is a, c, g, or t
  misc_feature (1139)..(1139): n is a, c, g, or t
gttctttcccagaagtcgactttgtccagcttcatggagttttaccccctgcacacactgatggctactcagccagagaccgagtgggtcccctgtgcagatttctggagctctttttctgcctaggccccacccctttatgctctactccgtaaaatctagtcactgtgtcctgcccagagtcagatgcaaccaccagactcagtttctccagtttctaaatgtatctggctgggaggnaagtacagaccctgttactgcctcatgaaaggaaactgttgactactacttggcctggtgcctctcacttaggccctaacagtataactgattgcccaggagctgcatagttcacgttaactgaagtctgaagtgtatttcgggagggggcatttttccatgtcagggcttctttaagaccacaaagctgaagtctgtgctcgctgctcagcgnaggccgtgctctgcgcattgcgtgcatttgctgcctcctccctcctcctgaatggccacctcttccctgctgatccgcatgctgtctgcacctgaagcctctctccgtgttggtcaggtaggatttctccacccttttcgccctccatcaccttccatcttctactttgggcttctcccacattccaactcatttctaggtttttctagccagagaagagaggactggcttcgttcatctctctcaaagtagttaggacacagcgtttcaccagtagaaggagtttcctccattagaatgagtgactgtgtgtgtgtgtgtgtgtgtgtgtgngtgngtgtntatatttnnntccntgactgatnnntgngcgancagctngcanttgangcnctatatagggcatgtctaaattgtgcacccaagagaagagcctgggagaagcctcattgtgcggccttggccctcatggcacagatcccaggttggctgtagnntttagaagtggacacttttctaacatcagaactcatccagtccttacgttgaatcacacaaactcagtggcgtcactttggatcgaacngcacgtntcagntgncnctgnganctcacctggagctggagaatcaccctgttcccgctgttgcaggcgcaggacctggcaccgtaggacttagccggncaggacccgcaccgggggccctaggaagaactggggtagtgactaacagcgggccacctacggcggggccccggaaccaagcagaccgg

SEQ ID NO: 657342 - DNA, 967 bp, Homo sapiens
  misc_feature (240)..(240): n is a, c, g, or t
  misc_feature (454)..(454): n is a, c, g, or t
  misc_feature (787)..(787): n is a, c, g, or t
  misc_feature (791)..(791): n is a, c, g, or t
  misc_feature (796)..(796): n is a, c, g, or t
  misc_feature (804)..(806): n is a, c, g, or t
  misc_feature (810)..(810): n is a, c, g, or t
  misc_feature (819)..(821): n is a, c, g, or t
  misc_feature (824)..(824): n is a, c, g, or t
  misc_feature (829)..(829): n is a, c, g, or t
  misc_feature (835)..(835): n is a, c, g, or t
  misc_feature (839)..(839): n is a, c, g, or t
  misc_feature (844)..(844): n is a, c, g, or t
  misc_feature (847)..(847): n is a, c, g, or t
gttctttcccagaagtcgactttgtccagcttcatggagttttaccccctgcacacactgatggctactcagccagagaccgagtgggtcccctgtgcagatttctggagctctttttctgcctaggccccacccctttatgctctactccgtaaaatctagtcactgtgtcctgcccagagtcagatgcaaccaccagactcagtttctccagtttctaaatgtatctggctgggaggnaagtacagaccctgttactgcctcatgaaaggaaactgttgactactacttggcctggtgcctctcacttaggccctaacagtataactgattgcccaggagctgcatagttcacgttaactgaagtctgaagtgtatttcgggagggggcatttttccatgtcagggcttctttaagaccacaaagctgaagtctgtgctcgctgctcagcgnaggccgtgctctgcgcattgcgtgcatttgctgcctcctccctcctcctgaatggccacctcttccctgctgatccgcatgctgtctgcacctgaagcctctctccgtgttggtcaggtaggatttctccacccttttcgccctccatcaccttccatcttctactttgggcttctcccacattccaactcatttctaggtttttctagccagagaagagaggactggcttcgttcatctctctcaaagtagttaggacacagcgtttcaccagtagaaggagtttcctccattagaatgagtgactgtgtgtgtgtgtgtgtgtgtgtgtgngtgngtgtntatatttnnntccntgactgatnnntgngcgancagctngcanttgangcnctattgactcatgtctaggtagacaccctctagaggaacctcatagaagcctcagtgccactggcgtgccccgcatgtgacatagcccaagcttgtggcagaatgaatactgtcctgtcc

SEQ ID NO: 657343 - DNA, 1339 bp, Homo sapiens
  misc_feature (240)..(240): n is a, c, g, or t
  misc_feature (454)..(454): n is a, c, g, or t
  misc_feature (787)..(787): n is a, c, g, or t
  misc_feature (791)..(791): n is a, c, g, or t
  misc_feature (796)..(796): n is a, c, g, or t
  misc_feature (804)..(806): n is a, c, g, or t
  misc_feature (810)..(810): n is a, c, g, or t
  misc_feature (819)..(821): n is a, c, g, or t
  misc_feature (824)..(824): n is a, c, g, or t
  misc_feature (829)..(829): n is a, c, g, or t
  misc_feature (835)..(835): n is a, c, g, or t
  misc_feature (839)..(839): n is a, c, g, or t
  misc_feature (844)..(844): n is a, c, g, or t
  misc_feature (847)..(847): n is a, c, g, or t
  misc_feature (950)..(951): n is a, c, g, or t
  misc_feature (1040)..(1040): n is a, c, g, or t
  misc_feature (1047)..(1047): n is a, c, g, or t
  misc_feature (1052)..(1052): n is a, c, g, or t
  misc_feature (1055)..(1055): n is a, c, g, or t
  misc_feature (1057)..(1057): n is a, c, g, or t
  misc_feature (1061)..(1061): n is a, c, g, or t
  misc_feature (1064)..(1064): n is a, c, g, or t
  misc_feature (1139)..(1139): n is a, c, g, or t
  misc_feature (1326)..(1326): n is a, c, g, or t
  misc_feature (1331)..(1331): n is a, c, g, or t
gttctttcccagaagtcgactttgtccagcttcatggagttttaccccctgcacacactgatggctactcagccagagaccgagtgggtcccctgtgcagatttctggagctctttttctgcctaggccccacccctttatgctctactccgtaaaatctagtcactgtgtcctgcccagagtcagatgcaaccaccagactcagtttctccagtttctaaatgtatctggctgggaggnaagtacagaccctgttactgcctcatgaaaggaaactgttgactactacttggcctggtgcctctcacttaggccctaacagtataactgattgcccaggagctgcatagttcacgttaactgaagtctgaagtgtatttcgggagggggcatttttccatgtcagggcttctttaagaccacaaagctgaagtctgtgctcgctgctcagcgnaggccgtgctctgcgcattgcgtgcatttgctgcctcctccctcctcctgaatggccacctcttccctgctgatccgcatgctgtctgcacctgaagcctctctccgtgttggtcaggtaggatttctccacccttttcgccctccatcaccttccatcttctactttgggcttctcccacattccaactcatttctaggtttttctagccagagaagagaggactggcttcgttcatctctctcaaagtagttaggacacagcgtttcaccagtagaaggagtttcctccattagaatgagtgactgtgtgtgtgtgtgtgtgtgtgtgtgngtgngtgtntatatttnnntccntgactgatnnntgngcgancagctngcanttgangcnctatatagggcatgtctaaattgtgcacccaagagaagagcctgggagaagcctcattgtgcggccttggccctcatggcacagatcccaggttggctgtagnntttagaagtggacacttttctaacatcagaactcatccagtccttacgttgaatcacacaaactcagtggcgtcactttggatcgaacngcacgtntcagntgncnctgnganctcacctggagctggagaatcaccctgttcccgctgttgcaggcgcaggacctggcaccgtaggacttagccggncaggaccctcgtacctgtgggcacttaggaagtaattgtgggctaagtgaacttaaaccacgtcgtggactcagctttacttgtcttggttgttaccttcctgtacttttcttaaggccagtgatcagcaaaaggtttcctttaaaagagccagagagtaaaggttcccaagcttctggggggccanaaagnctcttaaa

SEQ ID NO: 657344 - DNA, 170 bp, Homo sapiens
ggaccgccgacgcggcggactgatcgaggcggccgggcggcgggcttctcagcaccgaagacgagcgcttcctggctcggctataattacaggcttttcgatcctctgcccgtccatggcggccggtgggtgaggcttgcgggtgccccggcggggcgccgggggcttca

SEQ ID NO: 657345 - DNA, 263 bp, Homo sapiens
ccagctttgtagtgggaggactctgcagtcaactctttgccactaggtggaattgaagaacttgttaaatttttgatttctcccctttaccaccttttaggttatcagaggttttattcagtttaaacctcagcaattggcaactaccataattgtctgcagtgatcaaggccaggcccgtaaaactccaaaccaaaatctccacttgttctgctgtatggatagctattcctctgctgttctctcccaccacaaacgtggga

SEQ ID NO: 657346 - DNA, 250 bp, Homo sapiens
caactctccagatgcctccagactcccatctcttcgttgtggctatggtgcagcaaaacactccgttgatccgttcccatgcccgtattccatatgtatcgggtgaaatttccctattcatatattacgacaacgagcgcttgccaacatgccgcactcacctgcggcacacctaccccgccccgccttccagaagtacatcaatcagcttctgctcacccaggcgcatagcacccgagtctgaaggcag

SEQ ID NO: 657347 - DNA, 122 bp, Homo sapiens
ttggcaggatagtgccaacagcctcaagatcatcagcaatgcctcctgcaccaccaactgcttagcaccccctggcaaggtcatccatgtacaactttggtatcgtggcaaggactccatgg

SEQ ID NO: 657348 - DNA, 417 bp, Homo sapiens
  misc_feature (144)..(144): n is a, c, g, or t
tctggcgccggattctcggcctcgcccttcgcagcgcattgatcctggagctttgtgtagctgggcacgccttctcccctgcatcaccacagctgcaccccgcgagcaccctggaccttagtcccggactcagaccccttctgngactccccacctgccaaccccttccaggtgtgcccccaggactgcagcgcacagaccaaagacatgggtgcccaggccctgtgggtgccggaagcggggcctttgagtgggccaggccactcccccgagctccagttgccttaggaggagtcacagaatacactggaacaggagctgggtcaggctctagagctgactcagtttccccaggaaccccacccgccttggggctcaggaacactacactgcacaggaatcccggcgccgagggta

SEQ ID NO: 657349 - DNA, 215 bp, Homo sapiens
aggatcagatgggaaggggcggagagaagatataaaacacaatttgtgtttctctataccacagggtcttgtgtcgccaatgtgcgccatgtgtgtcaatctcaggatatccctcctcgctgagagccaagaaaaactctctcaaaaataaaaggaaaatgtgttctctccatatcactcccgctgtggacacattctattatgtgatatatgcc

SEQ ID NO: 657350 - DNA, 251 bp, Homo sapiens
atcttcttgcgtacagccgctgtagatctcttcaagggagactcgaaggtcgtgtgtgactgaggcgatcttgcttactattcggagcgggctcttgcggcagagctgggacagcggccaataattcacgtaaggatgaacgccaccacatagcccataaggagaagacaagaaaaataggagtacatcaatagtccaattagccattacctgccaccgataacacagatagaccccaaaaaaaagggtag

SEQ ID NO: 657351 - DNA, 1352 bp, Homo sapiens
gccatagcagtgtcactgcgtgggttgtgtttgtgtagagaggcgtgagcgagcccgcttgtccggagatgcaacatgctgactgttctgtccctcccgggagcccccgccgactgtctgccgacgagtcgccatggaagtgcagaaagaggcacagctgcatcatgaccctgtcggtgtggaagatgtatcactaccacgacatgcagacgcggtggcctgcggctgaaccggagctctgcagactgatacgcatggatcatgacgcagagcccgggagactctacactactcgagaccaggatgcgaggacaccatcgcagcccggagagaaggataagtagcacgagacacggacaacatccaccatcgaggaaccccatacggacgcacatgacaacccggaccacccgacgcacgaccggagatcacacaggaaccggcagaacaaaaggaagcgccccggaaagggaggagccacacacggaatacaggagagacacaaaaggaacaaacgacaagagaagagcgccaccgaaccaggcgcgcacgagaaggaccacacaacgaccattggactgagaccccaagaggaacccacagccaaacagaatcagacagagacaaaaagaacgccagacagcaaagcactgaagggcgaccgggccgcgagacacagccgggagactggatcaccagaagccaaagaacaaagagccacggcgcatggacaccaaccacccggaccagaaacaagcggacagaggcaagccacaacgaccgagaacagagcacaccgacaaaaggccaatgcaaagacagcacaaacaagcgccgcaacagggaaaaagcgaaaacattaagcacagaaaaatgagaccgcgcacaaacctgcaccacccaggcagccataacccacgcgacacccaggaccagggcaaaaaccccaagacgcacaccaacagaaaagagacaagcacgaagggaagaagacaacaacccacaaaagcaaagcaggaaggaaagacaggagaacacgaaaaacgtgagaaacaaacaaaacaacaaagcagaaaacccaaacaggaacggaaagaacaaaagaagcaggacaaagcagaggaccacagggcacaacaccaaagagagagcagcccaaaagcggcgagagaagcgcgacacacaacaagaagccagcaagagccaagccagaaccgcaaacagcgagcaacacaaaacgggcgagaaagcagaggcgaacgaacgcagaacgaagaaaaaagaaaggaaggccaagaaaagagaaagaggcagagaggcagaagagaacgaaagcgcaaagaggacaacag

SEQ ID NO: 657352 - DNA, 119 bp, Homo sapiens
tggcacgagagaccaactttttcctgtataatttttttcctgtataacccccccttgccaagcttttttttacaaccagagccccccccaatgatgattaaacccctgacacattttta

SEQ ID NO: 657353 - DNA, 325 bp, Homo sapiens
cggcacgagggtaaattggaaacgtttatttcctttaactctttaaatgtgtcacactttttgctttctatttttaaactttgtgtctcctacaaaataataatcaaaaacaaaaaaagtaagcataacccgtagtttctttccaaatgcctttaaagtttcaaagcagtaattacaccttgcggcactacccggttcggccggtgcctggctggagggcgccggagagcctggagcagggcgccggagagcctggagcagggcgccaggaggccggagcaggaggagaaggagtaggaggaagtggtcactagcgcggcggccg

SEQ ID NO: 657354 - DNA, 105 bp, Homo sapiens
atactgatacaatcgagctcgtacccaggtcttttcccctcaaagttagcagtctttatagttttcaaggttcttcctgattggttcagctgcgttcacttccga

SEQ ID NO: 657355 - DNA, 331 bp, Homo sapiens
agtaattacagggaaattagacctttaacccttatatcataaaagaaaaaggtggctggacgcggtggtcacgcctgtaatcccagcactttgggaggccgaggtgggcggatcacgaggtcagaagatcgagaccattctggctaacatggtgaaaccccatctctactaaaaatacaaaaaattagccgggcgaggtggcgggcgcctgtagtcccagctactcgggaggctgaggtaggagaatggcgtgaacccgggagacggagcttgaagtgggccgagattgtgccactggactccagcctgggcaacagagcgagaatccatc

SEQ ID NO: 657356 - DNA, 825 bp, Homo sapiens
  misc_feature (16)..(16): n is a, c, g, or t
  misc_feature (26)..(26): n is a, c, g, or t
  misc_feature (32)..(32): n is a, c, g, or t
  misc_feature (58)..(59): n is a, c, g, or t
  misc_feature (122)..(122): n is a, c, g, or t
  misc_feature (142)..(142): n is a, c, g, or t
  misc_feature (163)..(163): n is a, c, g, or t
  misc_feature (169)..(169): n is a, c, g, or t
  misc_feature (172)..(172): n is a, c, g, or t
  misc_feature (192)..(192): n is a, c, g, or t
  misc_feature (209)..(209): n is a, c, g, or t
  misc_feature (251)..(251): n is a, c, g, or t
  misc_feature (310)..(310): n is a, c, g, or t
  misc_feature (312)..(312): n is a, c, g, or t
  misc_feature (393)..(393): n is a, c, g, or t
  misc_feature (420)..(420): n is a, c, g, or t
  misc_feature (458)..(458): n is a, c, g, or t
  misc_feature (472)..(472): n is a, c, g, or t
  misc_feature (491)..(491): n is a, c, g, or t
  misc_feature (524)..(524): n is a, c, g, or t
  misc_feature (533)..(533): n is a, c, g, or t
  misc_feature (637)..(637): n is a, c, g, or t
  misc_feature (820)..(820): n is a, c, g, or t
gggtccgggtccgctncctggcgctncgggcnggcgggccatggtggtttagattganncgggcccggccgggagacgccgagtcggagggggtggcagtaagcggcggcaaaggctacggngctcggtttggctgactggngagtcggcaggcggcaggaancatccnagnccagcggacctactgctggncccggcccgcctctccntccgcctccttctgctgctgggttacaggcgccgctgtccanctctactccggggtctagtacagcgctggcgctacggcaaggtctgcatgcgctccctncnctacaactcctttgggggcagtgacaccgcatgttaattctgccttttagcctttctactgactggtagacaacgtgatcngctggtttggagtcgtattcgtagtcntggtgatagtgctgacaggctccattgtagctatcgcntacctatgtgttcngcctctcatcctccgaacntactcagtaccacgactctcctggcatttcttntatagccantggaatctgatccatacattgtcttccactactaccaggccatcaccactccgcctgggtaccaccccagggcaggaatgatatcgccaccgtctccatctgtnagaagtgcatttaccccaagccagcccgaacacaccactgcagcatctgcaacaggtgtgtgctgaagatggatcaccactgcccctggctaaacaattgtgtgggccactataaccatcggtacttcttctctttctgctttttcatgactctgggctgtgtctactgcagctatggaagtngggac

SEQ ID NO: 657357 - DNA, 128 bp, Homo sapiens
gctctgctctagagatccctaagagaccgtgttgcaatgcggttgttccactatactggcagctgtctacgcctttagaccatttctccaagtcgctcttcctggacctggtgtagctccagcgagga

SEQ ID NO: 657358 - DNA, 370 bp, Homo sapiens
  misc_feature (8)..(8): n is a, c, g, or t
  misc_feature (24)..(24): n is a, c, g, or t
  misc_feature (334)..(334): n is a, c, g, or t
attattantggtattcttaaaaanacaggaaaaaaaaattcgggacacacctaaatgattgtgaatgctttgaaaattgtcatccaaaccacagcccacaaaagtaggccaggacctgtgtgataaacctaaatggggatatgccttctaatggcaaagatttctgtaggacccagagtcttgtaagttatagtgaaaatattgaggataaaataaaaaatcacccatcataccaaaaccaagaaaatcacaacttgaataagaaaaaggaatgacaacactaagatgaatcagatttggaattatctggcaaggatttttaaagcaaacatcntaaaaatgctctaacaaataattacaaagtatcttg

SEQ ID NO: 657359 - DNA, 163 bp, Homo sapiens
tgttaaggagagaaggtgcatgcatggggactacttagaaaagctctggtggtcttgtagggtcagaacactagaaatttagttatatatagatttaaagtggtatgcaggggacacatataaacccttaacttctttaacttagccctgtgaccgacctgct

SEQ ID NO: 657360 - DNA, 117 bp, Homo sapiens
tccaaggatgagaaactgttcagcaactgtttagaacaggatgactcacaccaagtccaatcaaagccattcttgcacttgtgaaatggttctgaacgaagtattgtaactcctctg

SEQ ID NO: 657361 - DNA, 633 bp, Homo sapiens
  misc_feature (633)..(633): n is a, c, g, or t
gaggagagagagagagagagagagagagagagagagagatagagagagagagagagagagagagagtatagagagtgacatagagatatcaccccttctcgcacactttttttgcagatttcttcttctcaagatctctccctcctatgcgctccgactctttgtggaagcccctattggagagacccctgtgcagcccctctctgttttttatatagttctgcgcaactctcttttctataggtgttttcacaacctctatattgctcttgcccaatttcttgctcttaagagatatgaacctctcttccgagtatgtctgaaacactcttgttgctcccacccctaactgtcccggctctttttttttgttttcgagagttgtgccacccctttttgatattctctcttgtctctctccccaccttttatccagttttttgcccgccagtaggctcttctcctcttttcttttacagagtttttctcctctcacccttttccactttttttgagtttttcgctttttgtcccctcccccctcttttttccttcccttctctctgacacatgtcccctttttctgtgtgtttttggggccctctttcttccctccctttttttttttttttn

SEQ ID NO: 657362 - DNA, 662 bp, Homo sapiens
  misc_feature (75)..(75): n is a, c, g, or t
  misc_feature (139)..(139): n is a, c, g, or t
  misc_feature (174)..(175): n is a, c, g, or t
  misc_feature (203)..(204): n is a, c, g, or t
  misc_feature (271)..(272): n is a, c, g, or t
  misc_feature (330)..(330): n is a, c, g, or t
  misc_feature (353)..(353): n is a, c, g, or t
  misc_feature (368)..(368): n is a, c, g, or t
  misc_feature (399)..(399): n is a, c, g, or t
  misc_feature (401)..(401): n is a, c, g, or t
  misc_feature (433)..(433): n is a, c, g, or t
  misc_feature (450)..(450): n is a, c, g, or t
  misc_feature (495)..(495): n is a, c, g, or t
gggacgtgcggctcccctcggcctcctcgccatggactgcggacgactcccgggcccccaagggctccttgcggnagttcctggagcacctctccgtgggcctggcaatggccatctgtgcgtgctgaccagcggctgnggatgctcaaggtatgaacgctgccgtcctgtgcnngtggtgcgcatgtggtatctacgtgggnngccaatggtgtacttcatctacgagggctaccagggcatggtggacggaggctcaaacatcgcaganngccgactgggagagtgtctccagcatcctgcaagtgtgtgcgggacgatcattggcangtgcgcggtgccaggccttccgnacgcgggaaggccgnctgaaggctgcttgcaacctgctgcagcgcngncatcaccaacctgtgtgtgatcggcggggacngggagcctcaccggggncaacctcttccggaaggagtggagtgggctgctggaggagctggncaggaacggccagatcgataagtgaggcccgtgcagaagtacgcctacctcaacgtggtgggcaatggtgtgctccatcgacaatgatttctgctggaactgacaatgaaccatcggcacggactccagcctgcacaggatcatcgaggtcgcgacgccaatcatga

SEQ ID NO: 657363 - DNA, 84 bp, Homo sapiens
acatctgtgtatttctgcgccacgactgggacagggacagataatgagcagttcttcgggccagggacacggctaaccgtgcta

SEQ ID NO: 657364 - DNA, 548 bp, Homo sapiens
  misc_feature (1)..(1): n is a, c, g, or t
  misc_feature (7)..(7): n is a, c, g, or t
  misc_feature (28)..(28): n is a, c, g, or t
  misc_feature (52)..(52): n is a, c, g, or t
  misc_feature (65)..(65): n is a, c, g, or t
ngtaaanccggtggtggacaagcctttnaagaaaaaagtacctagttggggnaatttttccaccngatacaaataagcttgacccccctaaatttaaaaaatattatttaaaaaaaataaaaatgtcaagatttaattccacctgtcaacagaagtttaattcctgttgaatgggtaaatattggctttggcctaatcaagagatttcgacatgcaaggcatcccagctgaaatgtgacttggtgcaccccctatgatgtgagtttgtgctgtatttaagaaaaagattttaccccatctctactaaaaataaacttagcctcctcggtagctgggactacgggcatgagccaccagatccaactaattttttgtatttttagtagagacgggtttcaccatgttggccaggctggtcttgagctcctgatctcaggtgatctgcccgtctcaccctccaaagggctgggattacaggtgtgagccactgtcccagccagaatattcacttctaaatgtgggtgtgtattcaggtgacttcccattaa

SEQ ID NO: 657365 - DNA, 782 bp, Homo sapiens
  misc_feature (4)..(4): n is a, c, g, or t
  misc_feature (180)..(180): n is a, c, g, or t
  misc_feature (195)..(195): n is a, c, g, or t
  misc_feature (492)..(492): n is a, c, g, or t
tttntctcagctccgggcgtactgccacaattacccctggatgaattcctcagtggaaatatcaacaaggtcttgcctggtacagtggctcacgcctgtaatcccagaactttgggaggccgaagcaggcagatctcttgaagtcaggagttcaagacaagcctggccagggggattcanagggtacatgtgcanatttgttacctgggcatattgcgtgatgctgaggttgggagtacaactggtcctttcacccagactcagcccacctgcacccaggtgattaaaaagctttattgctcacacaaagcctgtttggtggtctcttcacatggacgcgcgtgacatttggtgccctgacttggatcaggggacctcccttgggagatcaatcccctgtcctcctgctctttgctccgtgagaaagatccacctacgacctctggtcctcagaccaaccagcccaaggaacatctcaccaatttttatcanaagacagggatgtcaggcctttgaacccaagcctgcatgtgtacattcagatgggctgaagccactgaagaatcacaaaagaagtgaaaatgcctggttcctgccttaactggtgacattacctggtgaaattccttctcctagctcagaagctcctccactgagcaccttgtgaccaccgcccctggctggcaaaacaacccccttggactatatttccattaccccaatcctgtcggccaccttatctccttctctgactcttttttgaactcccaccgccccagggt

SEQ ID NO: 657366 - DNA, 105 bp, Homo sapiens
ccttttcagctgttcttcaggtagctcgtctggtttcgggggtcttcagcatttggctctccttgccaagttatttctagttaattcaggatgcagcactgacca

SEQ ID NO: 657367 - DNA, 218 bp, Homo sapiens
ttgcgcgagccatagatctgaagcttgaggttctgtggcagtgtggcatgggttgggtcacgagttctgaacgacggcccagccggggcgtcccgattctgaatattcagcagctcgctgaagtttgtcctcaggcaaagaaacttctgcctcccacggtcactatgcgggcagcccacacccaccccacgcgggcgcaaggtgctcggcggtcgcaa

SEQ ID NO: 657368 - DNA, 417 bp, Homo sapiens
ctgagacacttacgatctcaaaaaaaaaaaggagacaggctcttgccctgtttgcccaggctggagtgccgtggcacgatcatagctcactgtggcctcaatttcctgggctcgactgattctcctgcctcagtctcccaagtagctgggaccgcagttacttgccaccatgctaggctaatttaatatttatttataaaaattaaaatattttttattttatttaggcaacatgctatgttgcctaaacgggtctagaactcctggcttcaggctatcctcttgcctcggccacccaaagtgctgggattgcaggtgtgacctgccatgcctggcttcctattctctatttctaggagataagctttttgagctttcacatatgagtgtgaacatgtggtatatatctttctgtgc

SEQ ID NO: 657369 - DNA, 137 bp, Homo sapiens
tccatgccatgaactgcctgaaacgcaggcgcatacttcgctattctacaccctatgtaggctccctgtcccctgactctatcgcactatctttacaccttacaaacatccctaggctcactataacagttctacct

SEQ ID NO: 657370 - DNA, 446 bp, Homo sapiens
  misc_feature (175)..(176): n is a, c, g, or t
  misc_feature (227)..(227): n is a, c, g, or t
agagctcacagtccgcctctgctttcttttttttcctgctagctccctcctaccttctcttctgtaccttccctgcacagcctcctccccagcctggatccacagccaccatcccatcacttgcctgctgcaagtatcctcagcactgcgcacctctctcccagctggcagaaannagccctggggaatccaactcctggacttctctacacctgcacacaggttgncaggagttgccagaggtcttggcacagcagcctggctggaatcacagagcaatcctcaaccttggccaggccctcactgcccacctggcaaatcctcaagtgtgaccctagtcatctttctccttttggggttttcagactttctccacaagtctcagacaagctcaagtcactcccacatgaaaaataaagacgggctgtggtgcagaataagatccg

SEQ ID NO: 657371 - DNA, 251 bp, Homo sapiens
cttggccaaaatgggggggccccattttgggttgggggaattttttttttcacagccccccctgggggacagttttaattaaaattaaaccccggggtttttttccccaaaccggggggggcctttcctggtccccaaggcaggggaggcatgttggggtttcctttccctttttttttagttgggcccaaaccccccctttagtttttttttttggccccttccttccaataaaaaaatttggggcccca

SEQ ID NO: 657372 - DNA, 150 bp, Homo sapiens
ttggttgaggagagatgagggcatcttgggctgttcgtgagttttctgcataggtgacagggtgtgtctcttacagttggaaatcggggttccagagttggtcaccaaaatcaaaatacaccaattgattggcggaggaatctgaaatta

SEQ ID NO: 657373 - DNA, 114 bp, Homo sapiens
  misc_feature (2)..(2): n is a, c, g, or t
gnaggatcccccgcttgggtcttcaactcaaaattagtcccaaaatttgtggcatatgtttagattttaaagttgatatttcccctattgacagaataaactcattaaaagagc

SEQ ID NO: 657374 - DNA, 215 bp, Homo sapiens
aaatgccaggctgacgggaatggacattatcaaaccgtgaaagaactccccggatctggtgaggcacaagcccaagagaggtaggaggctcattcatccgatcgtcactgcatgctggcaatggcatagcccccttctggatgctgcaaaacagataccatcgattccacggccagggcctcctgcaatcacggccagtcctggacgactcacag

SEQ ID NO: 657375 - DNA, 152 bp, Homo sapiens
agtgacatgcacggcatacgggttgattcagaaagaacgcgtatatgacgatgtcatttcacgacacgtgtgtcaatcagcagtcaatgggcgcgttcgacggtttcagcggaacgaaacggcagccacggtagacgcaaaacgcgtcaagt

SEQ ID NO: 657376 - DNA, 150 bp, Homo sapiens
  misc_feature (138)..(138): n is a, c, g, or t
  misc_feature (142)..(142): n is a, c, g, or t
taggcctgggtggtcagtttcacccgggcatgctgacccgggagccccggagcccctgggcgctgcgctgaggcctggacccgctgccgtggcgcgcggcgcctcagccgagaagcgggacgaggcggcggcgattgnatgngcggtcgc

SEQ ID NO: 657377 - DNA, 943 bp, Homo sapiens
  misc_feature (1)..(1): n is a, c, g, or t
  misc_feature (7)..(7): n is a, c, g, or t
  misc_feature (12)..(12): n is a, c, g, or t
  misc_feature (23)..(24): n is a, c, g, or t
  misc_feature (86)..(86): n is a, c, g, or t
  misc_feature (137)..(137): n is a, c, g, or t
  misc_feature (241)..(242): n is a, c, g, or t
  misc_feature (387)..(387): n is a, c, g, or t
  misc_feature (444)..(444): n is a, c, g, or t
  misc_feature (455)..(456): n is a, c, g, or t
  misc_feature (491)..(491): n is a, c, g, or t
  misc_feature (503)..(503): n is a, c, g, or t
  misc_feature (553)..(553): n is a, c, g, or t
  misc_feature (563)..(563): n is a, c, g, or t
  misc_feature (573)..(573): n is a, c, g, or t
  misc_feature (608)..(608): n is a, c, g, or t
  misc_feature (655)..(655): n is a, c, g, or t
  misc_feature (777)..(777): n is a, c, g, or t
  misc_feature (824)..(824): n is a, c, g, or t
  misc_feature (829)..(829): n is a, c, g, or t
  misc_feature (884)..(884): n is a, c, g, or t
nccccanctcanctctttcattnnaattagttaagagagccacaccaatttcttcttcattataatcacccattcatcccttattncacactttttctactcaattccaatatctcccactccaacctaccaatttnttattccacttcccttctatcctcttaataacctactcttcacctaactcctctttaccatcctttattataacattttatttttttaaggaggcggaccacannaacaccaaccgccactttgcctcacctcccccaaaattatatctgctgttgcaaccctttctacaccacatatcaaacacaaccttatccctactaaaacgctctcccattcactaatcatatcttcctgtatatccgatcattngaataaatataccccaaccttaacataacaaatttcatatatattctcaccttcatntgcaactattnngtatatttcaatatatggggccctttcaaaacaanagaacctcccancacctcccttaacctcccttttatcactcttgcacccaatttcagctaanctcccacttnaccctaccancctgtaaaattaccgcccttacataaataataatnctaatttcaccaattataatactcattaagacgcccactccctcttnaatatctcttaccctcccccttaccctttctattttccaaaactcttcctatacctaaatcctcacttcaaaacccttaaaaaatcattttaaccattttatacaattatataacactctcnatccaagtttacttattatatataaacccctataaatttatttatcnatgtncaagacttctctccctttcttataacgcaaaccctgtacccttaatgtaactatncctcgactttcacacttcctcatttaatcaccttcttcacaacgttatttgttacaaat

SEQ ID NO: 657378 - DNA, 130 bp, Homo sapiens
ggcttaaaataaatttattgtgcactacaaaatgtaggcatactggaaactaaaggtacattattaaatatacatatgcctctgaaagcttttcaacacacatgttttcatccaaccactaagatgtcat

SEQ ID NO: 657379 - DNA, 1075 bp, Homo sapiens
gtggtggctcacgcctgtaatcccagcactttgggaggcagaggcgggcagatcacctgaggtcaggagtttgagaccagcccggccaacatggtgaaaccccctctccactaaaaatacaaaaattagccgggcgctgtggtgcatgcctgtaatcccagctactcgcggaggttgaggcaggagaatcgcttgaactggggagatggagcgttgcagctgagccaagcattgcatcagtgcacctccagcctgcgtgaccgacgtgcgactcgtgtcacaccccccgcccacccccccccccccccacccctccccccgccccccctctccccccgcgtccggcccccccgccgcccgcccccgcggcccgtcgcccaccccccctccgcgcccccacccacccttcccctctattcctccccaccccggtgcgctcacaaactcctctagacgatactcatcccccacaatatctactcgacaaaccacacccacttatataactacttctcccacctacatccccccgagctccataaacatcctctccaccttatccaaaaccacctgaagaaaccctctccttaaaccggccgccgacgcgcgacaagcccccggccgcacagcacgcggacacgcgaccgcaccgcgcgggacggcgcgggcacgctgcgagcggagtgagagcagagcgaaccacggaggaagcgcgagggcagagggaaatgagcgatgtatgagagtagtggggagaggagggaggagagggatgaggcgggagagcaaggcgagggaggagacagagaggcgagccagaggagcagagcgccaggcccaggggagagggacaaggcggacgtccgggaccagaggtgcgatgggcaagggacagagggacggcagcgcgcacgacgatgaggtgggcccagacgaagacagacgaagacatacagagcgaagagagtagagccgcggggagaggacgatgggaagcagggcagggagaagagggggcaggggaggatggacaagaggagggacaagcgggctgggacgaggggacgggagataa

SEQ ID NO: 657380 - DNA, 459 bp, Homo sapiens
  misc_feature (61)..(61): n is a, c, g, or t
  misc_feature (75)..(75): n is a, c, g, or t
  misc_feature (93)..(93): n is a, c, g, or t
  misc_feature (98)..(98): n is a, c, g, or t
  misc_feature (110)..(110): n is a, c, g, or t
  misc_feature (133)..(133): n is a, c, g, or t
  misc_feature (143)..(143): n is a, c, g, or t
  misc_feature (146)..(146): n is a, c, g, or t
  misc_feature (148)..(148): n is a, c, g, or t
  misc_feature (178)..(178): n is a, c, g, or t
  misc_feature (184)..(184): n is a, c, g, or t
  misc_feature (201)..(201): n is a, c, g, or t
  misc_feature (214)..(214): n is a, c, g, or t
  misc_feature (253)..(253): n is a, c, g, or t
  misc_feature (281)..(281): n is a, c, g, or t
  misc_feature (286)..(286): n is a, c, g, or t
  misc_feature (291)..(291): n is a, c, g, or t
  misc_feature (300)..(300): n is a, c, g, or t
  misc_feature (302)..(302): n is a, c, g, or t
  misc_feature (325)..(325): n is a, c, g, or t
  misc_feature (327)..(327): n is a, c, g, or t
  misc_feature (333)..(333): n is a, c, g, or t
  misc_feature (339)..(339): n is a, c, g, or t
  misc_feature (388)..(388): n is a, c, g, or t
  misc_feature (390)..(390): n is a, c, g, or t
  misc_feature (401)..(401): n is a, c, g, or t
  misc_feature (406)..(406): n is a, c, g, or t
  misc_feature (409)..(409): n is a, c, g, or t
  misc_feature (412)..(412): n is a, c, g, or t
  misc_feature (420)..(420): n is a, c, g, or t
  misc_feature (439)..(439): n is a, c, g, or t
ttaaaaattctgtgcatgtactttatggagtacattctatttttgttttcagataccctanaaccaatttttttnagtaatcttttagaattnaaatnatcataaataancgaaaataatcatcacatagttnaaaattgtanatntngagtaatttaaaacaatctttgcatttaanagtaanaatcaaagacccttcanaagtgcctttatnagcaaaaatgtgaccagcaatgacaaccttgggagaatnaataaaaaataaaacaaaaaataaaggnaaaanaaaanagggaaagnanaaaagcgacatgaagcaaaaaananaaaaancacaanacgaaaaaaaaggaggaaaaaaacaaacattaaaaaaaaaacaacgaananataaaagaagnaaggncanaanacgacagnaaaaaaaaaaaaacaaaanaagaaaacccaggcaacacc

SEQ ID NO: 657381 - DNA, 107 bp, Homo sapiens
ctacaaaatgaggtgaatagagggcagactcatcctggtggggtgtgtgtgtgtgtgtgtgtatgtctatcttcctgattcatctgattcatcaatcagaaagacct

SEQ ID NO: 657382 - DNA, 707 bp, Homo sapiens
agcggagagggcgagcggagcggcggagtgcggcgccccgcgagctcctgaggtgttggttatgaacagtgattcggattcacgttcttgccaaccaatcgaggcgtgaggatcactccagtgcccagtctcaggaagctctgtcttgtgcatacactcatcgtccatgctctctaccctcgtctggaggggcaggagtttggcattgagcatatccttgaagacaagaatgcacccttcaatgcagtgtagtaatatatcgacgtaagaatggaaaaagatgtcccaatgctgccccaaagtcagagaagaaatgatggggtgtccttctgtgtctgaacatgtccgtatgaatgccctggcacattcatgctccaaagtgaatgaatgacccaacccagagaccatgtggggtgaaagcagcttcctgtgtccagtcttgaggtcttcatatgctaaggaacacgatgcttggggtctcagagctccacgaaaggtcagtcctcgagttgaatgtccagcctgaatactaagatgcccgacagctggagtgactggggagcaaagagaccccttactgtggatcagcacatggagaggtgacccttgatggtgaacgactcgatagggaatagaccggggatcaatatgatccccctagatacatgctggctgtgctaacacgtgtgaaagaagttgggccctga

SEQ ID NO: 657383 - DNA, 116 bp, Homo sapiens
ccccattcccaccagtaagacgggacgaaaaagtagagcggcatagatagactcccctaaagagagttatggaccttggtatagcaaccctacacggaaagccatgaattggatat

SEQ ID NO: 657384 - DNA, 104 bp, Homo sapiens
  misc_feature (25)..(25): n is a, c, g, or t
  misc_feature (38)..(38): n is a, c, g, or t
tttgaaaaagaaaacaaactttgantcattatttgggnttttgcatttcttataagcttttctttccataaaggatatagctgattacaacgaagactaggtgt

SEQ ID NO: 657385 - DNA, 1113 bp, Homo sapiens
  misc_feature (166)..(166): n is a, c, g, or t
  misc_feature (184)..(184): n is a, c, g, or t
  misc_feature (419)..(419): n is a, c, g, or t
  misc_feature (427)..(427): n is a, c, g, or t
  misc_feature (429)..(429): n is a, c, g, or t
  misc_feature (530)..(530): n is a, c, g, or t
  misc_feature (541)..(541): n is a, c, g, or t
  misc_feature (743)..(744): n is a, c, g, or t
agcggagtgcgatcttcgggcggtcagagttggtctgttactcgggtggaggcggagtctacggaagccagttttctgcattcacttattccatggcatgtagagcgctttcccgcctgtgccgggtgagagtgcagagcacgaaggtgcgatgatgagcactatngttcgcggacacgtctcnctcatcgtgttattagtcgtctgtgtgcatcggtctcgtgtctcgcagcagggcgataagccgtggtgtcgcatgagttgtactaggatctagtacaaggtacctaagatggactggaacggtcagaaaagtgtgaagaaaggcatgcacgtaccataaccatattgcgaagacacgacacggaccaggatagacatatataacacggagatgcatgtcatggctccgcacccancacgtaancnaactgaagcactagagacgaggaccatatgcaaggatgtaacacgtgagagtagatttagactaacgagcatgaatcgtcattcgaagtggtttccgaacnttgaaatcgcnatgctattgcattagttgcgcttattggttgttacttgcacctacatggcgaagtcgtctcatattcgccatatgttgtgatggctcagacgtggggctggccacaagcgtttcagctttttaccccttccctttcttgaactatcccacaggacgtggtctacatcggaagatctagcggtgggaagactgacgagccagnncagaactgtgcgctgtcgatttgccgtggtattattgctcttgatactgagtgtccgattgcgacaggaacgattccagacagaattctcgggcccttggccgccttcatcgaagctcgctactcaagcctcgtcaagggtgcgttttcgattgtgcgccaaacaacgctccgtttctggagaaacgcttcttcttgggacttcgaaagaagactcttaattattgtaatccaattacttttcttatgacacgacaccacgttcaggaactgtggaaagctgctatatggagcaatgagccatagggtagccttaactacttggggcctctttctaagttttgaattattcttaagcctttggggtatg

SEQ ID NO: 657386 - DNA, 496 bp, Homo sapiens
ggggccataagccaaatctttgtattatgccaacagcagtctggcggggttggtgcccactaatacacccctcgctggcggctttttctggaggcgttggttgacagtgtggcccagggcatccctttccaacagcaccagtttgacaaaaatgttttccaactggagcaggcctttgttttcagcaagcaaaggtaccccagccagccgcgaggagacactgtggacctggccaaaaagattttcctcaaatattaccccggctgggtggccggcttttggtgataaatttgccaccactgggccttgttttccgctaattccagggcagatttcaggggccaaaagttggacagacatcacaggataacccaggcttgggaggaggccccccggcctgttggtggggtttgacctggggggattggagggaaatgacctgccctccccccccccccaaagtgtgggattaaagtactgttttttttccccttta

SEQ ID NO: 657387 - DNA, 176 bp, Homo sapiens
ggggaacccccccccccggtttttccctaaaaaagggtggttttaaaaagcttgttgttttgggggaaagacccttttttaatttttttccccccgggtttttttgggggggggggggggggctttccccctttctttggggggccttttttgggtttaaatttttttttttttta

SEQ ID NO: 657388 - DNA, 200 bp, Homo sapiens
acccccccccccggggttcccaaagggggggcccccaaaaaaaattttttttttccaagggggcccccccccccaggggggggggccccgggtttttttttcccccccccaaaattttttttaggggtttaaaccccttttttggaaaaaccccggccctggggttttccttttttcaaaaaaaaatttccccccggcca

SEQ ID NO: 657389 - DNA, 81 bp, Homo sapiens
gttgaggacacggctgtatattactgcgcgaggtgggatgctgcaacttcgcgcttcggtatggatgtctggggccaaggg

SEQ ID NO: 657390 - DNA, 438 bp, Homo sapiens
  misc_feature (36)..(36): n is a, c, g, or t
  misc_feature (146)..(146): n is a, c, g, or t
  misc_feature (230)..(230): n is a, c, g, or t
aagatcttctaaatggaatgcttgttgcactgttcncaggcgagtggctgccatgagacctgaggaccacacttgggggaccaatcatgtccttcaccactgtgccttagaatcgcccctggacagagttcctgggcagagggganagcagctcccaggccttactcaggcctcaggtccatgggttgggcagccagtctgggcccttctcaggatcctcatctccatcntcatcttcttccttcacagcatttacttggagctcttttgtgacacaccatgtcagtcatgatgatcgggccacagccaggccctggccagctgacttcccattttaaaatgggaacttgtggtccaaataaccataaaaaaagcttaccagtgattaaggtggtgcctaaatatccagtcattgaataaatcccatgtagcaagtgt

SEQ ID NO: 657391 - DNA, 318 bp, Homo sapiens
aggctgaggcggaaggatggcttgaaccaaggagttcagttgcaccactgcactcctgggttatttttaaagaccctgtctctagaataaataaaaaagaagttagagaccagcctgggcaacatggtgagaccctgtctctacaaaaaatggaaagattggctgggcgtggtggcgcacgcctgtggtcccagctacttgggtggctgatgtgggaggactgcttgagcctggagggtcgaggctgcagtgagctctgattgtgatcacaccaccatattccagactggaagacagagcaaaaccttgtcaaaaaaa

SEQ ID NO: 657392 - DNA, 1207 bp, Homo sapiens
accgcctatgtgagtcataggaaatgccgcgattcaagatgaatcggtgatatagtgcgtctgtactatatgagtatctgtcatccatatagggtatacccttccggttcatgaacggtctcgtttagttaccacacgtgcacttgtgttgtttatctcatcgatgttaagccaggtcaagacgcttcgatacggtcaattaccaagctacatggttatgctttatgatagtgcctacccagcccttggctcttcatgttggacccatcaattgggtctttaatcctggcctcctgttggggtatcacccttatattctctggttgtcaaatacgtgatatgcgaagtagagtgcaaacacttggattgcaccgtattaacttacgggcgatcctcttgttatgtatattggcactgcttaacagtagagggtctgctaagctcgtgcttcatgtgacctttgtgtaaacccaagttgtattatctgtacgacgttgactccgattgtatagtatggtcggcgctaatgtactaccaagctagacgagcgacgttagagcctctattgcgatgtcgttgtaacttgtacttgatattgcaatagcaggtacactgatagcaatagccccatcatggtccatacaagctagccaacagccatgcattacagaatattttccggtttggggctgtaccttcggtagctagatacccgatacgctctcgtagcacagtacaatcgcttaagtacttgctacacaagtctaaatgcgtatacttactatatctctatattggatccaataacttgaccaacggttacaagtgtacccttagggataactagcgcaatcctattctagagtcctatatcaacaatagggtttacgacctctgatgttggattcaggacatcccgtatggtgcagccgctattaataggttcgtttgttcaacgattaatagtcctacgtgatctgagttcagacacggagtaatccaggtcggtttctatctacttcaaattcctgcctgtacgattaggatcaagagattataaggcctacttcacatatagttgccttcgccccgtaaatgatatcatctcaatacaacgtgtgatcccacacccatccagatcgtggttggtgcggtggtggtgcgtggtttgggggttgggttgttggttcgtgggtgggggggggtt

SEQ ID NO: 657393 - DNA, 681 bp, Homo sapiens
tggctgcccgcgcggggtgctgcattctgtaagcctccggagcgcacgttggcagtcggctccctcgttgaccgagatcaccgacctctctccccagctgtatttccaaagatgtcgctttctaacaagctgacgctggacaagctggacgttatagggaagcgggtcgttatgagatgtcgatcttcaatgttcctatgaagaacaaaccagagtacaaacaagccagaggattaagggctgctgtcccaatgcatcaaacttcgtgcttggacaattggacgccaagtcggtagtccttattgatgccacctatggccggcctgatggtgtgccctatgcctcgactgagtacgtccttagtagccacgtttgctgtacgtacactcaagagtctctgctgggcagaggatgttgctgtgtcttgaccggactgtgtacggccctagtagagtggacgtacacatgcctgtgccaggcccagtcctgctgcggtcttgctccgtccctgctggcacgatacctccgactttcatagtgcgaggaagtaatgggaagtggcaactagactgcttctgggaaccaggtttaaagccgagccagccatacatagaagcttctccgagcttcactttccatgctaggggactgtctatgtcaatgatgcttttcggcactgct

SEQ ID NO: 657394 - DNA, 368 bp, Homo sapiens
caacatgcagtcagtgttgtgttccaatgacgcgaagtatacaccagttactgagaaactctcagtttctcattcaatttcgcatagcgctattgctaccacaaactaaatgggtgtacatttttgagtgctgatttattactcaaaggtttgaatttggagactgaaacaaaccatgctttatctgtgtactttgagaaaatccatccacaagaaaggagccaagcgtcagttcccaatggggggaacattctcatggaggtactgtaaggctaagtctgtccacttcatttcttgtcctttgacagattctgtggtgccaccattgtcttgtacaggttcaggaagctcatttggtagctattcgg

SEQ ID NO: 657395 - DNA, 273 bp, Homo sapiens
ggttttaacccccttttttttaaaaatttatttttaacccccagggaaccccccaggccccaggttggccaattttggggcttttccggaattccaaaaaaagcccttttccccaaaacccaaagttttttttttttaacaaaacccccaaaccccctttttttttttttttttaaccctttttttaaaacccaagggaaaaacccccttagtcccccaaaaaaaaaaattttttttttaccttttccccaaaacctggggggggagggggga

SEQ ID NO: 657396 - DNA, 604 bp, Homo sapiens
gtgtgtgtgtgtgtgtgtgtgtgtgtgtgtgtgtgtaagggctgtgggtgaggtgtgccgttctgggggaacagcgtgggaaggcagtagacgcgggcagtcagctaggcagagacctgtcggtcatggcaccgcctaatgatagtaccagtaccgctgtggagcgagcctgacagcttggaggtgctcggtgaagatcttggacgtctcaaactcgtagtcgtattagtgtggagtggcccgagatgagtgtagaacagagtgctaagggagcacattcgctgtcgtctgtcgagtgatcccatctgaaaaacaagggctcgatttgaccagcggacgagcttctgcgagatgataagaagctgacgagaatacagctgtggggggactaggttatccgtccgtgggtgaaacgggctccatctctcagacatccatctccgctgtcgtggcgggatctatcatgagacgcgaggtctggcctcactccactcactggtgtggggatccccccctgaatacgtcggagggtgtggccgctctggttcgatgagcaggagatgcgacagctatagttctggcaggaaccttgcatactacgagg

SEQ ID NO: 657397 - DNA, 151 bp, Homo sapiens
cactgtcctgtaagtggatgggtatgcggaagagcgaggggtgaaggcggattgggacaacagcagcaggtcagaagagggtggcagcatctcagaccacagccgagaggaagatgcgactaggaggaggctgccgaggaagacggggagg

SEQ ID NO: 657398 - DNA, 165 bp, Homo sapiens
tggctcttatctgtaccggtgctggtttatggtgaccttgaggtcgaatttattacacggtgagctgatctttgggcttagcatggtaccttgtcaccaccgacaaggtgccttggacttttccttcagctgtgactgtgaacacctcattttccttgggctctt

SEQ ID NO: 657399 - DNA, 1234 bp, Homo sapiens
  misc_feature (1234)..(1234): n is a, c, g, or t
accctgcgtggcaatccctgacgcaccgccgtgatgcccagggcacacgacacgggcgacctggaagtccaactacttccttaagatcatccaagctactctggatgattatccgcaaactgtttcattgtgggagcagacaatgtgggctccaagcagatgcagcagatccgcatgtccctttcgcgcgaaggcgtgtggtgctgcatgggcaagaacaccatgatgcgcaaggcccatccgagggccacctggaaaacaagcccagctctgcgagaaactgctgcctcatatccgggggacatgtgggcttgctgttcaccaaggcaggacctcactgcagcatcagggcacatgtcgctggccaataaggtgccagctgctgcccgtgcctggtgccattggcccatgtgaagtcactgtgccagcccagaacactggtctcgggcccgagaagacctcctttttccaggcgttaggtatcgagcacgtaaaatctccaggggccaccattgagaattcctgacgtgatgtgcaagctgcatcagcgactggcagacacagtgggagccagcgaaagccaagcatgctgaacatgctcaaacatcttcccccttctcctttggggctgggtcatccagccacgtgatcgacaatggccagacatctaacaaccctgaaagtgcttgatatcacacgagcgagactcctgcattcctcgctatcctgggaaagggatgtcccgaaattgtcgccagtgtcattggcttgcacaatgggcaaccaatagtgttgcattcgagaacccaattctatatcaaccggggcaacaactaggccctggcgagactgaggagaacggagctaacgtctcccactgctcaagaggcacgaggcccccagggcgaggaacaccgcacgtcccttagagggggattgatcccgatgggtgatgtgtgaccaccaaagatgaccatcgagtgatattgtgcccccagaatgatggttgaccccatgacaattaaggactgatgagccgatcatcgctgacgttcgctcatgttgatcgcagacacactctacactcgtttgtgaacagacagccgctctcttcctcaacaacacacgcgcgggtgcgtccgcccgaccgcatcatggctgcataacctccgatcgacgaggccagaccagtctagatctatttatttgatataatgtatgattatcagccgtn

SEQ ID NO: 657400 - DNA, 420 bp, Homo sapiens
taatagaggcatggggtctcactggggttggcccaggctgggtctggaaacttttggggctcaagcgatcctcccaaaacgctggggattacagtctatgagccacggggcccagcctaattcctggacttctctatacaggagtcttcactggataggcactcggtctggtgagtaacctcagttggagatatctttagacaacatggtttaagaatttatttggttgaacaagatgggtaagggaatcaagattatcccatatgcatttctggttagagcagaatttggatagcttagggtgcaatcttttggagaattaaatggtttacctgggcatcagatttaattaacaattatacttagtaatggcactattacttagttaatttcggtggttgggaacatatgggtagtaca

SEQ ID NO: 657401 - DNA, 122 bp, Homo sapiens
tctgcacaataacgaacaatttcttctctcgatcactccgctgtgtcaggcagttatagtgcttatgcctttctttagactattcgcttaagtccagtctgataggtcactcctttcaggga

SEQ ID NO: 657402 - DNA, 162 bp, Homo sapiens
tgtttcttatacctataagattaatagatgcttcctttgaaattcttctttggtatttacccttgtctagaatttgattgactaatccatggatttatgattagttggacatttgaatgttagttttccaataacaacaacagctaccaactattctgacat

SEQ ID NO: 657403 - DNA, 95 bp, Homo sapiens
cccccttttcccccccagggggccccccccttttttttgggggggggcccttttccgggggggcccccctttttttccggggcccccccgtttta

SEQ ID NO: 657404 - DNA, 692 bp, Homo sapiens
gtgggtgaaaccttcgggaaagggtataaataaggccttttgtagggccttcaagccgttatctagggaaagttacacaaaaaggtcgggggtagagcttgttaacaaggcggtaaaaaagggtaataggccacgtgcttccccttcacaaagtggttctgcaccttaaaaggaaggcttgatcaaccgtgggggtattcaacaacctgggggtttaatagacccggggaaaatgttcgtaacccaggaagtgcgttacccggtcggtctttgtaagtcattgcaagcagttgcctgctaaggagatccacccgataaggcgcagcgcacaattgtgcttcatgtaccctttcttcgtgcattaggtagatggcttggccacccttagtaagtttttgaaggggtttggcaaggtaaaaagacctgggcctttccgtaaggctgggaaggacctactccggggaccgtgccttcaaagacggtggcccgtttaaggcttttgaagccccgagccttgggaagcccagccagcctttccccttgaaaggaaaggtcctgaccgcagtaatttttccactcttctttttacataaaggtaaagggaaaaatgctaaattggagttgccccccccgagagggattatccttgcaggtttgaaataaagttgcacttgttttcactcgaaccggta

SEQ ID NO: 657405 - DNA, 254 bp, Homo sapiens
  misc_feature (15)..(15): n is a, c, g, or t
  misc_feature (18)..(18): n is a, c, g, or t
  misc_feature (230)..(230): n is a, c, g, or t
  misc_feature (243)..(245): n is a, c, g, or t
actgatccagagctncantacacgaagagagtatctattcacaacagagatgtaaaccaccaacaacacgaagagagttatctattcacaacagagatgtaaaccaccaacaacacgaagagagttatctattcacaacagagatgtaaaccaccaacaacacgaagagagttatctattcacaacagagatgtaaaccaccaacaacacgaagagagttatctattcanaacagagatgtannncaccaacaa

SEQ ID NO: 657406 - DNA, 1025 bp, Homo sapiens
gcagctgaaaacatggtcaagctctacagcctgttttctggaagagtacgattgcaaccatgatagaaataaagtccagtggtggacgattcatgatggagctgtatgtgtatggatgccaacatcacttgtgactctaaactgcaagcctatcgccagaaggaaaatctttgatctacgggactggaacccaggaagatgaaaggtataaagatgctgctaaggcaaatctcaactacattggcctcggatggaaatataggctagcctagtaaatggtgctggtttggctatggccacaatggatataataaaacttcatggagggactccagccaacttccttgatgtttggtggtggtgctacagtccatcaagtaacagaagcatttaagcttatcacttccgatacacaaggtactggctattctggtcaacattttcggaggactcatgcgctgtgactgtcacttgcacagggtatcgtcatggccgcccacagacttggaaattaacaatacctgtcgtggcacggctacaacgtacaccgagtcgactgatgctaaggccactgatagcggaccagtggacttcaccaatacttgcttgtgactgacttggcatgaagctgctaacaaatggtcgtaacagctctctgaaatcagtgaccttagcgaagcaagccccatgtggctgttcaacatccagttggcccatatgatctgacaacccagtggactgcctgacggtggtaaaatgtgctataacattacaaaatcggggtcctggatatcgactctcctcataactgggcggaattggaattggcatctaggcaccaacctccaagcattgggcccgatcatcgccccacaacgacgcttccacgcgttccggccactctcccgctgcgccgcacgctaccacgagcacgcagccgctcctggcacgccagcaggcctcaccaccacactttgcccacacccgccactcatccaccatccacccttcactcaccagacagt

SEQ ID NO: 657407 - DNA, 159 bp, Homo sapiens
gtaccagtgggcccctgtgcttcatttacaataacacttgtcacatttcctcaagtacttgcctgacatcagtatgtgtgacatcctcaaagacgcccccatacctctgtatcttcccttctcttactactacccctatgggcccctacgcaggtgtcg

SEQ ID NO: 657408 - DNA, 405 bp, Homo sapiens
cgctatatctgggtttggagaaagctacatctggggtcaaaggcagctacatccggggtcaggggcagctatatcgagggtcagagggagctgcatccagggtcagagggagctgcatccagggtcagagggagctacatctggggtcagagacagcagtggcattggtagagtagcagagacacagtaccatctgtgtccagtggtgacaacagatgcctcttcatgggaaccgtcctacagtatgcttgtgtatctgtggctacctattctccaagcctggttcttcatcctgctagagattctgagaactctgcactatcatttagcaaattccttttctgcttaaagagttggcttctgttgcttgtaactacaaaccctgaccaattcaacatctttaaa

SEQ ID NO: 657409 - DNA, 146 bp, Homo sapiens
tgcacttggaacatttgctacatcatacatgtccaaccatccttctcaacaaagtcacatcaacggagacttcacctagaagagggagacaataaaatacagaggtcctcagggacgagggagaaccacaggaaatagaatctact

SEQ ID NO: 657410 - DNA, 436 bp, Homo sapiens
  misc_feature (14)..(14): n is a, c, g, or t
gaggatcccgggcntcagtgatcctcccactcagcctccttaagtgctgagattataggtatatgtgtctactttctgtttctgtgaattgtctactctggatacctcatataaatggaatcacataattttggcttttggtgactggcttatttcacttagctagcattaatgcctttaagattcatccatgtagtagtgtgtatcagaattcccttcttttggtggctgaatattctgtggtatatatagaccacatttggtttatgcattcattgggtgatggggatttgggtggctttcaacctctgggctatggtgaataatgctgctgtgaacgagggtgtgtaactctctttgagatcttgctttcaattcttttagacatattctgaaggggatggctgggtcatggtaatcctatttttaattatcc

SEQ ID NO: 657411 - DNA, 176 bp, Homo sapiens
atgtatttgtgataattcgcatactgcccatttgagcaaaaagccggttatgcgcgggcaggcctcctagggagaggagggtggatggaattaagggtgttagtcatgttacgcttgtttcacggtgcgagatagtacgtagggtcgtggtgtatatccggggtaccgcagctcga

SEQ ID NO: 657412 - DNA, 277 bp, Homo sapiens
ggcaaacaggttgagaaggagtatgttccaattggaagatcatttgaagggggctcctgccacctgctaagtagcagttcaaactaggggtttggtatcaagtcgctgaatggaagtatgaggtagggtccctctgaaggtgaattctgagatctcagtaaaagaaattgctgtgcaatgtgtatttcgtaagtgctatgctccgagaatcaatggtgtattatgcccaattcccccagtatggtagagcaagtcttgtgttaaaagcccagaccac

SEQ ID NO: 657413 - DNA, 96 bp, Homo sapiens
gcaaaaagaatgtgttgaaatttaactttgtaagcttgaaaggggggggtgatctttttttttccttacagacacccataataaaatatcatatta

SEQ ID NO: 657414 - DNA, 368 bp, Homo sapiens
tagaggatcccccgtcgacctttgaggatgtcacccaggtgtcctctgcctactcagaagacagtacctgtcgaagctgtgaccggcaaaacaagtaacatcagagctaactttgaaaacctcgctaaggagaaagagcaggaggacaagcggtcgaatatatcacaattcatctttttattgaatttgaaaccctgcaaacaccacgaatcgatactaaaaaccctcgttatcaataaagccggcaattaaaaaccacaatgagcgcaaggagcaccctctttgccctcacgatgaccctcactcctgcacaaaggctgggtggtagcacacttcgccacggggtatggcggagcggtcgacggacg

SEQ ID NO: 657415 - DNA, 453 bp, Homo sapiens
cacgcctgccttggcctcccaaagtgctgggattacaggtgggaggcactgcgcccggctggagaataattattactgttcacggttcttgggctcctactatgtgctgcgtgctccatgctcagcctctcagtcctcattcctcgtatatccacctagatttgaggatgagtggcctctcccatcagccacaatcacatgcagtttctcctctatcctcagctcagggagcatacggacgttgcgcagtgaatgcagctggctggggaaggctcaggaaccgcacccaggaagcccacctacagatcccacctcaaaccacgacatgctgcagcctccccagtggccagagcagcttaacaaagcatctttgtttcctttctgcaccccagaaaatagctgtgttggtctcttcgccatgcagagtgaataaagaataagacaaacaccaaa

SEQ ID NO: 657416 - DNA, 332 bp, Homo sapiens
ggccaggcattcacgtccacctgggccaaatagtgacacctcgtgctacaaagaaatattaaaacttagctggatgcagtgactcacacctgtagtcccagctcagggagcatacggacgttgcgcagtgaatgcagctggctggggaaggctcaggaaccgcacccaggaagcccacctacagatcccacctcaaaccacgacatgctgcagcctccccagtggccagagcagcttaacaaagcatctttgtttcctttctgcaccccagaaaatagctgtgttggtctcttcgccatgcagagtgaataaagaataagacaaacaccaaa

SEQ ID NO: 657417 - DNA, 87 bp, Homo sapiens
cttaacacagagcaacgaatagtacattaatttctttctcttcggtattttctctgggtgacagagccatcactctgcacgcgccag

SEQ ID NO: 657418 - DNA, 432 bp, Homo sapiens
  misc_feature (207)..(207): n is a, c, g, or t
tgtgcagatgctgaacggctcgggcgtatcacggcaaggaatcctgagtcttgtctacaatatgctcaggtgcatgtgcgccaaggtcaggcctcaagatacagtctcagtctgtcacacaggctagagtacattgacacaatcggggctcaatgcaacataagtctcacgggatcaagtgacgtcagccttgcaagtacccaggtnacacagtgcatgtcaccatatagagcaatactgtgtccaatgcatagagatggagtctcagcaagaagcacaggctagtcgtctccaactaatgggatcaatcaatatgatagcctgggtctcgcaaagtgtcaaaaagatacgcatcagtcactgcgcctggccgaaaggcatttgaaaagcatccttctataaatggcgctatgtggtctattaccactaaag

SEQ ID NO: 657419 - DNA, 384 bp, Homo sapiens
tattgagtcctttcatgtttcacatttccttgctttttcatgtttcttttgtccctgcattgatgtctggcatctggcgaaacaatggcgtcttcccatttttctacagccactttcatagaggctttcacctgcacttggtccttagtgtgctagttgagaagggcgtagtaactctgcttccagataagtgaaatgagataggctttgttcagctttatcaacagcatttaatgatggcagtaactttgttttcctcagtggcctagcttgtaaaagtttgtagcagtaatggcataggctgttaatggcaagggcttttttggacgcctcctatttacattcgccccacaatgaaggtacttagccatgaagatacttctt

SEQ ID NO: 657420 - DNA, 948 bp, Homo sapiens
cagggacggaaagcgaacgcaacagcaaggcacaagcgacgaggtaccgccgccccgacgtatgccgcgttaccgagttgttgcgcccccgctggcaacacgatccggacgaccaatcgggcccgccgttaacaaccgtggggaaagaagcccgctgggtgtatctccccccggacggcggccggtcgcgcatgaagatgtttagccggtgctgtgaagggccaccgtttacaacaaggggcgggccctctttaacttacgggaaggcggcttaaaattacagccatataaacgctggtagtagtaataattttaaaccggggcaagcttgccccgtttttagcccacgacgacattccccgctggtgtaggagcaagtcaattggccccttttaaacccccatggttgtcaagataacacagagggccacaccaggtactaactttggcgccttccttcatcaccttcggacttaatgatcccccgtgttgtcaaaaagtggtgtctttcttataccaatttcttacaaaacaccttccaatcctggtgtattaaactctcaaacatataaagagactatttcacacccccctcgcccactctgtgcaaaagattattaacaggtacacacggccgtttttcaaaagtgcgccagagttcaatggcaacatctcttggaatcatgtcctactcaaaacttagacagcccccttacagcagatattgtaagcggtgttcttcttgtcaccccccctcctgcgtacccagacacacggatggagacatcggcaacattaatattggggaatcggtgtatttccccacaccatcaaaggaagcttcttaactctcccggaagaaaagaaccccacacatctattaatataagtgggcaggtacaccccgtaaaaaaattaaaaagaaacccccaaaccaaccacaaaaca

SEQ ID NO: 657421 - DNA, 150 bp, Homo sapiens
gtccaccactactggccatctgatctataatgcggggcatcgacaaagaccatgaaaatttcagaggagctctgagatggaaggctctcaggtatgccggcttggataactgaagctgactgacggttcacatgatatcctggaattgac

SEQ ID NO: 657422 - DNA, 269 bp, Homo sapiens
  misc_feature (124)..(124): n is a, c, g, or t
  misc_feature (151)..(152): n is a, c, g, or t
  misc_feature (160)..(160): n is a, c, g, or t
aaaaagaagggtcagaggtcaggaaggagaacctggggagggtgtgtgggaagaatggagaaattcaggctgggtgcagtggctcacacctgtaatcccagcactttgggaagccaaggcaggnggatcacgtgaggccaggagtttgagnncagcctgnccaacatggtgaaacccccgtctccactaaaagtacaaaactgagccgggcactatggcaggcacctgtaatcccagcttacctgagaggctgaggcaggaggaataac

SEQ ID NO: 657423 - DNA, 115 bp, Homo sapiens
taataaaaaactattaacccatataatcttccccaaaattcagaataataacacactcgaccacaccgctaacacgcaagaatttacccccataaataggagaggggctctcaaa

SEQ ID NO: 657424 - DNA, 224 bp, Homo sapiens
aaaaagaagggtcagaggtcaggaaggagaacctggggagggtgtgtgggaagaatggagaaattcaggctgggtgcagtggctcacacctgtaatcccagctactcgggaggctgagacaggagaatcgcttgagcctgggaggaagagggtgcagtgagccgagatcgtgctactgcactccagtctgggtgagagagtgagacgctgtctcaaaaaaaaaa

SEQ ID NO: 657425 - DNA, 218 bp, Homo sapiens
  misc_feature (29)..(29): n is a, c, g, or t
  misc_feature (118)..(118): n is a, c, g, or t
gaattcggcacgaggcagggctttccccntgtggagtctgtcagactgcattaatagccaggtaattgccatatgttctaaggcttgagaatactcaaagtcttgactttaaactttntgacaatgctatctctcattacctgaggccacatgcagaaattactcaatatttcctctactaaacttcctctccggtttacacccttgttcctcctccc

SEQ ID NO: 657426 - DNA, 241 bp, Homo sapiens
cgcttccttcacatgcaccacatcataagaaccaggatgtctatccctgtggtgatcacaccaacacgaccgatgttggctccaccaatcaccatacacgaatagcctgtatcaaatctgataaagttgatcatcttgccggtccctcaatcaatctgcacaatatcgttcaccttgatcacaggatctgggtagcgtatagttcgagcatcatgagtcaccaggtgagggattcccttca

SEQ ID NO: 657427 - DNA, 224 bp, Homo sapiens
cattctgctcctcctatgaacacatacaccagaatagtaacccacctactgcagacctttgcactggccgtggggtctgtaacactactatatactacctgctctcggccacctagtcatgacaccacattgtgattctatatgcggcccttgccactctccaatagtttatttatttagatattttgttggtggccacctcgcggttcagctcctctgtcttg

SEQ ID NO: 657428 - DNA, 780 bp, Homo sapiens
aggaggctctaccccggtggctcctacttcgacccgctgggtctcgcggcggacccggagaagaaggagactctgcagctggcggagatcaagcacgcccgcctcgccatggtcgccttcctcggcttcgccgtgcaggccgccgccaccggcaaggggccgctcaacaactgggccacccacctcagcgacccgctgcacaccaccatcttcgacaccttgggctcctcttaagtggtcggtggtcgagcaatttctgtcagctcggctgcaaaatggacgaacgcgcgtccgtgtaacgaacgtgcttttcgtttgtatatgacgagtgatggatgagagggtatcgcaaagatcctttgttgagtaatgcaggtctgatcacataggagagctgctgggacttggtgatttgtaaaatatgaaccaatggtgacttaatgcatccacttgtacatcaaaaaaaaaaaaaaaaaaaaaaaaaaaaaaaaaaaaaaaaaaaaaaaaaaaaaaaaaaaggggggggggggccaaaaaattcccccgggggggcgcccacaaattgcacgcaccaccccgcagtttgtcgtgcgacaacaagagggggcgcccccaataaggaggagcgcgcaataataaacagcagccagcccgcggcggccgcgaggattaacaaagacacggtggggggggcggaaaaacgcggtcaccgggcgacactttggggacaaaaacccccctaccggggggggggcgaacacaaagtggggacaaacacgc

SEQ ID NO: 657429 - DNA, 163 bp, Homo sapiens
cagataaaagctaagtcttgaaatgacacttgcttagaagtttgtcccaggtgtccactccgtcactcacctgcttggcatcctcattgcaggctttaactcatcagccctgtggcctttcttgcatggaagtgctggcgtattaacacgtgcagtgtgcagc

SEQ ID NO: 657430 - DNA, 794 bp, Homo sapiens
gcgggtggccgttgctccggcctccgtgggccttgcgtgagactcaccccttcagcgtcgctggccgcagctcagctcttactgcagggccgttcctgacgagcgtgtccatcctgtcacgggacgtatgcgcgtgcaagacatcgtccgttcgccaaaaagctaggtcgccgccacctgggtcgcaatcgtgggcggtcatatgtgcgcagatggtggacgtccagttatgatgaggggactaccatccaaattgctacaatgcctctggaagtgcgaacggcagtggcagaccatgacgtggtttctggagtgtggtgccagacatttgggtgagagcacagtaaggagctattgctatggatggtacagaagtgcttggttagaggccagaaagtactggattctggtggaaccaatcaaaattacctgttggtcctgagacttcgggcagaatcatgaatgtcattggcagaaacctattgatgaaagaggtcccatcaaaagcaaacaatttgatcccattcatgctgaggctccagagttcatggacacatgagtgtagagcaggaaattctggtgactggtatcaaggttcgtcgatctgctaggctccctatgccaagggtggcaaaattgggcttacaggtggtagctggaggttggcaagaatgtacttgatcatgggagttaatcacaactgtcgccacaagccatggttggttactcgtgagtaatgctggtgtaggagagaggaccgtgaagggcagtgatttataaccatgacaatgatc

SEQ ID NO: 657431 - DNA, 1061 bp, Homo sapiens
ggccacagtctccgtgctctgtacgttttccaaagtgtgtccggccatccttgacgctgtgtgttccacgggctccctttcaggccccaattttgggtcggaaactgtagacatctccaagacaaagttttcggggactgctcctgaagatgatgcggaagacgccagagtgggttcactgcaaggaactggcctccatggacgagccaagggcatcccaggacaacgctgtgaaatcgacccccgagtgtgactgggaaaggagaacttatgccgtaaccaggaaactgggaagctcaaaatacagagggtgaacgtagaaacacgcagaaaccattcctaaagaaagtagtgatcttgtattaaattgagcagaagtactcacagatttttaccattcctgcttataaactagtatcttgcttgatcttagtccaattacagaataatgatttccactggacagtagaaaaatatgtgtaaaatagggaagaaagttagtattggatcagtgtgagtcctgaagacgtttcagtgctgtgagaacgacatccactttagggtatacatctcgctttgtaagtcagagggagcatgtcagtcactcgtgcttctcggtggcctctgagccatggtgtcgaagtgaagagtagttcattagtttagttacaacctttgtgaagtcagcacatgcccgcaaagcgtgctgtgttttagtcctggtaggaatatttatcagagttcacactatataaaacgccaacagcttcaactatggcccgttgtcaacagtgtttgccactgacgcggatagaaacggtttgcagtctactggatggatgtgtattgtggtttgtaaccattgatcggtttaaaacatgggttaagaactttgccgctaataacagaaattttgtgtagggaagggataaactagatatagatacagagcctgtttttgagttttagacacctttagttgtaaataacttaaaatagctttagtgaaacagtgcattctgtagtttctgtcctttcagtaaatgtggatgtcaatgtat

SEQ ID NO: 657432 - DNA, 303 bp, Homo sapiens
gaaatatgcacacaacgcagggggaaactgtccgcaagttataaagatttattgctattccaggcttcaagattatcccagaactcagggctgttgtgtgtttcataatttgttatgatgtatcagggtgatacaaaaatccaggcagtttgatttctaggccaccctctcttccttggacccctgctccacagatgcagctgtctggtgaggctctttcccatctgcctcattcagcccaacaggactccaagactgaggcaggcagccttgttatccccacagctcacaggtgcttgcctt

SEQ ID NO: 657433 - DNA, 397 bp, Homo sapiens
gcggtcgcgtcatacacaggcatacctctgagatattcaggtcggttctagaccacaataaagtgaatatgcaacaaagcaagtcagacgaatttttgggtttcccactacatataaaagttatatttatactatactgtagtctattaagtgtgcaatagcattgtgtctttaaaaatgtatttaccttaatcttgaaatattgcttaaaaatgctaacaatcatttgaactttcagtgagttgtaatctttttcctcgtggagggtcttgcttcagtgtagatgcctgctgactgatcagagaggtggttgctgaaggtggggtggctgtggcaatttcttaaagtagacaacaatgaagtttcacttttcttttcataaaagatttcttggtag

SEQ ID NO: 657434 - DNA, 137 bp, Homo sapiens
  misc_feature (34)..(34): n is a, c, g, or t
  misc_feature (39)..(39): n is a, c, g, or t
  misc_feature (124)..(124): n is a, c, g, or t
ggctggggaacatcgggcagcatgagcgcatcgngcatnttcctgcgcaccacggcatgcggcatcgtgcctgccggggtcatggtggtctctaccgcgaaccggcggcatactgcgcaccaanccgcctgtacgag

SEQ ID NO: 657435 - DNA, 868 bp, Homo sapiens
  misc_feature (770)..(770): n is a, c, g, or t
  misc_feature (789)..(789): n is a, c, g, or t
  misc_feature (833)..(833): n is a, c, g, or t
aactcacatggactgtcctccctcagggcttcagggatagccctcatttctttggacaagctctagcccgaaacctcacttccttaaacctgtctcccagtcatcttcaatatgtggacgaccttcttctttgcagcccctctctaaaagactctcaaactcacacggccactgctctcttaaactttctcgctatcaaagggtatagggtctccccctccaaggcccaactctccatctccatgatgacttacttaggaattcaactttcccctggggcccaggctatgactccagccagggcagcattaatagaaaatctacccccaccctcctccaaaagcgaaatcctttccttcccagggctagcaggcttctttagaatatggatttccaactttgccctcctagctcatcccctctatgaagtggccaaaggccctcccaatgaacccctaaacccctcacataacatactccccagcttccacaaactccaaactgctcttgtcactgcgtcagctccgtccttacctgatatctcccaacctttcactctctatactgctgaaagctgaggaatagccctcggtgtcttaggacaacagaaaggaaatcctccttcctttgcccctgtagcttacctctctaaacaactagataacacagtcaaagggtggccagcctgctttaaagcactagaagtggtagccagcttagctctagaaagcaggaaactaactttcagccagaataccaccgtccacagntctcataatctacaaggancttcttttctttccaagccagtaagcttcctttcttcctttcangaattaaatacttcatggccttctttattaaaaat

SEQ ID NO: 657436 - DNA, 761 bp, Homo sapiens
ggctggggcgcgaagcggggcctattatgacaaaagcctatcgaccccagcagccagcacagggtcaggctgctgggcgtcgactaggcttttgtcactacctacgggcacgcagatgacttgcattccccagctttccaccaaaccaaatttcaacacattcatctgcttactccggtatacagaacattgctaacacttattaacacgttcccgtgaacgacgcgtgtattaacatcacacagatcccatatttgcccgacaattgacttatggcccagtcacaatctcatgtataacatattgatacacacgaggacccaccttaacgccacagctgcctgagttacacagggccttcacctgcgaaccacctgtgacagatacaacaaggcaaatgctccccaactctcttgggccaaggatcccgtacgccatctgcgcctacctaagggaccacgaacgcttgcatcccacaattacaggacaccagtacttacacactcgctgaacgcccctcacatcttaccaaaatgtaacataaaccactttgtccacttacactcattaattcatgcacaccccacaacccatgacaacggcttacacactaattgcctacttcccacacaacttactcccccaccacccccatgaatccactcaaacccaattcacacagacttcatcccacactcgcacgccactacatcactcccttcactccacctctaccacctgcacccacacatgccccctct

SEQ ID NO: 657437 - DNA, 462 bp, Homo sapiens
gtaagacagggcatatgtgtatgtaggttttatctgggctcatctgttctgtttcatgatctattttttctgtaggggaccaataccacacgggcttgattactgtggctttatagtaaaagtactgaaatcgggtactatgggtcctccaaccttgctcttctctttcaatattgagttgactattctgggtcttttacctctccttataaacattacaatcagtttgctaatatccacagaataacctgctgagtttttttcgttttttagagacagggtcttgctctgtcagccaggctggaatacagtggcatgatcataacttactgaaacctcagactcctaggcccaagcagtcctcccacctcagcctcccaaatagctgggaatataggcacatgccaccaggcccagctaacaaaaaaaattttattggtagatatggggtctcactatgtt

SEQ ID NO: 657438 - DNA, 290 bp, Homo sapiens
  misc_feature (123)..(123): n is a, c, g, or t
  misc_feature (145)..(145): n is a, c, g, or t
  misc_feature (193)..(193): n is a, c, g, or t
  misc_feature (196)..(196): n is a, c, g, or t
  misc_feature (243)..(243): n is a, c, g, or t
  misc_feature (249)..(249): n is a, c, g, or t
  misc_feature (284)..(284): n is a, c, g, or t
  misc_feature (286)..(286): n is a, c, g, or t
ggaaggtttctattcgttggttgtggacctggacaaagtccaagtctgtggaacttaaaaccttgaaggtctgtcataggactttggacaatctccccccttagctattcccagggaaccccngggggcaactgacattgctccnaaatgttctcctgatgtagctttagatataaaggaaaggccctgcccnggnggctgttttttgtttgttatgtcaaaggaacagtcctgttcaaaaangggctnttttgagcaaaaatggctaataaactttgtgctgntntgga

SEQ ID NO: 657439 - DNA, 267 bp, Homo sapiens
cggttgctcgttgtgcttaaccatctgcggccagcacgcctcttgccctgtagcatgttacagcttgcacatttggtgtcttctgccgttggcactcgctgtcagttggtgctcgccgcagatctcaaagcaggcctaagggttatttaacctcaggaaaccttcttatctctacaaatagtacccttctgtgccaagctcatgtactagagtacatttacaaagcctccttagagtgggtaaaaatctagcctcgtagattaccgt

SEQ ID NO: 657440 - DNA, 106 bp, Homo sapiens
acattatctcccataaacaagtaatttgtatctggtgatttgccaccaattctaaacagttcctatagatcagtgaaattgcccattgcacagtctccactagaca

SEQ ID NO: 657441 - DNA, 211 bp, Homo sapiens
gcctggggagtgggtgttaggtaacagcagccctcacatagtgggggtcccttgggcgggtggttaggtaacagcagcctctcaacatagtaggggttcccctgggggcagacagttaggtaacagcagcccctcaacatcaggtggttccctaggggacagttaggtaacagcagcccctcaacataatgggggcttccccttgggatca

SEQ ID NO: 657442 - DNA, 190 bp, Homo sapiens
  misc_feature (99)..(99): n is a, c, g, or t
cggtgcctctcgacgactcccggtgttactcgctgccacaccgtggggccctgggaccggtcctctgacgtgttccctggccccaccgtgtgtggtgtntgtgtgtctgtgcctggccccgggacggtgccccacctgggcttgcacacgcccccggacgacggacctttgggggggtaccgacgctcga

SEQ ID NO: 657443 - DNA, 1307 bp, Homo sapiens
gtacagtacacacaatgcaattatgtacgccttttatcaaacgacttaagcagccaaaaagcttatgtcatctctccaggggggaacaacgtggtctagttcccttctgtggtctaaatgttccaaaacggtggatattgcataagtacatgtgtgctattgctgcaccatggattaaattgccgtttatttcaagaaattaagacaatgtctcaattttctatatcattgtatgtgtttcccccgctgtgtccagcagcattcgaagaactcccgataagaatcaggggagttcatactacaaggaagctgaataggagaaaaccctaagcagcattctgatccttaagctgactcttgagccctttggtttcgtagaaaagaggcgacttcgctttcagtggacttggtggttacttacgttagtgctatagacgggagccttttttccccatacttttttcgcccgaactccgagttctcgccgcgaattagtttggcccccatcttatttcacactttacacacttgctattgcctctatgtgctctcggggaaacgcccctgagtacaagggttcccttgcctttcgccctttacccttaacgcacatcctttccccccccttgtcaccttgtggataacgcccttatggccgttactaaagccgggggtaagcccagcctctacctttcccttattgctttgcgcaaacaagggattccattaccaacttctccctaaccggagattgctggggggccttgaagggatttccgttaccgtggattaaccacgaagcaaccttgaaagccgtcataactcggccccaactcacacccactctcggaagctccaacggtacacccacatttgacaacctcaccaccctccatccagccaatacccacaccccattcaacactcatctcacccccccctcacaccccccccccccttccagtcaccactccaaccagcacctcatacgtccttccccaccccaccccctccttctccccacccaacacatctccctctccaccacaaaccccacctctacaaacatcccacctctccctcctgccataacctcccaacctttacaatagtcataccatccttctccccatgcccatctgccccacacaccgtcccctctctcctctccccttttttcttttcaatacaaaaaccccactcttaacatctgtctttctttactctatcctaaattcacccccatctcaccctcttctcccctctcactcactcatcctatcctacacttatttcatcactccacc

SEQ ID NO: 657444 - DNA, 139 bp, Homo sapiens
gatgggtaagttccgaaaacaacaaaatagaaccgcggtcggtcatcgaaaccctttagtttgccaccacctcctgcatcttggggcggctaatatccaggaaactctcaatcaagtcatcgtcgatagggtttgatga

SEQ ID NO: 657445 - DNA, 275 bp, Homo sapiens
aatgagacatattgagaagtagaatgagaattcataggtagggacctagggccataagtcactcaccaagatgagtactcatctcccaggccctcagcctttgctgtctgctttgccacaaggagtaggtctcctagaagctgctggtcttcttcttcagcctggctgatccgaggaatgggcttcttaggaatgaccaggaagtgcacagtgagcctgaggggtcatatcacgtgaacacaatacactgctgatcctcatgagtcgagcgggta

SEQ ID NO: 657446 - DNA, 244 bp, Homo sapiens
ataggcatgatgggtggatccgaggtcgtaacagcctggccagacggtgaaacccccatctctactgaaaataccaaaaaaaaaaaaaaaataagccaggcttggtggcgagtgcctgtagccccagctactcgggaggctgcggtaggagaatggcttgaacccgggaggcagagcttgcagtgaccggagatcacgcccgctgcattcccagccctaggcaacagagccaacactctgtctc

SEQ ID NO: 657447 - DNA, 245 bp, Homo sapiens
  misc_feature (123)..(123): n is a, c, g, or t
tgcctgcatcccagctactcgggaggctgatgcaggagaattgcttgaacctgggaggcggaggttgcagtgagccaagattgtaccactgccctccagcctgggcaacagagcaagactctntctcagaaaaaaaaaaaaaaaagtttaaatttctgcctaaagaattgaagtttttcaatttctaccttaaaggtgttgaagttccaccagaaattgtttggcagtttaagaatcatgagaag

SEQ ID NO: 657448 - DNA, 546 bp, Homo sapiens
  misc_feature (531)..(531): n is a, c, g, or t
  misc_feature (537)..(537): n is a, c, g, or t
aattcgcggccgcgtcgacacggctgcgagaagcgacagaagggccagatggtaatgtgtaggttcaagggtattgtgtgtagcaagtgaagattgcagaaataaaacttcagttcatgcttgaaatttaagtattgttgtgatgccagaattgctgctcaccgtttttaggtttcaggtcctctgacaccttttggtatcgttaattttactgatttgtgtagaatgtcagttgtattttaccagctaatatctagaaatgctggcaagaggggtttactccagcttagatgtagtatgttagctttttcatacagtgtataaattacgagtcagctgctgaataagacagagcccagaatttaacatgtgtagcttagttgtctaaaagttaggcctcggcttcaaagttagggtcacggcataatcttgcgttcagtacaacacatggtttgatagggaggggaggggcctcttttgcgaaggggaaagtatgacaggaatgagagctatggtagccatgtataaggnagtgcngaatgttgg

SEQ ID NO: 657449 - DNA, 690 bp, Homo sapiens
  misc_feature (99)..(99): n is a, c, g, or t
  misc_feature (272)..(272): n is a, c, g, or t
  misc_feature (275)..(275): n is a, c, g, or t
  misc_feature (277)..(277): n is a, c, g, or t
  misc_feature (296)..(296): n is a, c, g, or t
  misc_feature (313)..(313): n is a, c, g, or t
  misc_feature (346)..(346): n is a, c, g, or t
  misc_feature (354)..(354): n is a, c, g, or t
  misc_feature (361)..(361): n is a, c, g, or t
  misc_feature (363)..(363): n is a, c, g, or t
  misc_feature (365)..(365): n is a, c, g, or t
  misc_feature (373)..(373): n is a, c, g, or t
  misc_feature (383)..(383): n is a, c, g, or t
  misc_feature (459)..(459): n is a, c, g, or t
cctctttaaaggcaaagacatgccagcagtgcagaggacctgatggctttgggcagcttgccagtgaccaagaatgatgggcactcgtgggagatccanctgtgtttattaaaaaagcgcaggagcataagaggggattcccagagagccagctgcaggagggaaagcatgtcattggccttcagatgggcagcaacagaggggcctcccaggccggcatgacaggctacggacgacctcgcacgatcatcagttagagcggagagggctanccntnagcccggccctcccccagntccttggtgcagccatnccgtttagcctgcctcacccacacccgtgtggnaccttcanccctggncnanttttaggntttgtcattnagcaatggtaactgcacctgggcagctcctccctgtgcccccagcctcagcccaattttttacccgaaagcatcantgccttggcccctccctcccgggtgcccccatcacctttaatgtttcctccctgggctaaacaggggaaaaacgggctgggggtagcctggatgtgggccaagtcccctgtcctccttggcggcaaaagcccattgaaaaagaaccagcccagcctgccccctattttgtcctggaaaatttttggggttggaactcaaaaaaaaaaaaaaaaaaaatcaatcttttctca

SEQ ID NO: 657450 - DNA, 427 bp, Homo sapiens
cgcgcgtctctcccaaattgtgcaggggccacaggagggtcgtcaggagagaatcctgactcgtgatgcagtttcatgaataggaagagctttggtccgtggcatttctagtccctcttttggtctattagaaacaggagagtcggccgggcgcggtgggtcacgcctttaatcccagcactttgggaggtcgaggtgggtggatggcgaggtgaggagttcgagagcagcctggctaatatggtgaaccccgtctatactaaaaatacaaaaattagctgggcgtggtgcgcgcgcctgtaatcgcagctactagggaggctgagacaggaaaatcgcttgaacccaggaggcggaggatgcagtgagccgagatcgcgccattgcactccagcctgggccacagagtgaaactccctctggaaaa

SEQ ID NO: 657451 - DNA, 1506 bp, Homo sapiens
cgcgttcgaggtccgtatctttccctactccataaagtcagtccctaatgagacaatttcctccagctagatagggagctacatcagcttagttccgaattaccagagaggtctagtgctgaagattgatggtttagcttgctgtcatggatagttatgacaaacagacgtagcgccagtaatactcttgactcctgtaccttcctctgctgaaggtaattcgttaacacagagtggacatgtagttagatcactacagccatcagcactgtgtgtggttactatgtgatactcataccttagcatggcgtaacagaggtgtcaagttattactctggtcaattcattccagctcagctgagtgtgaccaccgaggtgaattgctcattcttgatctacagctgaggaaatcaccatcctgggtacaattcacgacagagccacatctcactttgttcgaaccgattgctctctctacattgctcacgaacttcaacatctaatgggaacgcaccagtgacgtgctctccctcacattcactatttggtttagcacaatctccatttgcacgacacacgatgaacccatttctccgcttgcacctagcgcaagacattcatatacagattcatgtacaatagggtcacaggtacaaatttactcaggcacgcttttactactgacacacttgttcccattcatacattaccatggtatcacttgagaggggtcgggctagagacctagttgcacaagctatggataccaacctatgataacttgccgtttttgcgtcggcgccacttacattgttcaacagtgtccatttcaccacgcaatataaatattggcgtcggcgcgctataaaaagtccctctgccaagtagagacatggagctcccggagcagccgatattaccgtttccacgtggagtgatacgctcccaatgccgcgccaagagagacgaccggtttcaaccgtccttgtcactaattatttactcaacttttgccaccacacttggtgagatcgtagataatacggagaaacccattatattgtggatgcatatgcaaagggaagaaaccccacagatccaacttgcaacccagggatcattgtcacccagggtcactttgagtgctgagcgccgctgcggatttaacatctagagatgtggcacccgcgcgtgttcacaagaggttaacagcgtggcgaaagacaacacttaggcaaagacgcggagtgaacctccccaagcttggtgtcaccaggcgcatcaactatcaaaggactggtgatcaacacggggaggagcaacacacattcgagacgagacttccccaacatcgggccgacaccaacacgcgggagaaggcccacggatcaaccatggatggcaccacgcgcagaccacagtgtgagaacgggacagacacagagcgagatcgccagcaacaaaaacgagacaagacaacacgacggcaggcatgacgagcacatg

SEQ ID NO: 657452 - DNA, 1018 bp, Homo sapiens
gggtgtgtctctccccccctcgtgtgtgtggtcactcaccgagaatacgcctcgcggcgcgtgtgtggatttatctctcctgcgcgcgccccccccgctcttacatagttatgctacgcggcgcgctcgtctgtcgaggtgtgttctcgcgacgtgcgcgcgggcgcgggtgggcgccacatattttgccgcgcacgcgcgcggggagcaccccgcgtggtagaagacagaccacactctctctcgcgggagagatagtagtagagagagctctcgcgcgcgagatatatatatcttgtctgtgagagatatatatagatatatagtatgtgggtacacactctcccccactcgcgcgcgatatatatcttttgtgtgtggcgcacacgcgcgtagagagaaaacagccccgctctctggtgtggagagagagagtgggagagcactccgcgcgcgaatatatatgtgtgtgtgtgagagatatctcgcgcgtcgcgtgtgtgtgtagagagagttgtgtgtgtgagagaatatatagaaagagagagagaggagagaagagatatatcccagtgttttttttctgccccacacatatatagtagtgtgtgtaacacatttttatataaacacacccctggaggagcgcgcgtgtgagagaaaagtgtgtgcacacacacaccccacacagcagagagagagagagagagagaaacaaaaaaggcgcccacacaaaaaaacacacacacacccacacacacacacacacaccgcagggaccccgcggcgcacctctctatataggtgggggagagagacgacacacaccttttcccacaagaatcccacacacccctctgaaaagagagagagaaaaaaaatatgggggtataaaaaaaaaaaaaaaaagagagagagagaaaatatatcttttttggggagagaggtttttccccgggcgccccccccggttttcttctcttcctcttctccccccccccccacacacacacatata

SEQ ID NO: 657453 - DNA, 286 bp, Homo sapiens
tggagactagggctgggaatggggctctactggtaaccaaagaatgttgttctgcaattttgcttgtctcttgactactctccaccctaaggataaaacatggcctgagcaactgcctagaacaggcaatctccatgggctgtgttgctgcacttggaaggcagtgacttgcatcaggttcttagtctcttgaggctcttccgggtaggaggaggtggtggagaccaattttgacgctggagctgctacccccgtgcattgccaaagcccaccccttccggtggag

SEQ ID NO: 657454 - DNA, 178 bp, Homo sapiens
actgttgaaggcctgagactacctcggactcctctccttcggcaaggtcgaagggggttcggttaggtctctgctagtgtggagataaatcatattatggccaagggtcatgatggcaaggagtaatcagaagtagttcttgtagtagtgataacgggtggagacggttaaacggagc

SEQ ID NO: 657455 - DNA, 620 bp, Homo sapiens
  misc_feature (37)..(37): n is a, c, g, or t
  misc_feature (227)..(227): n is a, c, g, or t
  misc_feature (243)..(243): n is a, c, g, or t
  misc_feature (252)..(252): n is a, c, g, or t
  misc_feature (259)..(259): n is a, c, g, or t
  misc_feature (279)..(280): n is a, c, g, or t
  misc_feature (286)..(287): n is a, c, g, or t
  misc_feature (350)..(350): n is a, c, g, or t
  misc_feature (362)..(362): n is a, c, g, or t
  misc_feature (395)..(395): n is a, c, g, or t
  misc_feature (400)..(400): n is a, c, g, or t
  misc_feature (425)..(425): n is a, c, g, or t
  misc_feature (427)..(427): n is a, c, g, or t
  misc_feature (435)..(435): n is a, c, g, or t
  misc_feature (479)..(479): n is a, c, g, or t
  misc_feature (498)..(498): n is a, c, g, or t
  misc_feature (538)..(538): n is a, c, g, or t
  misc_feature (572)..(572): n is a, c, g, or t
  misc_feature (577)..(577): n is a, c, g, or t
  misc_feature (579)..(579): n is a, c, g, or t
  misc_feature (589)..(589): n is a, c, g, or t
  misc_feature (591)..(591): n is a, c, g, or t
  misc_feature (594)..(594): n is a, c, g, or t
  misc_feature (597)..(597): n is a, c, g, or t
  misc_feature (603)..(603): n is a, c, g, or t
aacacgtccccggggagcatgaataatttcagctccnacacaccaaactgctttaaggtcactgtggagctgtcttgtgacaagttccctccagaagaatgaattgccccaggagtgggagaacaacaaaaacgccttcctcacctacctggagcaggtgcgcatgggcattgcaggagtggtgaggcacaaggacacgaagtttgggattgctgaccctgtcattnccgtgaatgggattanccatacgtnacccggngtggggcggggattattggnntttctnnccccaggggaatacatggtgactgccagtgccgagggctaccattcagtgacacggaactgtngggtcacctttnaaaagggccccttcccctgcaattttgtgctcnccaanactcccaaacaaaggttgcgcgagntnttggcagntggggccaaggtgcccccggacctttgcaggggcctggagcggntaaggggacaaaaggattnatacctgcggtttaaaagccctagggcaggctggacctgncaaaacgggaaggggaaaagtaaaaagggagggncaaantnaggaaaaggngntcnttnaagctnccgggccccttagctca

SEQ ID NO: 657456 - DNA, 108 bp, Homo sapiens
tgggccctgatatactagctaggaatcacttgaagccagtgaggtgttgagtgaaccaagatcacaccactgcactccagcctaggcaacagagactctgtctcaaag

SEQ ID NO: 657457 - DNA, 162 bp, Homo sapiens
  misc_feature (17)..(17): n is a, c, g, or t
ccgaagtcggtcaagcngccggaggacactcatgcagccattgtcgaatgccccataagtgaagcctgggactgccttcattcagacccagcagctgcacgcagccataggtgacacattcctaagagcacatgtgccgccatggacatttgattcaccacc

SEQ ID NO: 657458 - DNA, 748 bp, Homo sapiens
  misc_feature (376)..(376): n is a, c, g, or t
  misc_feature (455)..(455): n is a, c, g, or t
  misc_feature (468)..(468): n is a, c, g, or t
  misc_feature (495)..(495): n is a, c, g, or t
  misc_feature (583)..(583): n is a, c, g, or t
  misc_feature (678)..(678): n is a, c, g, or t
agtctgatactcccatgcctacacttcttgatgactctccatgtgctttagaaaaaaggccaagattcttaatgtagcatacaatagtctgtagaatccaatccctgcccacctcggcagcttcatttcaagctaattttccactggctcctgccttccaattactgctgcattgcattttccaaaaagggtcgaatactatttccaaacccatgctctttcagaatctggctaccctccatcaagaggtggagtctattcagctttcctttgagcctgggcaggatcatgactgctgcaaacaatagattaaggcagaggtgatgctgcgtgactttcaaggataggtcatatttataaaccagtgtgttatggngaatcacagactaagcccattcaaagagacttcatggagagacctagatagagaagaactgaggcccccaaccgacagncggcataactganacatatgaatgacaggtttcagattantcagtccccaggctcatgtcagccattaggccccagagatcacagaccaggacagcaatctcactgtgtcctgctgaatattggcccntaactctggagcatacaaatggtattttgcacatcagtcatgagtgatttggacatcttagatagttgacatcggcctggcttctagtccaaatncacgatattgcctctcttaagaactttccctcctggctccatcccaaacattactattccaggcggcctt

SEQ ID NO: 657459 - DNA, 250 bp, Homo sapiens
aatctgggattacaggtgcgcgccaccacacctggcttattttcgtatttttagtagagacggggtttcagcatgttggtcaggctggtcttgaacacctgacctcctgatccgcccaccttagcctcccagaatgctgggattacaggcatgagccaccatgtcccggcccacattaattattgtttaacaggcagtgctaagatgagaggggagtacagcagctgtctcattttttttttcactttta

SEQ ID NO: 657460 - DNA, 244 bp, Homo sapiens
tgcgtggtggtatacatggggtccttgtgctggtgtacacaggaggacagggtacacgaacgggacattgtggtgtacactggtggattatgtatacggggtggtggtataaatggggcagtagtgcctctgtttacaggacgagtctgcagacgaaggggacattgtggtgtacacgggtggattatgtagaccgcgtggtggtatagatggggtaatggtgctggtgtacacaggaggatgg

SEQ ID NO: 657461 - DNA, 351 bp, Homo sapiens
ttgggcaacaagagcaaaaccccatcacacacacacacacacaaagacaatggaagccaggcatggtggtagctcacgcctgtaatcccagcacttgcggaagccgagacgacaggatcacttcagccaaggagtttgagaccagcctggacaacagtgagaacctcatctctatgtaaaatttaaaaattagctggccgtagtgttgcccgcctgtagtctcagatatttggaaggctgatgggagaggattccttgagcactgcaggttgaggctgcagttagccctgttcacaccactgcactccagcctgggtgacagagcaggaagctgtctcagagataaataaa

SEQ ID NO: 657462 - DNA, 559 bp, Homo sapiens
tcccccgggctgcaggaattggcacgaggcaaaatgaaaatgcgtatattggaaggcaagttctgaaattaaacgttgtactttggcctgatgttctgacctttaaggaagcaagagttcgtaaactttcaaatatttactattctgaactgtcgcgtaaacctgacgtatttccaagtcaacataccagtataccaatacggatgtgaataatgtgtgagtcgagattaaaaccatagcagctttgctatggcatgtcacgaaagcgatctcccttcctgagtgtgagctccagcagactgcagagtgcgcagttcacagttgtagcctgacttcagtgagtactgaagtgtgctttttgctacatgttctcagaacagtgagatcatccagcagtggcctggactgcacttacatctcatgagacaggcctggctacttgtgtgctgaatacatgcatgtgagatatttaacacctatgataagcctctgattatgcaggtgctactgttatcgtgctctccttctccacatcttatgcgatgctcttattacaggc

SEQ ID NO: 657463 - DNA, 234 bp, Homo sapiens
ggtgtcttgggaaaatgaagtgaggttaattctgcaatccatatatatcccttaggggccaacgggaatgccaaattccaggtgaccaaacagagcttgggataaaatgaaacttcaaggggactgctttgacctgggctgagtctgcctgtgccgagtccgcctgtgccatccaactggagtctcaagtcctgaggcagtacgttcagatgccccagtgcagggtcctcctga

SEQ ID NO: 657464 - DNA, 180 bp, Homo sapiens
gttaggctactatggtgtacattttttctctctctacaggtttttctagtgtccaagagctgttctcttggctacagtaaatacatgggattagaggtctggggcaattcaagttgactaagatactatcttggacaaccagctatcaccaggctcggtaggtttgtcggctctagctat

SEQ ID NO: 657465 - DNA, 330 bp, Homo sapiens
  misc_feature (142)..(142): n is a, c, g, or t
ggtcgacggtacgagcgcgcggaaggcccgttgattgccgtacagcaggtagcccaggccgactcgccagggatgttgcattacgtcggtagttataaatatctaccgacaaaacacaacggcatcgttatgcgcgacgaantggtccagagctaccacgaaggacagctttaacccgagccgctatctcaagagcctgggggggagcgacagatcccattgatcaggtggggcgagtgacggcggggttagcccgaaaagtcaggagtccagatgcaacaaagcccgcacaaggcggttccgggtttgctttgtttggccggggtaatc

SEQ ID NO: 657466 - DNA, 147 bp, Homo sapiens
gtagggatcacagcatatagggcgtgtaggagtgcaggagggaccccggacggccctgataccagatactggagggtcgtatcggtagcagaaatgccccgctccttcaacagccacacgagccccagggatagtgctcataggtag

SEQ ID NO: 657467 - DNA, 152 bp, Homo sapiens
gggcctgctcgactctgtgctgtgtccatggcccgtccatttctcccaggctgcagctttgtccctgtggctctttttctgttgtgtctcgtttctctcatttctttttccactggctttgcgtcccgtttttttttttttttttttttttt

SEQ ID NO: 657468 - DNA, 503 bp, Homo sapiens
  misc_feature (1)..(1): n is a, c, g, or t
  misc_feature (63)..(63): n is a, c, g, or t
  misc_feature (82)..(82): n is a, c, g, or t
  misc_feature (86)..(86): n is a, c, g, or t
  misc_feature (97)..(97): n is a, c, g, or t
  misc_feature (112)..(112): n is a, c, g, or t
  misc_feature (138)..(138): n is a, c, g, or t
  misc_feature (144)..(144): n is a, c, g, or t
  misc_feature (146)..(148): n is a, c, g, or t
  misc_feature (152)..(153): n is a, c, g, or t
  misc_feature (158)..(159): n is a, c, g, or t
  misc_feature (166)..(166): n is a, c, g, or t
  misc_feature (169)..(173): n is a, c, g, or t
  misc_feature (175)..(176): n is a, c, g, or t
  misc_feature (178)..(178): n is a, c, g, or t
  misc_feature (182)..(184): n is a, c, g, or t
  misc_feature (204)..(205): n is a, c, g, or t
  misc_feature (207)..(207): n is a, c, g, or t
  misc_feature (218)..(218): n is a, c, g, or t
  misc_feature (227)..(227): n is a, c, g, or t
  misc_feature (235)..(235): n is a, c, g, or t
  misc_feature (247)..(247): n is a, c, g, or t
  misc_feature (258)..(258): n is a, c, g, or t
  misc_feature (268)..(268): n is a, c, g, or t
  misc_feature (291)..(291): n is a, c, g, or t
  misc_feature (299)..(299): n is a, c, g, or t
  misc_feature (303)..(303): n is a, c, g, or t
  misc_feature (306)..(306): n is a, c, g, or t
  misc_feature (308)..(309): n is a, c, g, or t
  misc_feature (328)..(329): n is a, c, g, or t
  misc_feature (332)..(332): n is a, c, g, or t
  misc_feature (339)..(339): n is a, c, g, or t
  misc_feature (347)..(347): n is a, c, g, or t
  misc_feature (403)..(403): n is a, c, g, or t
  misc_feature (410)..(410): n is a, c, g, or t
  misc_feature (432)..(432): n is a, c, g, or t
  misc_feature (438)..(438): n is a, c, g, or t
  misc_feature (442)..(442): n is a, c, g, or t
  misc_feature (497)..(497): n is a, c, g, or t
ntactatgtgccaggcactgttctagaccccccccagaagaaaaaacaaaaaacaagatagangcagcaaacacaaattctnaagnagaagaaaggngcagttgagtaaganggctaagggaactgagaagcctgagntgatgngnnntctnncttanncctcctnttnnnnntnntnaggnnnatggtggtggtgtatgttgnntntgatggttttngttgttatngtgctatngtctttgtttgntttttgtgtgntggtgttttnagtggatgtgttggattgggtgnggtttttngganttnannaattggttggttgttccgnnttnctttccnttgtggtntcttgtgtttcctctgtggtttactttgttttgtctttggccttccttttcgttgnctgtttnttggcgtcttttttctttgcgntcgttntttntttcgctttttttttatggcttggcgcccttctagattgtttagtttttgttgcntttcct

SEQ ID NO: 657469 - DNA, 1541 bp, Homo sapiens
taaaggggacgacatttattccttttccaaatggttacaggtaaaaccaggtggaagagaatggtttaacgcagttagaaaaaaaaaaagagtacaaatctgggggttgggccattaaaagttatttacaaaaaaaaaaaaaaaaaaaaaaaaaaaaaaacaaacaacaaaaacaaaaaaagaggggggcgagcgccgcacaaagaatatctccccccggaggggccccacaaacagcggaccacccgacattttgtgtggaaacaagaggggcccccatcaatgagggaggacattattaaaaaaggacagcgggcgacgggccgcgcggggataaaaacaagagagcaggcgcgcgcggggagacaaacaggcgagacgaacggaggagagacactatcgggaggacaagacgccccctctcacacaccgggggggggggcacacaaaaaatgggagagaaaaaaccacccaccacacaaagaatagatagtacagcaagcgctcaacgctagagggagaaaaaatacaaccaagtccacaaagacaggagagcacaagaagggaggaggaaaaaaacaaagaacgggagcaaaaatagctcgacgaggacaacgagcacaagcaaaacaagacggcacaacgcgaggaaaaaacaacacagcgaacgacgaaaaaaatcttcgcaccacccaggaagcccatgaagtaaaaaaaaaacgagcggaacagacgaaaacagacaaacgagcaagaacacatacaagcagagaacagagagaagagcagaacgccaacagcaggaagcaaaacgaaaccacgacgacaaacagccgaacagaacaaaaaaagaaagagaaagacgcacacaaagaagcaaaggcggaaaacaagagcgaggaagcgaaaaaacgcaaggaaacgacacaacaaacgaacagaagaagagtagaacgaagaaaaaaggcagacccaggacgcaggagagagagaagaagcggagagagagaacgaggaaagaagaagcaagaaagagcgagaagaagaaaagaagcaagtcaaagagacaaagaaacagagaaagagcagggaaagcacgaaacgaagggacagaagaaaggaaaagaaccagggacaggacacaggagagaacgaaagcaaggggagaagtcagccggcgacgagacggagaggaggcaagggacggggtcacaaccaaagagccacagccgacagaagagaacgaacaccaacagagccaacaggcaacagacaaacaccacaacgacgaaagcaagaaaaacacaccagaagacgcagacaacgaacgaaggacacagagcagagaacacagagcagacacgaagacggaaacaagcgcgagcaaccagcccagcgagacagcaacgacaagcagagcgaagaggagcgcagagaacccgccgagacgcccagcagcaacacaggagaaggacgcagaagacaaagaacacaaaacgacaaacatataacgacaagcaagtacgacaaccgccgacggg

SEQ ID NO: 657470 - DNA, 137 bp, Homo sapiens
accgtactttctctaacgcatagggtagcgcgggcccataggcagcaccctgacaaaacaacatgatctccgtgtgaggagagggcaaggggctggatgcaggcagagcatgactttaagacaagattctatgctcc

SEQ ID NO: 657471 - DNA, 618 bp, Homo sapiens
ccgacatgagcgagcaggaaagtcccgagtgagagcgttggcaggaacccgcccggcagagatggtaagccggcgggacatgacagaacggcccagttagacaagccgtgatacaagaggcgtgatcaggcccgccatcgcgctgttcccctcaatcaggaaatccaggagtcacagcatcttaagctctcgcggaggccagagaagcattcactccctcataccagtccacccccccaacctggggacatgggggactataccctcaggtgaggcaattccgcagacgcgtttcagaggtgaggtggccctttgccgcagtgggatggaccgattgtgtcaactaatgatgtcctgaccagccaaagtggtcaggcagcaatctgcctttcacaaggaaagacaagttgttatgaccgctgctcgatgcttcagcgggggtgtaaagcgactttagcacccctcgttggggagattgggggtaaaaaaaatgggatattttgagaacccccggggggtaaattgggggggaaacttttaaaaagtccctttttttggagggaagggaatttttttttttaatttttaagtttggggggtaagattttataaaaccca

SEQ ID NO: 657472 - DNA, 416 bp, Homo sapiens
cgactctcgaggattcctgcacttcctagacgacaagagcgagacaccgtctcaaaaaaaaaggaaaaaaaaaaaggaaggggccgaagggaagggtgggagggacattctaggcagagggggtaggttagctaggatgaaacaaagcagggcctggtttcctgcacttttttttgccagcaccaacattggccttggcagcccccctgactttcttaattctgttctggcgtccctttcgtggctttctggaggtcttttttttctaatacaggccatgttttgcaagtttatgttggggttcatttttctttgcataacccagggaatcataaatcatgccaaagccagttgttttgccaccaccaaaaggggctttgaatccaaatacaaagttgacatccgggggggccttg

SEQ ID NO: 657473 - DNA, 158 bp, Homo sapiens
tatggaatgtaaaacagttcaaatctcatagaatgaagagtataatggtgggttttcagtaacctacagggtgagaggtcgataataatggactagtactcgctcttagaccgtctctttaccggcgtggatccttctagaagatcgactctgtcagc

SEQ ID NO: 657474 - DNA, 331 bp, Homo sapiens
atccgggatgcagaggttacggtgagccgtgactaccatatcactccagcctggggaacgagcgaaactccatctcagaaaataaataaataaggctaggcatggtggctcaagcctgtaatcccagcactttgggaggccaaggtgagcggatcacaaggtcaagagatcgagaccatcctggccaaccaacatggtgaaacctcgtctctactaaaaatacagaaattagctgggggtggtggcatgcgtctgtagtcccagctactcaggaggctgaggcaggagaatagcttgaacccaggaggcggaggttgcagtgagctgagat

SEQ ID NO: 657475 - DNA, 126 bp, Homo sapiens
tcagctcagtgtaggaccctgttccaacgttagcaccagcctgctcctcggcgggaacaggactcataagtgccagtgaccaggcccaaggcgcgcaagcaaggcgtgagttcccgcgaacatgta

SEQ ID NO: 657476 - DNA, 369 bp, Homo sapiens
aagccccttaatcccctttatttttttaacccccctgtttggggttatggattttaacctttttccccgcagaaatccttttttttttaaatccccccatcttcaaaaaatttttagattgcctgcccccaaaaaggttttttgtttttgccccgggaattcaagggaaaaatcttgaaagaaattttgggctgatatgaatttttcctgtccccaacccctgggggggggcttcccgggaaattaactttttttttcccaaggtttgccttttgagatgaatttattgaaaaagcccaaccccccccggggcttttttttttgatgtggggggcccgggaaaaaaaaaatgtttttttttttttccca

SEQ ID NO: 657477 - DNA, 198 bp, Homo sapiens
  misc_feature (157)..(157): n is a, c, g, or t
  misc_feature (166)..(166): n is a, c, g, or t
  misc_feature (190)..(190): n is a, c, g, or t
gaggctggaaataatacttttacattttaaatattgtgaaaacaaataaaaggaattctatctggatgcttattaatgaaggctcacgacttgggaagcctctctcacccagtcctatttaaaagagatgccttctcccttcactccctgcctgggnccatcccantacactgggtttctttttacagcnatttttaa

SEQ ID NO: 657478 - DNA, 114 bp, Homo sapiens
aatcttgaggatccccctgtgagcaacacagctgactaggatggagaacctgctgctggtgcacagagcaaacgccctggaggagcagctgaaggagcaggagctgagagcctg

SEQ ID NO: 657479 - DNA, 101 bp, Homo sapiens
tcggcacttggcagatctggcacgaggcagatctaaattaaagatggcagctaaaaactgggcttttatgaggaaaacaggatcactctgctttgttgagg

SEQ ID NO: 657480 - DNA, 1538 bp, Homo sapiens
  misc_feature (612)..(612): n is a, c, g, or t
tgggtgtcactgtgtctgtgtgtgtgtgcgtgaggtcttcccagtctcgtggtgtgtggcgcgtctctcctttatttgcagtgtgcttgtgggtgattgtccgcgcgtcgcgtgttcttgatcgatcgtcgtgtctgtgtgttgtcgttgctgtttcttgttcgtgtgtcccactttgtttttctgacctttggttgtccctcccctggggtggtgtgtttcttcggtcttcttttttgcgcgtgctgtggtgttttgtgtcgtggttctgtggcgctccggtcgtcctgtggtgtgctgttgtgttggtgtgttgggcgccgcgctacagcaggtgtgaattgtgggcgccccctccaatttaaatacatgacccccgtagggtggatgcgagaagcacccgataccaatttttagggggaacccctattatgggacttccggaagggaatcccccccaagcggttgtgtcacccagaaaaaccagcgccttgtttagaagcggcccggcccacgttgaactgtattaaccggttctctaaaaggtaaaccggaggggcctcggggtgggcgcgaatattcggggcaccgcaagaggttgggggcacacancaaccacagggtggtagtgcccctctcgaatccggaaatttgttttgtaagccccctgttggaccctcgcccctgagaaaatcgcccaaatgtttgtggctgatatttgtgaatgcctcctttgtgtggagagacaacacaatggggcgcgcgcttacaccacctgtttgcactgtcgttgcgccttcttacacggtgtccaaatgggggctgtctcccgaagggccgccaccgcagttcttacactaatgtggagagtccaacgcgagccctcggcctgggccacaactctcacgggcacgccacatttttccacgagatcccccgcagacttgttcctcacacccgcagatgttagagaggaaacccgcgagttgcccacgccacccctcgccctcgtgtttctctggtgcccctcgggaagagattgtggaatgataaacgcccccacgaggccacgccctcgttggcttcgggctatagtaattaaatgtgtatagaatatgccaccttctcggtaagctcgttataactcgcccaagtttatgctctgagaattataagggaatttggggggagcccacacgtataacttataattatactcggctagggtttgagaaatggttctcttgttataagaagtatagggttcgcccactcgagatgccacgcccactattggaaagaactatggaatattgggtcaccaccttaatctgtgtttcctcatggagaaactatatttgaaatatatttggttttaatatatggagatttttaatgtcaccttcttcacgaccaccgcctaactcccagagtgcccctcacgctgctggaccagccctttgtagctttgtaccatggccagaatgggccccaagcttagtgttgtgacccgttttttaaataaagtatccttgaaa

SEQ ID NO: 657481 - DNA, 276 bp, Homo sapiens
gcgtcgacggaacacaacaccgccgtggtgcgcctggccaaggcatgcaactgggtaactggaaatccgaggtggggatctcgggcctgacctcgaccctggaaaaccgcgacacccgcgaagacggtcgacgcaatgccgtggccatccactacctgggcaaggacggtccgtggggcctgcaattgcacgggcgcgccagcagatgtcgccacgcaatcccggcagcaacgaggtggtgaccttcggcggctatgacggcaccttcagtcgacg

SEQ ID NO: 657482 - DNA, 479 bp, Homo sapiens
  misc_feature (16)..(16): n is a, c, g, or t
  misc_feature (36)..(36): n is a, c, g, or t
  misc_feature (46)..(46): n is a, c, g, or t
  misc_feature (91)..(91): n is a, c, g, or t
catgggggtaggattncccccccggaagaggaaganggtgtttgangggataccagagtttccagtgggagaagggtgaggtttccacctncctagaaaagggatgggtgcctgatagttgccacaccccatgtgaatgtaccgtaatgcccgcagtacccccctacaaatggttaaaatgttccaattttatatacatccttacccacaataacaaaatttttttacccaaaaaatctttgagaagaaataggatacttgcatagtctcaaagtatctcccccaagatgtttattaattacaaagagaagaatgactctacaatggagaaaattagcagacaccatcttaaccaagtatcaaagttaatatcaccagtaagacatattattgttatcatcatatattcttgccaaaatgcacaatctcaatctaattatgagaaaacatcagatgaacccaaatcaagttccatttaa

SEQ ID NO: 657483 - DNA, 322 bp, Homo sapiens
tattgcatgtagggatcagtgcttatttctaagatctgtggcagtcttacatatcaaccatggcactttctcctgatcccttcactaggggatttcaggattgagaacatttttccatcgacacctttttaaaattgtaggactcgtccatgtgggcttcaatgatgggatagtacacttcactcagaggcattggcatctttaaataatctcttttaagcctctaacgtgatcagtgccttgatgccaactacggaaatctgtttagcattgaatctctgacggctctatgacaggaatagcatgatgtgctgttgcctgc

SEQ ID NO: 657484 - DNA, 989 bp, Homo sapiens
gggtgtggcggcaggcacctgtaatcacggctactcgggaggctgaggcaggagaatcatttgaacctgggagacaggtccagtgagcggagatcgtgccattgcactccagcctggacgacagagtgagactccatctcaaaaaaaaaaaaaatcctttactttttttttttaaaatctctgggtctttactcccctatattccccttacccttgcccccaattattctgaaagccccagaaattgtgtaactcactccaaggtctaagctccttaataggaaagcaggaatcaaaactgggccggtctggatttgggactcaaccacgttttccgggttttacaggtctatcccccacttaattttcccctcgggaatgccttatacccccatcaagcgcagacggtatatcaaccatgagatcatctcgttagggtcacgggtaccattactttgatacttaccccattagacacgatgatttatgccggcaggttaaataacatacaggcgcctcaagttagtccaagaagtgcagtttaattcattcacaatgaacccttgctgtgtaggtacttggatcatacaatcttgtggggtgaacggaacgcgcacccccattaaggaaacaccagcgaggctgtcacagggtaaacgacaatgcacttacggacaacacataccatcaggtgacaaaacatattcatatcagtcaaaacaaccaaaagtgggctgtgaatgcacacgaagctggtgcacagcgaggactagagactcatgttacgagagccaggttagcaggtcgagacaccggtccgagtataacgcggccgtgacgcagagacagggaattaggagcacctgagccacgaaaatttgatgatacaacaagcgcgttaactgggccgaacggaatacatgaaaccgggaacagaggtagtacaacacgcgcgccactatagagggatggaacccacctgccaggta

SEQ ID NO: 657485 - DNA, 964 bp, Homo sapiens
  misc_feature (964)..(964): n is a, c, g, or t
gtaaagattctatctgttaagggataagacttggcactgcagcctgggagacagagaaaggagtgaagtgccaagtcttatcctgtaaagattctatctgttaagggatagacctcctgacagcttcatcatctccacgcagagcagagcacactagcttaggagagagaagccgtcaagtctctgtagtgctggggacttacagctttctcttgtcactgggccatttatgttatgtatagtatggacagctgcacttctcttcaggtcttcaggcatctaaaattatgtaaattgtttgggcttacaggagatggtaagaccaggaactgaatcatgccagtgacttcctcctgcactctgaaactacctcttagtctctttacaacacttggcccttggggatctttccttctagttacccaaacctctctttcctgtgcctcagaagaattcttacttttccttagaattattattacaatgacatgcattcgttgttttgttttaaagtatggacttgggctaagtggggggcaggaaagaaggtcagtgtcttgtgtctgtggacaacaggatagggtcctgaggcatgttagcattcctcactggtgtttcaggagagctgtcgggagcatattagattcctctctatgccctcggggcaccaattttctcccttattcacgaagacggcgcttttcactgagcacgaaattaattttaagggcgggtgcaagtgcctgtccatagttacatcctacgtgtggaaaatgcgaatttcttgggcggagttccaagaatataatatgggggaattaccgcgcagttacgcgttgaacgaggatgaaaaggggtagacagtggggaaaggaagtcaatatggatccgacgtaagagaggtggggtaaccgtgacgagcgagcacggcagaacaaatcattgtcgtgggtgactgatcggn

SEQ ID NO: 657486 - DNA, 379 bp, Homo sapiens
  misc_feature (298)..(298): n is a, c, g, or t
ttcccagcaaagactgtggaaccagacagcctgattcaaatgccagctcggtctacttattacctgtgtaatcttgaacaaattacttaataatctccaagcctcagtttcctcatctgtaaaatgggacttacaattataatacacactccataggattgctgtgaggattaaatgaattaatattgcatttgtaaagtatttaaaacagttcctgtaatccatcttattttaccaaattgatggacatgatggactcccctattgttacaaatattacttgtttcccatataaatnatgggaaaaaagatgttcatcatggccttatttatattagctttttttccccataaagcttgtgtaaattatgctgtgatg

SEQ ID NO: 657487 - DNA, 259 bp, Homo sapiens
ggaagccagagtttggaagggtatgagggcggacaaaggcagcgcgatcatggaacctccggattgggaaaagtgtagaagggctccgaaaagcccgtcaaacctgagggggcgggaaactgttgcccggaggctaccgaggtgatccaacgggccggtgcggagaacgcgcccaacaatacgaatttataagaggaattcgttcaaggcgaggctgtttcccgacgatacgttgttaccctgaggggggccgttttct

SEQ ID NO: 657488 - DNA, 218 bp, Homo sapiens
aacgactacgcacgtggagtccacacctttatttgcgcttattccttgagccctctaccgttcggcaatggcgagtgccatgttcttcagcctctccttgttggcttgcggggcactgctctgggggacgacaggactcagcagtttgttcatcagctccagtaaccttgtcagcatacttggcaaggtcatacagcttagctgcctcttcaaacagt

SEQ ID NO: 657489 - DNA, 1011 bp, Homo sapiens
gccagttccggctgtaaagatggcggcttcctagtgagtcgcggcggctgatttagaaggaggttcaggctacgccatacaggagccactggacagtggcatagtccagctaagcgccctagctgaagacggagtgaggaggactatggagcattcgtgagagtctcggctccggtgtcgctcgcatgtctctgacaggggttctgacggtctcgggacaagataggggggacaggccaaggcgatggtcctgggcagtgagtgaggagtgagggtgcggccgccatgtgctgagtgaatgggagcctcaagcacttacagggaggcgggacctagtgtgcctggacaggatgtctccgtgaggcccttaggtcgagagttcggacatggaatgggtcatacttgtccaggagaacagtgatcatttgcctggactctgtcaaaggaaagtgtctctgctcattgctggagtcgtatcaaccggatattaaccactcaatgccccttcccatgttcttcccaggaagatgatggagatgttcgagcggagcattctcgtaagatcgataaaagcccttacttgagtgctggtggtggtgaccgatgactgcgtgctgggtgtcctggctggagcgtttgacgcccgcgagtctgtaatctggctctattatctggagaagggcctctgttttggcctgtcagtctggacgagttcttgacgcctcgttcagagtaaatgtgcttccggggccgcagagtcgttgcgtatgatgccccgcgtttgtggtcgcgcatcttgtgttttgcgtcacttgcggccccgtgtgcttgtgcgcctgctaagtttccctgcctttgtcttggggtgtttgtccccgggtgcgcgaggggggttttgacaggctctgtctggccggacccggcggtgagttagggtggggccgttaattggacgggccggtgttcacgctctcaccgggggtgggctactttgaaggctcgccgcgggta

SEQ ID NO: 657490 - DNA, 341 bp, Homo sapiens
  misc_feature (22)..(22): n is a, c, g, or t
  misc_feature (40)..(40): n is a, c, g, or t
  misc_feature (124)..(124): n is a, c, g, or t
gacctagaggatcttttgcggngcttcctccagctccatntttatacttgaatctgagagcctgttttctgacttctctgtgtgcttacatccaaacaaatttaagttgttcagaaagcacttngaatactgtagaaaaaaaaaaaagaaaaaaaaaactctctcacaaggtaatgaaacaatccggttggggtttaaaccaaaaacttccatctaagcacctaaaaccaagagggtgggctgttaacaaagctaatcttaaaactggcaaacgctaaacaaaaacacaaaacacacacacagtaatatagtggagtataaccaatctatggtgcactaaa

SEQ ID NO: 657491 - DNA, 237 bp, Homo sapiens
  misc_feature (3)..(3): n is a, c, g, or t
acncctagaggaccccacacgtaacgctccacttattgatttaaggtaacttgacaggtgtaagcctatttgggttttgaatttttggttttgggtggggtagacatgttgtaaggaacttatttgggctataatcctttagaaaatgtctagtttgaaacagatatcctttggaaggaatatccgggaaaggcgttacgtgtgggtaccgagctccgaaaattcggtaaatcaatg

SEQ ID NO: 657492 - DNA, 837 bp, Homo sapiens
tcataatgggtatggcaataatggtaggaatactacccctttcacttctgagtccctgaatgttacaccaacgtggacccgtctgacatgcggtctgctatgctactcatatgacataacaactagctcctatttcagtcatatatcatatctctctctcaataaactgttaagacacatactccctctagtctcttcactccttcatcattcatagactagggcatgattgaaagttggtcattatcacctaatcatctccacatactctccatcacatcttatcaataactctcagttacccactatatgtatgaattgattagcattttcataccgatatgaaccctaatcgatatccattcttaatttaactaatgtatatattactcctataactacctcaccgcactttcgctatccttacctcaaactataaaactccagacagccacgaaaccatacgtacatatctcgtcaatcgctgcacaagaaagctacacatcgtacattacatccatctcactttaacttaccattccagcactcttccttctcgcctacgaggaccttgtcacccgctatatcgcggcctcttcttgtccacatgagcctcataattcgaagaactatcacaacgaacaattagtcgctcatacatccgcctaccagtcgaatagaccaccattacattccattaacctctatttctacctacgcctaagtatactccacctcaatcacactaatccccatatctaacaacgtaaagggtggctgaccagtttgaacatttccaaaaagccaccccatttctccccacactcatcgccctta

SEQ ID NO: 657493 - DNA, 149 bp, Homo sapiens
tcaatagcggctgcactacgggatgtctgatccaacatcgaggtcgtacaccctattgttgatattgactctagaataggattgctgctgttatccctagggtaacttgtcccgttggtcaagttattggatcaattgcaggggtaccg

SEQ ID NO: 657494 - DNA, 1008 bp, Homo sapiens
ccctctgtgcttttgctgctgagccacacaacctctcattgcaaaaacactttcaaaatgctaacatattctaattcactctaggccaccaaaaactttaatactaatatctgatttgtaaatgacttaatgtatccttgaccctatcagctgaatttaatgaaatattcctctctgctgtgaaattttaccagtatagtatttggtctagtgacagagcgagactccgtctacacacacacacacacacacacacacacacacacacacacacacacacttatcctctcctctctctaaccccaaactaatatcacagagggtgactccagtgagagaacagagggaatatcttaccaaggaagggcttaaactacacttttttaagaaaagagcttttagtgttacaagacgcctacaattagatacgccgttgatattgtgtatatctgtgaaagcatcacacaatcaagactctggatattctatcactcccacatctgagattcccccctaatcgtggataccatttgtcgaaagatgttctcactctagctgaacttacaagagactatagaccaggtatctaaatcacagggcctgagagaacttggctcttatcttctgaggacaggtgagaaagcccagtggagaattaagagccttaaagaggggagaattacgtgctcccaaagaggtatcttcggtactgaccaggcagacacttttctcctatcagtaagcctccatactgtggtgagtacccccctgaggtttccatctactgtttggtcttctatctagagccaaaacataaatcagatccgtccacaagatcgtcgtcatggggtccacacaagccagcttgctcttatgggattggaaaaattcggccttccccctctaaaagaaataaaaacaaaaagcgcgtcatccgggccaccacttagctttgttaagcgccgagacggtgcctgtccatatttgtatattcatatcgatatcgac

SEQ ID NO: 657495 - DNA, 489 bp, Homo sapiens
ttctagctcggtaccccacaccctgagtcttaactaccagctactgctcctcagtgttctcagagagtatgtcttaagctgcctctgtttttttctctcagaccagaaaaccaggctgagcttgtgttcaatgagataaccgtcccttggcaaggactgtgcgggagcttgggatggactttggttttcatttatgaggcacgtggtcttttgcttcatctttcacgtttgtcttggatccagaaatttccacgagaggaagacctgtaccttcacccccaatcaccttccccttcagtcctgccgaggtcactgctaagaaccaaggacatttaaatccccatggatgactggccacgtgctcattttcctctaagtccacagttttgtgccagcagaggcggaatgagagtccggttcctgctccagcctttctgaatgttttgctttcttggtcacccccttgactcaggtggtggggtaccgacc

SEQ ID NO: 657496 - DNA, 180 bp, Homo sapiens
gctgggctggagtggcggtggatgcgagcagcctgtgggcaccccagctgctggtggatgtggtgactggggccagcttgtggtccgcaaggggagcagtgcagctgccgcccatgtctccctgggttatcctctgctggcaacctcctcagccaccagcaccagagcagggcattctat

SEQ ID NO: 657497 - DNA, 1296 bp, Homo sapiens
ccaacgcagataagaatagatcaaagcgacacgtccgcatcgcttcatctcagcaattctatagttatgtgttatgtattctaccgtccagttttgcatgagtgctaccgtcggtctgtctatgtgccgactctatgtttcgctgactgcgtgtggtactacttatgtactatacacattgtctgctatcagcaatacccctatcttctgagtatactttcattctacataaaactacatgtagctccatcatcaatccatgtttaggcgtacgcactttcacgtggcatgataacggctatcaagcttgctattgggaagcggatgacgggctgtagtatcactgatgcacatcatgagtttgagaagtacgcgtcccatgttggggaaagtgtcgcgaatgtcgaaaacagggctgtaattgtgagaagggctttctagtaggatagtatctgacgttaatgtgcggagaaaccagtttacacctgaactatgcaaatcgttcctaggaatgtatcccctgaaaatgtgggttcttgggacgtgtgatagcttgcgtcatgacaaggatcatggcaattcataggagttttgtatagcgtaactgttggaacttgagtgctgtaggctcccttatcagcaaagagtagagtgtcttttgtgccacggtagtcagtgaacttaaccggaattggtgcatgttgtgtgaagggtttaattgtcctacatcaaacttagctaaagtaatgtccatccacgtatggaggaggtaggagtatgtggaagaggtcatagctgggcactaagttcatatgcctatgagtcagtaaagactgaagtaatgtcctatgttgagctggttattttgatatatgataataattatctattgaagtagtaacaattctgtataagctggaaatatcaccaggatatatccatcatagtcttttcaggacagatagtttttactgtggggccaactaggttaaaattacactatgttagttgctactttaggcttttaaagcaagagaatcatgtagaggaatctactgcaatactatagtcttgtccagacctagcattgtcatgttggggaaatgaagcttcgtgaaatatcctaaacgcagttctagctctatctagattgagaaagtcctccaaaaagagaactattgggataccatggatgtggtggtggagataagaaaagctccctcagtattcttggagggaataatcgttaatagaaatacttaaatggctaagtttacttggaaactagctacgatt

SEQ ID NO: 657498 - DNA, 403 bp, Homo sapiens
tggtcttgaactcctgaactcaagtgatcctcctgcctcagcctcccaaagtgctaggattacagccatgagtcaccacgcctgggctgggctaatttttttttaaccttttatagagatggggatcttggtatgttgcccaggctggcttcaaactcctggcctcaagcgatcttcctgccttggctccctgaagcactgggattacaggcatgagccaccaaacctggcccaccctttttgaagtattctgggcaatgcacaaagcattccatggtggggccactaaaattccccgcttacaaccaccatagttgtagagccctagttgcaggacattttttccttattacttttttaattgggggcccaagaataatttgcatttctttgattttaccgc

SEQ ID NO: 657499 - DNA, 1055 bp, Homo sapiens
gccctggctggcagtgagggctggaaggaggtggaactggcctctgcagagatgtgtggcatgctgtgtcatgtgatggccattctgtgtgctcatgcacatgcaactgcatgcccaagactcatgacttgggtgaatgcaaacatgtggtgctgtgacatgtgccatgtgatgatgccttgtctgtgacatgttgatcccttgagatgttgggatgtttgcttgcacgagtggacgaacggacatgtgcatgttgtcgttggcctgtgatgctcatttgcctcagaagaacttcttgcatgcctgagacttgctgcttgtgcagtgcaccatggaggtccttgtcttgacacaaacaatgtacctctggatgaggttaatccttggccaacgacgatagctactgagccgtgacgcagatgagtaggttgcgattgacaacttttgacgcttgccttgttggccaaggctgcccagcggcccttttggacatcggccctctttagacccgttgacggagttcaccgtagcatacgcaagatgggagcgaaggttccgagacttggtgcacaagccgcgcttaagcttcactgggagtaccgcgcaagagccaacaaaccattgggagccgggtcaatagtagagcatgacaccctttcatgtggcaaaacaccttcaaacggtaatctacgggaacttcaatgggagagcaccttggcagccccttgggaccccggaaatgagtgggagcaccagtcctacgaaacctcaacggctgcataaccagtggatacgtggaacaggctcgaaggcggacgaattaacttccagagcataaggattacacaaatagctcttccttctacagaagagttcgttaggtggcgctcattattagaaagcgtttcaaagacccgcgaaagaaaccttggcgccagtcgaatttggacctatatcagatcgcaaggcaggtggacaacatgacaatggcacccgaagccttttaacccggggccaaagcggaattcaatcgattagacatggggcaaccacgg

SEQ ID NO: 657500 - DNA, 237 bp, Homo sapiens
gttactgtctgagcaagctgggaacgggtgtcatggctcatggagacgacctgccttccgtcgtggtcgtcttcgctggctcaagcaggagcagctacggctgctgggactagcaggtctctgggggccgggcgtggtggctgcgcaggccctcagcctgctttgtgccccctcacgactgcaagctacgctcccccttcaagaagcaacccccagcaacgggagtctttgcccagg

SEQ ID NO: 657501 - DNA, 286 bp, Homo sapiens
tcgtgtgtaaaaatcaaatctaagtagattacagatccaattacagaaacactttgaccaatttagaagagtcatccttaaaattatgttcctctggaaccatttttggtacccaaacaaaaatctgtattagtcagggttctccagagaaatagaagcatatatatatcagcctccatgactgtgtgagccattttttcatggtaaataccttcatttatatatgaagtcccacaatctgctgtcagaaagctggagactcgggaaagctggtggtataattcta

SEQ ID NO: 657502 - DNA, 225 bp, Homo sapiens
ttcatgtcgagtcctttcatgccgtaatggtggaacattgacctggctgcggatattctcaatagttatgccgggctagcctgtgtggaagagcccaagtgacatgattactagagagtacacgtggatgtggctgaaggaagaaatcatagacgatgatgatgatgacatcacccttacagttgaagcttcttgtcatgacgggcatgaaagcgctggacagaa

SEQ ID NO: 657503 - DNA, 1401 bp, Homo sapiens
  misc_feature (52)..(52): n is a, c, g, or t
  misc_feature (71)..(71): n is a, c, g, or t
  misc_feature (97)..(97): n is a, c, g, or t
  misc_feature (109)..(109): n is a, c, g, or t
  misc_feature (468)..(468): n is a, c, g, or t
  misc_feature (549)..(549): n is a, c, g, or t
  misc_feature (633)..(633): n is a, c, g, or t
  misc_feature (670)..(670): n is a, c, g, or t
  misc_feature (674)..(674): n is a, c, g, or t
  misc_feature (691)..(691): n is a, c, g, or t
  misc_feature (733)..(733): n is a, c, g, or t
  misc_feature (853)..(853): n is a, c, g, or t
  misc_feature (947)..(947): n is a, c, g, or t
  misc_feature (1029)..(1029): n is a, c, g, or t
  misc_feature (1085)..(1085): n is a, c, g, or t
  misc_feature (1092)..(1092): n is a, c, g, or t
  misc_feature (1102)..(1103): n is a, c, g, or t
  misc_feature (1106)..(1106): n is a, c, g, or t
  misc_feature (1136)..(1136): n is a, c, g, or t
  misc_feature (1145)..(1145): n is a, c, g, or t
  misc_feature (1244)..(1244): n is a, c, g, or t
  misc_feature (1315)..(1315): n is a, c, g, or t
  misc_feature (1336)..(1336): n is a, c, g, or t
  misc_feature (1344)..(1344): n is a, c, g, or t
gtcctaatagtccaactattatttttatattatttaatgattatgccagaancaggtagagtcagtaccancgtccacacgctagttcgaccaacgnagagcacatctnattatttatatttattattagtagttttctttatattgttctattgtatttatgtgttcttcttgttcaaattaaaatacacagttcatcttctctaacctgcgccttctgtgtgtttatattacctttataatatagtcatcaactcctactaccaacgtcacgcctacaatagaaacgtcgcatacattcgtgccttattcagttttatcgcttgcacaccccctatcgcatcctatagtaatcacacatacacactatctcctcttctgtctatgcgtgttccctatacgtgctctctcttatcttactatagcgccactcactttacctccttacctcgtatataatctactttnatagacatgtcacgcaccacgaatgttgtatatacccgtgacgccccatctatgtcattctacctctctcactcttcttgngtccttctcttgtatcgcactaatcacctattaggtgtgtccgatttatacctcttattctcacttctattgctgcgctctgangtaataaggcggtccctacaccgacgattgctgtccngtgngatgtctttctatatcnatacttacgcgtcctctcaagacactcccgtttccatagttncgccttatttacctttaatatactctcgccaatgagtgtgttgggacatattccagcctatttattcactcgcttgtgtgtaccaccgcatcgcgccgctgtctcaattaatagcgggcngttcttcatctatttacctctaccagtcgcctagtgtgtcctcatgttctctgtgcagttgctccttgcaacgctcagacttggctgatagtantcctcgtctcacacaccctcttctactcatctcacgctcttcatgtcgtttactcctcatgctcgctcaactatatccgttngttgtatctggcctatcattgaatcctcagactctattctgcgcactagatgaacntcttctntctctgtatnntgnctctcacagtgataacaactccactccgcnacatatacnctaccgctctctctgtctcgatcattataccgcacatatctgcgtgccttctagtactatgaatacattctcttgcaccgcgacccctctccatctccncctctgtattctacatacttctttatcaacctccactagcttactgtgacctgcctctttacttcttctcncttaatactgacccgattcgnaaataganagtcctcataatgtcctcatctcgtcctcctattttcctatttctttgcgccggctg

SEQ ID NO: 657504 - DNA, 223 bp, Homo sapiens
  misc_feature (98)..(98): n is a, c, g, or t
  misc_feature (103)..(104): n is a, c, g, or t
  misc_feature (114)..(114): n is a, c, g, or t
acgcgtccggcggagggagccgggcgtcggaggccctgaggccggccgcagagcccggagattgagcggctttggggaaggggtggttaaggaagtangcctnngcttccgtcngtcgctgctcggctctgcggcccgtttggaccgcggaggaggtcgccttcccctcccgtggggcgctcggttggactgtggaaaccggggcaacttcccccgtcttccc

SEQ ID NO: 657505 - DNA, 834 bp, Homo sapiens
cccctcaaagccaaaatgggaaaggaaacgactcatatcaacattgtcgtcataggacacgatagattctgggcaagtccaccactactggcccatctgcatctcatcacaatgctggtggccatcgcacacaaagcacacccattgcacacacacatttgcagcacaggcaggccagctgcagcatgggcaacagggctccattccacagtcatgccatgggatcttggcatcaaactgcacacagctgcagcagtgcaacgtgcgtcatccacccatacgcatcatctccgttgctggcacacatattgcagcaccaagccaaagtcactcatgctgcaatcatccattagcatagcacccaggcacccacagcagacactcttcatccacaacacacacacatgcatctcaccagtggacaccatcatcacaagagcctaaccacttggtagccttagtacactagacatatagcttgagcatatgcatatggataggtaagcgtcgccaaatctaggcacagcgtcgcgtcaatctcacgagagacacatagcggccagccaacagcacaacggacccaacttggagccacgatgatccgtggcggccattataagcacgacaaacataggcgacgctaggatagggcacaccaccccaaagcgttaaccagtatggcagaccggaggacggataacgcaacgacacgaaaagtcgggaaatatacaacaaaaagaggacagacacccaccccagtaacacacggacaccaacaacaccacgacacggactgcatgaacggggacacagatgggacgcacagcggacagg

SEQ ID NO: 657506 - DNA, 263 bp, Homo sapiens
ttagagcggaaacaccccctcggtttcacacatcagcgagtgcatcactgcatgggggaggccaaagacagcaaaacaggcagatgcagcaatctatcatatacgccatcaggttgataccggtgacgtgaggtgtttgggcaaaagctcgctcggtactcgggcagcgggtcgcctccggaggcggtggtacgaaacccaagacaggcggtgatccagtcgcctccttttggcttttttgctcaggccaggatctgggccgt

SEQ ID NO: 657507 - DNA, 92 bp, Homo sapiens
aaacccactccaccttactaccagacaaccttaggccaaccatctacccaactaacgtataggcgagagcactttgagaccctcagcgcaca

SEQ ID NO: 657508 - DNA, 426 bp, Homo sapiens
atatttagtaacccagcttagccattacttcatatattaaggaaaccccccgacctccttcttattaagggcgcttactgctcctcgtgaaagtgccctgcaatatgcttctcttaatcgtttcgaatcaggtagtatggaataaagaaagaaaagatcactctacatacagatagtaaacttaattggtgatcctagtagtattagacagtataaaaactagcagatcagtgtttagaaagactcgaaagaatgtgtaaatgactgatgttggcattatcaaggagaacttgggatgttgggtcaagaggggaaagtgttagtcaatccactttggagcaatatcatgaaggtcaattataattccatatacctttctttgatgccacagtcagagatagaatacagttagggtggccatggatg

SEQ ID NO: 657509 - DNA, 1284 bp, Homo sapiens
  misc_feature (82)..(82): n is a, c, g, or t
  misc_feature (992)..(992): n is a, c, g, or t
agcgggtgttaggccccgggctggccagacgatgccgtgcacgaaagttttgcgtgtctgatccggatcggttggtactaanggtcatgcttggacgttccaccaccaccagaattgcgagaggactgtccagtctgtgctgttgtatgtgcctggtatggttgtttgcgtaagcctaatcgaatactgcaaacgaacgacttctcggttgactcactgatactccactaacgctctacagcaccgaatcgccgaaactcctagtctcataaggaccaatctttgactggcgttatcgggcggtgcagcccttgcgcctactcgtgatcaattcttcgcgaatatcaccttggcccttgcttgagcagttcttgagcgaaccgaggaagagacgccggccaaactggccgcagattacctatagggtcccattcaagctaagtcaggggaagttagttgcttagaggagctctattgcatctatctcgaagaaaaaatctagtggtgtctcatccatacaccccttcgttcacgacgacttcaaaattgcatatgaatgcgcacgtatgtcctaagtgttgcttgttagagacaaagcctacgtgtcgcgaaagcgcgtcctggtgcgctctgttgacacgtttcctcgacggcacttacgaattgcaatagcctggttcaccaggattataaacgccctcccaagtggatgtatttgcgctagcgaaagggcatgcacaaacaacttccgtggccaaaggtgtttctcatacctggggcctgtctcgaggaagcgacaccttttattgtgataacatggcacatgccggaagtttccccatgcagttacggcgcaggggggaattagttcgactcgcgtgacttcgctttgttgtgcaaaacggaccccccccaaaggtttttatccgacccacagagggtcaagggcatgcgacatttagctcacagaagcggttgtgcagatgccacangtgcaaaacggcccgaagacatgttgggtgcgcccctgtgttgagccacttaagtgcacttgcgggctcaaacctcaaatttaaaacccattggcgcggtgggctcaattgtgggtcgtgctccactttggatacttattaccagttcacacacgggcgcggactcggaattacaatggcaccaaacattggcttggttcccctctcaagaggtggtcgctaattcttgaaatggatacccttgccgtccttcgcgcggaaactttaactttaacctcggaaaggcacatga

SEQ ID NO: 657510 - DNA, 149 bp, Homo sapiens
ctccatatgtgtgcccaggacacttttctttatgtgaagtgttattggaacaaagttgtctcttgtgctggcacacattatggagtgggcacacattatggagagttgaagtttaagtttcagaaaagatggaacctggtcacccatta

SEQ ID NO: 657511 - DNA, 930 bp, Homo sapiens
gcgcccccctagaagttattgtggggcctctcttagagctcctgtgtcctatttatcctggggcccctctgaggacccggtgtttaattccgcgcgggggttccctaccccccccggcgagtaatctcttaacaaaatttggggtaacgttttcccagttcttttttacgccgctgtcaaacaagcgcgtgtttcccgccaagcccctttccgccgggctgattcttccgcgacgccgtcagaggggtgtaccgcacgcactcgctccttccgccggcgcgaccattccctatctgccctccgccgccttggccccggttgtagcttcccgtcagccgcgcagccggtgcattcgtcaaacctgcaccccctatcacacccgtccttatatacctcgagaacaccttttttgggcctcttcaccccacggtatacagaatctatggcctcttgttccaccaagtcggctcccacacaatccttcttcccttaatacaacagggccccccccatttcttcatcactaaaacaaaacagctacccgaatggcgtttcccctttatggcccaagagcgacgacctcacattttgtggcccataaccctcctgtgttaagacccccccttccacattcagagtattcttgggggcaccccccccccacacgacaaatgcgccactgtaggagcaccgctgtatgcaaccaccagagagcgagcaatactatatttggtttggaaatcgagagctggcaccatcctgaattcgcactgcctctatggaaaatcatcttagcgcgataaatgctagacggaagattcctttttaaaaatcctcaacaccaaaggggaagagcatttgagacaccgacctactgagtggggcaccttctttcccccaataaccaaccctttttcccccacatgacac

SEQ ID NO: 657512 - DNA, 1513 bp, Homo sapiens
  misc_feature (183)..(183): n is a, c, g, or t
  misc_feature (351)..(351): n is a, c, g, or t
ggcgaccagagaggtggaactagccatgttacagccgttctctgaggatgtctcatcatcgcatccgaacggtcattgactccatggctaagaatgaagccagtaacttaaggcaaacgtaacgaccgtgaacttcgcattagatgaatccggtacggcgacctgactatggaatgggacttnatgcacagaaacatggtcgtcctgttgatcgagagtaggacgaagtggacagtcgttggagtcctgcccgaatgggctaggcatggtcacgatggaactcccaggcattggttgcccgtgtcgagcgcgcgccacggacgtgggtcgttttgcatggcaatggggagncactacgaagagcaacaccaaatgtatatagcgccaacaatggcgtcgagtcctcggacgggggcctgcgcttgagacccgattcaatacgcacgatccccttggtggcgtagcgacaaaacctcgccaatgtgcctcatgtactagcgcaggacaagaacccctcgatggggcgacccttttggtcggcccccagtaacccggagggccgagattgggggcccccagaaaagggcggctcccaaaagggtcataggcaataacttctgaccccgggggaaaaaagaccatcgtcggcataaggaggcacttttgttggatcacacgaccttctataaaagggctggtttggctaccaaaaggaactatcgtccagctggaggcccacccaaatggacacagccgatggaagaccctgcgtatgcaagggagggaactcaggaaggaaggggtggggtaccaaaatggcgctccacaacgagttgggggaataggaaccgaagtgatgccatatcaaccagcagagaggcgcgtagcccttttgcaagaagtcaatatcatacagaaggcaaacagcacggggaacaggacgattgggacaccagcccaatagacaaagttctcaccgtttggtgcggccaccagtatcgcaacaggtgcttattaaagggggccaatcggtgtgcgaaaccccacaagcgtatatcagagatggcaaactccgtatcgaacaaacttcatccaggtcggaaaggcacaacactccggtgctaagcacactataggccaccctttggagcacattttcggggggtttgtcgtagcgccaacaggcccccttaagcggaatgattcgctatagcgaagacatacaccctgccggagcaccaataggggacaacaccagggccctggcggtataaggcgacacgacacaacgggcacacgggacctgttcaacgccccagtggggaacgagacactgatgtccactgaggacaattccagcctttaggacaaggttacaagacgggaaaccgacttgggcgggccatattcaattacccccgcattaggagaaatcaaaactgtatcacagagcggacgtgttttataaggccgcaggcaccgccctgtagcgagtatttataaagcgtcacca

SEQ ID NO: 657513 - DNA, 340 bp, Homo sapiens
atctgtcatgttccccgtgagtgcggtgatggcctcacgttgccgtcggtgatcggccagtcgcgcccctggctggctgtcgcggtgaatgtcgttgtgcaccttgatctattgccctttctcggagcagccgctcaggcaggttcttgcgatggcagctccctcgtcgtgtgtggctcctccttccagtctcgggtctgtccaggaatgtgctcctcatagcccagcctcgaaggtgtaggcgtcctctgcacgcacgctatccatggcatgctccgcctgggggggccattcaacgcctccgggccattcaactcctccgggccattcaacgcctccg

SEQ ID NO: 657514 - DNA, 334 bp, Homo sapiens
ggtctcaccttcaggttcgcgcctccgactcacctcgtcttgtgttcaagtggccaacgatgcttatcgttcaggggaaaaccctcgctctgtacccctctttaccgctccatacgcgaacttggacgtgcgcctcccacagccgtcgtttcttacctctcgtggtgacactacccatcttactacgctgattctcggccggaatcttctatgtctgctagcgcactggtctggccgcaccaggcagcctatcatccccgagtcttggtagcgtgacgatccagcatcagtcaaccacggagcacgtacatgcacttcgcctgacgtgcgcagc

SEQ ID NO: 657515 - DNA, 682 bp, Homo sapiens
  misc_feature (649)..(649): n is a, c, g, or t
ggagcctggtgggtagggaagagtcaaccctcggtcgcatgtaggcctggaacctgaccaatacctgtattttcatacctacgttccggttttcaaatgtcggataacttggaccatacggacctgactgcatttgctgttctagagaatcctctgtaagtggacctgcacagttcaggcccagattgttccaggatcaaccgtagcagtagaaatcaaggatctttttcattgtctcttagcggatcatgccttttcacacgaatagaaatatgagggctgttgggagcaggcctccccctaatctggccataaactgtccccaaaactggccataaacaaaatctctgcagcagctataacatgttcataatggccataatcgcaccaagttgagaaggattagtggatctacaggaatgacgtgcaaggaacacctggcctgcacagggtggaaaaccacttaaaggcattcttaagccacatacaatagcatgagtgatcatgtgccgtaagacatgctcttgctgcagttaactagcccaacatattcctcttaattcagtcgatccattcgtttcccataagggatactgattagttaatttaatatcgtatagaaagaatgcataatgacatggttgctgtntaataaatataacggctaagctctgttaggctt

SEQ ID NO: 657516 - DNA, 1193 bp, Homo sapiens
  misc_feature (314)..(314): n is a, c, g, or t
agcggaggggtgaggtcacggtttgcgtccgagccatcacgtccctagataacgtgcaggtccggttacagatgtatggttatccctgccaaacggttctgcttggtgtcatcccactggtcagggcgtgcgcctgggcctattgtccgtgcggtcacttgagcatgccagaggaccgagcccgaatgtgcttgcatggcaatgtgagattcgagttctatgcctcgatgcgagaaggacgcgctattggcacagattcagtctttgaccactgggacgcataaggcagccaataggacttggtcagtacttgnatcgatacagggataatgtaggttgcgaaacggaacattcgagatcagtcccttcgagcaatcgataattcggctattgcgcacaggaaactgacaaatcagggcataaaacccaattcttgcgacaagcgcacatctatcagaatccgtatcaccacaggaaatttgcataaacttttaaccaatcgtactacaatacaaccgggcaaggacctcattgcctaggtggcttttggctgccttggaaacccgtgaagcctagccagagatttgggaaatctggagtcatcacgtgggacaggacttagggtttaaccagagtgccccgtagagctttcgagatctccccaagtaagatgtactatggaatttattttaatggattgacacggaacagttgtttatccaattacgaaaaagacagtgggggaagaacaaattcaagtaaaggactatagaatagtggaatagaacgtgggagaaaggctactatgtcttaggagcattgattgttccctataataaaggggaaaatctcagggggcaaatatttgcagaagcggaaaaaagccttgtccagtgacactataggccctaataagaggatgggtagcgacacctataaacggcaacttgttggcacatgtttctgcccaagggccgacggcctatgtaacacttgtcgtggaacctcagtaagtcgttccacaactgtgacacaaccctgtctggcgcacttaacttatgaggcaccacaacggtgttttaacacttcacaacaggacaaaaagcgagcacgtgtacgaagcgtttccccctgacggaaacatagtggaccagtaacgggctacacacggcaacaacacaacagcacaactt

SEQ ID NO: 657517 - DNA, 229 bp, Homo sapiens
tgtcttgttttcatgtgcgttactccccattgcttccttttctctagcacacggaagagttcatatcgactgctgaccctaatttgctgcattcactgtgggcattcctacagtccttcaatcttacttttctgttcactgatgataatccacaattgtgggtacataacccatcatttaatgcaactgactgtcgtacatcctgttatcgactccatcataccttact

SEQ ID NO: 657518 - DNA, 483 bp, Homo sapiens
aaattcagaaactttttttattactgaaaaatgacaagccagatcagttcaactttgaccattatacagacccaaattttttactaaaataaatactaaatactaacccgcagggctgacccaaggatgaaatgagggggggccctgccttgggcccaaaatttaaggggacatccaaaaaaaagggggggaaagaaagaaaagaaaaaagaagcccccaaaaccctcaaaccaaaaaactcgataatcaagctaaatgattttttaaggcaatttttaaaaaaataaatgcaaaaattttgatgaacaaaatatcaaaatgttaaagacaagatcagtaacagggccttgccaggccatattgcagcctcagccaaaaggaaaaatcagtaacattcatcttatcttttcctaaaaatttgattttttgggggaccccattttccttccccttggcctggccctggtaaccagaatatcagt

SEQ ID NO: 657519 - DNA, 265 bp, Homo sapiens
  misc_feature (262)..(262): n is a, c, g, or t
gtattgggatgataggctgaactatgtagcgttgtgcgctgtgtaaatgatgtgttgtaattgctcatcttttagtgaaaacattcttgagagataaaagccccatctcaatcatataccaaagtctctccctacacataaacgtaagaccttctccatcactcatctcaatacttatccactcatagacaggacagttgacggtggacttcaaaccacaacccacgccgcacctttcacatgttctgctaggcggatcctncta

SEQ ID NO: 657520 - DNA, 581 bp, Homo sapiens
  misc_feature (265)..(265): n is a, c, g, or t
  misc_feature (510)..(510): n is a, c, g, or t
tgagtcactcaaggaacaaaatgaaaaaagtatgcccaattaatagagaaagaagaacagagaaaagaagtacagaatcagctagtagacagagaacataagctagcaaattggcatcaaaaaacaaaagtacaagaagaaaagattaaaaccttacaaaaggaaagggaagataaggaagaaaccatggatatccttagaaaacgaccttaagcagaacagaacagactaagaaaacgacgtggacgcattacaggcttcctcncctagacggttcaaaacggcacaacttagaccggtcgtctggaaagacgaaagacgtcctgtggttgaaacttcagcaagaggaaatggaacaaacactcccacatgatagcaatgatccacagtttaagtggtggaacacaataaatccagaaactgtgaatctcacgtatatagaccattactggcactttgtggacatttgtaactctcatgactatttttgactgtactttatctacttgnacgggggggtgggtaggggacgttaactttgtgacttcgtaaccaataaagaacgttataatctaatttag

SEQ ID NO: 657521 - DNA, 187 bp, Homo sapiens
cagctcggtatctagcttccctccaaccagaccaggcttttagaagtcgagtgtggtacacacggcctcagtaggccaacccgcttgagccttctagccacggaagctgggagaggggaaggcacgaggtcctgcagtggagcctggcccagcttttcccttcgctctcttcccgctgtcccgtccc

SEQ ID NO: 657522 - DNA, 1282 bp, Homo sapiens
ggggcttacaactacacccccctcgcgctgctatttggtgtgctcgctcttgtcactgtctttaagtgtgctttgcgccctcttaataggggggcccacctgtgatgagtgatggttgttctgggaatctcactaccgggtgtgtccttgtgaacattgggtggggaactttttcttggggtccctttttgtgccgcccccgtcctgctcattcgtatccgtttaagggccctgtataaaacacgggggcccttttacctctagggacaccaagtggctgtggtttataaaagttgccaccgggttggtatctaatcccgccttgtcgctggtaagagtatccgctctacaaggtgggccagggccccctttgctcgcccaaataatcgtgtcaagctggttcccccggtgggttctcccgggggttatacccccaatacaaaagggtttgtaatgttgtggaaccatagagggccccccgtggtggagtataggcctttgtccggcacttttttgggtttctttttttcttgcctgttgccccaagagtgtattcgctcggataatcaaaatggttgttgtcggccccctcccccacccgtggtcgccccagacaagggttgcccccacaggcacacccttgggggacacaatatggggcccccccctgtcgctatcggtgaactgtttctccccttatatcgcctttatattgccctttgagatggccctgccgtaaccttgccaagcaatttcagaaataatgccccaagatggggaaaccaattggcgcacaggtggaaacccactgcccaagagtctcccttattttgtttttttcctgagaaccggaggtcttcacctcttgttgccccaggactggagatgccaatggccacaatatattggcgtcactgcaacactccgcctcctgggttcaagcgattctcctgcttcagcctcctgagtagctgggattaccaggcatccgcccacccacgccccagagtaatattttataatattttagatagagacgaggtttcgccatattggccacggatggtttcgaactcttgacctccaggtagtccgccttcctcggcctgccccaagtgctgggattacacggcgtgagccaccacaagcccggccagctttcttaatgaaatattttcctataaataaagtgggtaatccggttataaaaagtttttcacccggaattaataaatctattttcattttgcaataataaataacaaaaaaaacaataaaaaat

SEQ ID NO: 657523 - DNA, 459 bp, Homo sapiens
  misc_feature (27)..(27): n is a, c, g, or t
  misc_feature (73)..(73): n is a, c, g, or t
  misc_feature (146)..(146): n is a, c, g, or t
  misc_feature (148)..(148): n is a, c, g, or t
  misc_feature (154)..(154): n is a, c, g, or t
  misc_feature (162)..(162): n is a, c, g, or t
  misc_feature (166)..(167): n is a, c, g, or t
  misc_feature (198)..(198): n is a, c, g, or t
  misc_feature (217)..(217): n is a, c, g, or t
  misc_feature (222)..(222): n is a, c, g, or t
  misc_feature (241)..(241): n is a, c, g, or t
  misc_feature (258)..(258): n is a, c, g, or t
  misc_feature (296)..(296): n is a, c, g, or t
  misc_feature (302)..(302): n is a, c, g, or t
  misc_feature (307)..(307): n is a, c, g, or t
  misc_feature (310)..(310): n is a, c, g, or t
  misc_feature (319)..(319): n is a, c, g, or t
  misc_feature (322)..(322): n is a, c, g, or t
  misc_feature (327)..(327): n is a, c, g, or t
  misc_feature (335)..(335): n is a, c, g, or t
  misc_feature (338)..(338): n is a, c, g, or t
  misc_feature (341)..(341): n is a, c, g, or t
  misc_feature (355)..(356): n is a, c, g, or t
  misc_feature (380)..(380): n is a, c, g, or t
  misc_feature (404)..(404): n is a, c, g, or t
gtttattttgtggataaaggtcccctncaggaggctgttcacaaaaataaccctacacgatatcaacgtttanaaaacaaatcttaagactataacactaccttatttcttctagaggatgcatttgacatgccaactctcattcncnaaaatncattgttncatnngggttgcccccgccccccacatccgcacacnactgtcgacgtggtcgccnacacncatatctgtcgtgagagcncaaagctgcttctgcancgacgctactccactaaatcgagattcgcctttgcagntagggnggcgnctnctggacttntgngtgantggaaagnacngtnctccctgcataacnngagattattttgcgcgacacgtcngccaaagacaccacgaccctgccnttctctattgtatagagatgcgactcataagcagcgctgatcacaatatgtcaag

SEQ ID NO: 657524 - DNA, 1034 bp, Homo sapiens
gcaagggcttccttttctccacattttcaccagcatttgttactgcctgtctgttgaatgtaagacattttaactggggtgagatggtatcttactgtactttttatttgcatttaccttatgatcgatgatgttgagcaccttttcatgtgattgtcacttctatgtcttcttttgatcaatgtctattcagatcttttgctcactttttgattggatcatatttttttcttttgaattgtttgagctccctatatattctgcttattaatcccttgtcagaggggtagtttgcaaatatattctcctattctgtgcattgttgattgtattatttgctgtgcagaagttttttaactggatgtaatctcatttgtccatgtttgctttgattaccggtgcttgtggggtattactcagaaaatctttgcccagatcaatgtcctggagattttctccaatattttcttgtagtagtttcatagtttgaggtctcagattaaagtctttaatgcattttaatttgattttcgtatatggtggcagatagaggttcagtttcattcttttgcatatcgatatccagtcctctcagcatcattaatctaagactttttcctcgtgttatgttcttggctcctttattaaaaataagttaggaggctcacacttgttatcccaggcagttcgggagggccaggccaatggctcccttgcaggccacgagtttgcgacagcttgggcaacttggtgaaaaccttctctactcggcatcagaatcagtgatcccggagctggaaggtttcagtgagccaaatttaaccacatgtgtatcacgccgtggggaaagaggccaagatcatttctcaagaacaaaacgttctctaaaaaagggaggcacacataacggaccataccacacggccaaaggcgcaccagattatataaaatctgaacacgcagatatgtcatagacaccgcagtaacattaaacggacatgatggctaccagacaagcttgttctatgaactac

SEQ ID NO: 657525 - DNA, 241 bp, Homo sapiens
gtttttttcagcctgtttccccagccacaggcctggtacgacccccaagatgtgccgcaagcactgtttcaccattccgcacccaccaaacaacaaccaggggtggagtccaggccactttcagctgctcctttttccgggcatcgtgtcttttctttgctttttctttcttcccccacttttctttttttgacccctcccctccggtgggttttgtatcaaagctcctcaaaccccgtca

SEQ ID NO: 657526 - DNA, 322 bp, Homo sapiens
  misc_feature (14)..(14): n is a, c, g, or t
  misc_feature (148)..(148): n is a, c, g, or t
  misc_feature (153)..(153): n is a, c, g, or t
  misc_feature (156)..(156): n is a, c, g, or t
  misc_feature (174)..(174): n is a, c, g, or t
  misc_feature (206)..(206): n is a, c, g, or t
  misc_feature (245)..(245): n is a, c, g, or t
  misc_feature (252)..(252): n is a, c, g, or t
ggatgttgccactnagttgggaaaaagctcaaccctaactgttgcatgttgttggaatcctccctctgtacttcccagtctgggccctgtggggaccctgccctaccttagaaaacatggagacccatcccctggtaaccaagttagnagganaanaggtgagcacccaagggncaggggcaaccctgggagggagccatggagantgggagcctggaggggtgccttatagccatttggggagnagagggntctacaagcctaaggagacccgaggccggttactcccatcatgccttcctccctctcctgcaggatttcg

SEQ ID NO: 657527 - DNA, 818 bp, Homo sapiens
actcggcgcagccaagagcccgaccctgggtcaaaggccctgatggcccctgcctggaactgggccagtgaccctgcgcagccgctgtatctgccccctcgaggtcagtgagctgctgctgtgcccagagcaactggtgcattgtctgcctgatgtgcagtgctgacttggtgtgatttggccccatgccccctgtgctttcctgctgctgtgagttgtgcttgtgtgtgctgtgtggctgtgctgctgtgcttgcagtagtgcttatgatgatgtcctgcaccatgctgcctgctgtgcctgtgtgcgtgatgatgatgtgtgttgctgtccctgtgcagtccctgcactgactgtggcccctgccgtcccctgtgttgaccccagcgctcctgtgccctctgtgtggtggatgttgtgctgtggtctgtgcttgctgcctgatgaccctcctgtgtgatgcccctgcccatgactgcctgctcctgcttccatggccagccctgtgtggctctccatgccctgctgctctgctctgtaccaagatcctagacatgaggttcgagcaaggcgatggtccctggcaaaatgcaatgaccttagcccagtcagagaatctctctgatttgctgtggccttttggctgatgtgcctgtgctggacaccctaacctcttgtgggctgctcgctttgttgccttccttcctttcccgcacgccccctggtccgcaacccctgtccgcttgctgtgacattgtgttgtacacattgtgagccagcgcgggctcccctttttcctgattgctgcctcgtggccg

SEQ ID NO: 657528 - DNA, 174 bp, Homo sapiens
tgctctttcccggcgatccgctgcgtatgtgcaacgccgatgcttgcgcgttcgacaatgcatcgtttccgctcggaacagacaggctgggtcgtgatgtgctggccgagcttttccatgcgagccgtgcatcgctggtcgtggggctggccgcagcggctgcatccattctga

SEQ ID NO: 657529 - DNA, 938 bp, Homo sapiens
agcgggggaggcggcggcgcagacaaaggcacgggcggcgtggagggcggcgcggactgagcgtgggccaggtggcgcgggtggtggacgtcgaggctcgtgtcgagctgttgtgagctgcgtgagcgtgccttggaccggcctggctgagtttggctgcactgtagccgccgtggtgcgctgtggcttatggaacggcatttccggcctgtgcgcatgccgtggccatggctggcgccggggcgtgtagtgcggggcgcctcaatttcggttccctgtgactggtccgatgttaggaggggggatcctcgaagcgtttgtatcgccccattgtttatgcgcgcctgggggctcggggccttaggcgcgtgggcgtgtaggcgtccccagttgcggcgcctcatgggctgtgcttcggtggaagcggttgggagagccttgtttgggagggcaggcggttcttccagatgcggttggctacgaaaattgtcgtaaggaaatctcccctctagaatataccactctgtagttacaccgcctgttgataaaagcgcggtatgaaaaaaaaaaaaggttcattcacaaagaagctctgtcgaattccggggctcgaaattacccgcgggcctttgaatcgcgtccccgagaagtgcgcgtgtgcgcacccggggtgagccccaaccgcctggtttttaggtcaaaccccccttttttgagtcttggacagggggtgtttgaaaatgttagggcgggatgaccatttgtggccggaatgacacttcggaggggcgcctccaattcacggcttcgggctccacccaccgtgggttgtttgcaacacatttgttgtgtttacatcccaggtgggttcaacataacactgtcctacacaacaaatttactaacggaaaaaccaaatatggaaaagacacaaaggc

SEQ ID NO: 657530 - DNA, 497 bp, Homo sapiens
aataaacatctgtgtctgtgtctgctgaataaaattaaaaaaacgaactcgcgcgcctcgctaaaaatgggacggcgaaaccatagcagacaaaccccccttggctcgaaacagaaatatactataagtgaaaactgtttttggcggcccccctggccccaatctcctttggcttgggccggttttttcctgcgggcccaattggggcccctttggccctttcccccctttggggggggttttccgtcctcccggccgggtgtttcaccccggtggccggggaaaacccggggggtccccccctttatccccggtggggcccaccccctttggcccggggggggtatttggcaagagggcccccccggttgccctttcccaacgtgggcccccccggagggcgaatgggaatttggcaccgtaaattttttgtgttaaactccgggtaaagtttgggtaaccccgcttcttttttcccccaaggggcccgaatcgtg

SEQ ID NO: 657531 - DNA, 382 bp, Homo sapiens
aaaagaagtgttatttgtcttgtttgttttcagttctcgtaactgtagggcttaatgagggagagctaatacaggacagaatttcagaatgtagaggtccacaggaataaccaatggcaacctccttgtagcagagatggctatctattcacctaaatcatctcctctttattctgggcacagagctggaccacatttcccagcttcccagtgaccatatggtctcctgatacccacatggctgacttccacaaccagtgaaatgtgagttggagttatatgtgccccttcctggcctggtccatacaactttccttcttgccatcttccatatcctcctccccagctcttacttttaggtcattaatccagtgtcgacgcg

SEQ ID NO: 657532 - DNA, 254 bp, Homo sapiens
ctaggctggggattgaactaagtaaatgaagccaggagtacagatctagatcgcagagaattcagtctcattctagaaacattgcaactactgttagagtccaccccatgaagctgtgacacattgtgtatacatctgacttaattctatcgcgtatatagtatgttcagactatagacacaatgttgctagctagagttggcctgtcgcagtctcagtcaggacacttgagagtcgccagataagacccacag

SEQ ID NO: 657533 - DNA, 319 bp, Homo sapiens
gtgtgtgttgtgtgtgtgtgtgtatgtcccatggtggagtgtgtgtgtatcccatggtggagtgtgtgtgtatcaatgtgggcgagcgtatttttacataaatgggcgtgtgcgcgcagaggatgtgtgcgtgtgcacaatctgtttatgtatcatgtgcacatgcctgcaaatctgtgtgtacaggggggtgaacaggtgtgtgtatatatgcatgtctgtgtgtgactctgtgtgcatgatcggtgtgtgtatgtgtatgtgtccgagtggggaatgcaggtatgtatgtgtgcatgcaagtctgatacttgaatcc

SEQ ID NO: 657534 - DNA, 768 bp, Homo sapiens
gatttcatgtcttcctccagcatgactaagtctggaacagcaggaagggttgatgcttactgacctggtgatgttagaagacaagtagtttatggatttaaacattagagctggagtggggctggaaatctttgtaaaggaagttctttcagtaagatgcccctgcttgtctttgtctcttttttgtttaacaaggtaacgttttcgtttaacaaggtaacttttagtttaacctagattttttttaaaacttttcttctgtgttccatatgggaaacagtacattcatatccaggtagaggaaaactgaccaaaacagaagcaaaacataagaaagattaaaataatctctaatcctattacctagaataaaacgactatgaatatttgggctcggttacctgccaaggtgtaccggggtatacatggatatctggtcggtttttaaacaaaacgatgggatcattctgaacatacgggcctatagtcatggtcagctaataatatatcagaccttatccaactactgcactcacactactcctacaacctttgtcgaacaaatgtctatgaactattccatcgctatagcactgtgcctctacattggctgtgacggcggatcctccttacgaacagaaaggatacgcaagcatactgtgttggtgaaaagttacacaaaggtgcatcgcatgtccatggggagaaacatggtaattaaacactggtcaccaccttgcacaaggccatataatgcccaccaaccca

SEQ ID NO: 657535 - DNA, 842 bp, Homo sapiens
gaacactttgaggtactgtcttaaaatttgtgggccctcatatggataaaggcagcaatcctaaggacttgtgtttctttgaacataatctgagaaatttctcgtgtagagcagagactttcaaacctttgggctgtaacccacaggtaaaaaacgcattatatatcaaacctttagaatatgttgaatgaacaagtacttaccattctgatgctttcatggtttcagttttaaaatatgccagttgcaacccactaaatggatatctaccaatgggatgtgcaacccattagacttgaaaaaaacacccgtcacagaggaactggatatatcgtagaagtacctgacgtgatcaagccaggcacattcaccgaggcacttattacaacgctaaggaaacctgggactatcagcagaaaagtacatctggccagcagcgattagacactcacacataacagaaggggctgaaagcacaggaaagtgttgaacctaggctcgtggaagaagacatacgaaaacaacgttgatcagagtggtcatctcagaacgatattaccaggccgtcgtagtacagactagtgagcaaaatggagagagatagggaagagacagagggagcgcatcaagttgccacatgacaaaaagccccaaaggagaacatctatgagggcagaggcaaaaagaggagaccaaagaaagggaaatacgacatagggagagcccacagggacagtataagaaaggaaccaagggacgtggggggccaacacgactaggggtgggcagagaaataactggaccatgagagtggaagaaaaaaaaaacacataacggaacgt

SEQ ID NO: 657536 - DNA, 803 bp, Homo sapiens
gctgcattgttgaggacacgagtctcgggaggcatgattcctatgtagaccctgggtgttcgccgtctgcgcttgtggagtcttcggtgcgtggcgcgcgcgagcttgcttgtcctaggccctgtgctcgtgggtgcctgctcctcgtcccacattcccctggagcgttctctgagtctcgatgtctgcgttgttctgggctgcgtctctgcttggggatgagttggtgccttggcttgcctccgagtgcctagtggctcgctgtttccacgtccagtccccaagttgctactagcagtccatgtatcctcatggaggccatgggaccaagcactccgggtgctcggagctgtctagctgacagtgatggtcgtcaccttcgtcggtctggatgactcattatagacttgtggtttatagcgtcatagcttccgttatccttgttttgatcgtagagctggacttggtagtttgggttgacacacgaattggagcaattggccttggcacacaatgtattacattgagacgcctgtcgagctgcttcgcctgaaatactggttgcacctcacacgtacaggaacatccactgcgaatggtgtggaaacgtcactgtgaattcctgaggagacacatcgttgcccgtcagtggagaaaccgcgctcgcttcggttcttgtgtgagacccccattcgttgtcggtttattcgcgcccgtcccgttcgagacgacgcggcacgcccttggaaggcaaaggatgtgcacgaaggggatatctgccaggaaaggctggatcgtccctc

SEQ ID NO: 657537 - DNA, 456 bp, Homo sapiens
aatgtcatataagcgcatgtaatggacaaccattaccagttaatgtttatcacaccgttaatctacggtcttagctgtgcatttaggagatcttgtatgggtattagttatactgtattgaaattatatgaagagctctctatatatccttgatttctgaactggtgttgttgactatgatatcccatgacttggatctccctacaggtctgagtctcccatatctgcaagagattctgcaggaactgggtgtgcacacggtgtcgtagccagttcaggtactgaatatttaggatttggcgaagttcactgtattgctatatttttgtagatgaataaaactcaataaattgttaatcattctctttttgctgtatagaattgcttatatcactctttctttcatgacattggttaacatttaaatgttcctcctgtacttgtgtcgtctgtgac

SEQ ID NO: 657538 - DNA, 184 bp, Homo sapiens
ccggccccccaaacaaacaaaattctccttttggtggtgcccagggcattgggtgcccatttggtccccaaagcccctagttctatttggattttcccggggggttcctaaagggtgggaaatgggtttccagggatttttccctttcccctgatttttttccaataaaaatttttaattccca

SEQ ID NO: 657539 - DNA, 418 bp, Homo sapiens
cctttcttgaagctcaattggttaagtgactgtggctgtcccatgtgtagaagccaaagattatgtggtaattctggtaacctttcttaagagaaagctgctacaatctatattcctaagtcatcccctcttccttcctgctgcttggaagatttttttttttttggggcggggtgtctctcgtcacccaggccggagtgcagtggctcactgcaacctccacctcctgggttcgggtgattctcctgactcagtcgcctgagtagatgggatagcgggcgtggtggcatgagcctgtagtcccagctacttgcgaggctgaggcttgagggtcgcttggcgccggggggcagaggttgcggtgagctaatcgtgccattgcactccagcctgggtgacagagcaagattctgtctca

SEQ ID NO: 657540 - DNA, 685 bp, Homo sapiens
gaggacgtggagtttggttgtcattacatattcattggctctcacttctgcgacattctccgcgcctgctagccgcttgggtccccgcgctgctgggcgacatggtcgctcgcgcggcttctcttcacagctgcgcccaccccgaccacaccaaggaagccgacgaggccgagtacagggatggaccccggcgggcctggcggaaggcgacggaagcttggtgaacgcttctagggacctagttacaagagttcccacagcccaaaaagtcttctcaacagctgtgattggaacgagccctcggcatctcacatgcaaaagacacactagctctagcgtgcacacaaatggaccgacagaacaacgacaagtcacactgcacataacatggcccacgagcgtggacggtaagaaggctatggccgccagaagatcgactgctgagcggcaggctgcagctgcagcctgccagctgttcacggagttggggtctgctaaggtaccccggtaatgagttgtttcgacgcagccaaatacccgagctgctagctgcatcgctttggcctccctgccgacagctggtggcgtcggaacccagcatgacacctacttcctggcggcagctgaatcagagagtatcgaccagggggacctgggggcctatccgctctttggccggacgaag

SEQ ID NO: 657541 - DNA, 671 bp, Homo sapiens
  misc_feature (536)..(536): n is a, c, g, or t
  misc_feature (581)..(581): n is a, c, g, or t
  misc_feature (589)..(589): n is a, c, g, or t
gccagccctccgcagatgctaggagggaagcttggaaggaattctccccacagccttcagaaggagccaatcctattgttacaggaaaggggtcccgatccagatcccaagagagggttgtaggatctatcgcaagaagaattcagggcaagtagtctgtaatgtgagagtaagtttattaggaaagtaaaggattgaatggctactccatagacagagcagcctcaagggctgctggttgcctatttttatggttatttcttgatgatatgctaaacaaggggtagatgattcaggcctcccatttttagagcatatacggtaactttctaacgttgccatggcattcgtaaactgtcatggacctggtgggagtacagcaagaacgaccagaggtcatcctctggtggccatctaagttttggtgggtactggtcggattctgtaatgcaaactgttttatcagcaaggtctatatgacctgtatcttgtgctgaccttctattacattctgcgactaatgaatgcctaacctnctgcgaatgcagcccatcaggtctcaggcatatcttacccagctnctattcangatggagttactctggttcaaacgcctttgacactatgacactctggtttttggatttctcatctcctgaatggagcttttt

SEQ ID NO: 657542 - DNA, 373 bp, Homo sapiens
cccagagtccaaacagagccaaactgtatttgagggaaaactcacgaggtgtattcaacatctcacgcggcacaaacatataagaaaaggtgagagggccaccaaacacggacaaggaaaaaccaagagccacgaagtgggcgtatgtgtggatctaagcttcctaatggccaaagtgaaaagggaaatgttattaacagcccaaaaccagcctgactggtttaagtgctcttcttttcttcacccaataaattcaccggagctttcttcgcttctttaatgatggcatttgcagtctctttggccttgtctttaaaggccttgaccacactgttcatttgggacttgtgcttcaagaagaaaggaccgatga

SEQ ID NO: 657543 - DNA, 433 bp, Homo sapiens
  misc_feature (103)..(103): n is a, c, g, or t
atctcgaaatatgaaggccctgttctgcctacattggggttgggctccaacatgtgaattttgggggtgcataaactttcactctgtaacacctccgttctanctgaatactgttcatcatttatccagagatacatcgccctatttgcaaataggatataatatccaatctatagtggtagatacaaccttttctccaaatcctcatccaaataacattgctgaaacctagatatacctttcccagatcaataaattcggctccagtaggcctttgggtttgtcctcatgactgatcttgcacagcgtctaatgttgtcccctgaatctctttctactcacttaacactgttgatactaactgaatgtgcttaggctgcaccttgaagtcacggaacctcttatcctcttacattacattatttctgcttcg

SEQ ID NO: 657544 - DNA, 301 bp, Homo sapiens
gaggtatccccccctccccgggtcgagactgaccatgaaacaggtcatgcctgatctgccgtggtctaaggcgttctatccatcgacatcgccgtgaagtgtgagagcaatgggcagccggggaacaactacgagaccacgcctcccgtgctggactccgacggctccttcttcctctatagcatgctcaccgtgtactagagcaggtggcagtaggggaacgtcttctcatgctccgtgatgcatgaggctctgtacaaccactacacgcagaagagcctctccctgtaccccgggaggg

SEQ ID NO: 657545 - DNA, 645 bp, Homo sapiens
ctggattattcagactcatcttatattgctaatgacggctgacatctgattcatgtgttgttggacagcgttgatgagaccagctttacgcatttcgagagtttcttcgtactactagaatttatcaatctattgccgatacattcctgcaatagtgtcggttatacttttgcagaggaccgagtatttatactacatacattgaggcttctgcataacctctaatgatgggacagttgtttgaaccaatggtgccactatagctagcgttcacattgttacctagcttggcaccatcacaggtgcttacagatcctcttggtattatgtgcgtcggatgtgattgtcgacgagctgtagtcatgcataactctaatctacacatacctgggtatatgatcagcattatactttatgtctgatactgatgatttacattaatattactcgatggtatgagctacatggaatactgtatcagctagattacagattttgggccatgtgtgctgcatgactggaatgtttaggtctttacacagatatctctattactatgcgtatgctgttgaacccatatgtggcagcacgtagatctgtggtatttgtggagcctatatcgggatcatttccattgccttgtgg

SEQ ID NO: 657546 - DNA, 312 bp, Homo sapiens
atgactggctcatgtggaagtcaagccaaacccaatggcaagaagcccgctgcggaggagaggaaggcctacctggaagcctgagcacaccaaggccaggatcaccgacttccagattcaaggagctggtggtgctgccccgacgagattgaccttaacgagtggctggccagcaacaccacgacgtttttccaccacatcaacctgcagtatagcaccatctcggagttctgcacaggagagccgtgtcagacgatggccgtgtgcaacacaacagtactactggtatgacgagcggggccttgtacgacg

SEQ ID NO: 657547 - DNA, 650 bp, Homo sapiens
gcggccgcccccaggccagcgagccccgctcggcctgactgacagcgaccctccccgcggcgcccccggctcggcccacgcccctccctcgccgcttcctcaccagggatcccccggcctgcccgccggctcctgtccacgaacctgctctttctttacctttcgctctttttacctcgactgccgttgcttttccccagctggggctctcctctcctccccgcctactttttgtccgcgcttcccacttttctcctcctgccccccacccccttccttgcttcttggcctctccccctggaaatcgccccctcaccgtgatccaagcgttaaccgctgccatctcattggtccccagaccattccagggttccagcataaactgggagaagagactcgggaaggcggggaacggaaggtgggcattgccctgggaaactcatgtctgagaagccttttggcagagtattttgcgttggcacggagtcttcacccccacccctccccccgaagctcgcccacccctgaggacgtggccaaggagaggagggcaagggtggctttgcctgcctggaatgttctgtgctcaagtgtgggtggatggagaagatgttaggctgaaataaagactttttaattcaacgaaaaaa

SEQ ID NO: 657548 - DNA, 543 bp, Homo sapiens
  misc_feature (5)..(5): n is a, c, g, or t
  misc_feature (81)..(81): n is a, c, g, or t
  misc_feature (119)..(119): n is a, c, g, or t
  misc_feature (146)..(146): n is a, c, g, or t
  misc_feature (155)..(155): n is a, c, g, or t
  misc_feature (181)..(181): n is a, c, g, or t
  misc_feature (183)..(183): n is a, c, g, or t
  misc_feature (197)..(197): n is a, c, g, or t
  misc_feature (292)..(292): n is a, c, g, or t
  misc_feature (321)..(321): n is a, c, g, or t
  misc_feature (337)..(337): n is a, c, g, or t
  misc_feature (429)..(429): n is a, c, g, or t
  misc_feature (437)..(437): n is a, c, g, or t
  misc_feature (459)..(459): n is a, c, g, or t
  misc_feature (464)..(464): n is a, c, g, or t
  misc_feature (474)..(474): n is a, c, g, or t
  misc_feature (522)..(522): n is a, c, g, or t
gaaangagggggcccctaaacccagaacacaccccaaaaagcattaaccctacaatgcatggaaggagtaggaagagaaangagagggggtttgaagaaggagtggcagaatgaaaaancaagtaagtagaagcagaggcgaagtnatcaatggnaaaccaggagaataaagaaggaaaangnagggaaagggtgcngtaaaaagatctacctgaaaaccccaggaagaggagggggccggcttgcctgtaaatttaatattaaattggggatgggaatagagaggaaaaantaattcaggggatgaatactcagcctctnagcctgtacaagaaangctgaaggcccggggcctcaccagtaaaagcggcgggactatagggaaggggagtactcaggtccctggatggccaggaggggaggcccctncgcccttngtcccccagcccctgaggactnaagcngccgaaactncaggggacgctgctgccggaatcgggaggtctcccgccgccacttgtnatcaaacgctgcggcctcact

SEQ ID NO: 657549 - DNA, 210 bp, Homo sapiens
agatccacagcatccccaggacctcttctcccctctgggtcctgcccccatctcactggctcccatctcagattccctgtgaggctccacgcttggcttcacatgcaaagtctaggggtgaggggcccctcccagcctctcagctgacagtcctgggcctgtggtgagaataaaagccctgtcagaccgcagccggaggagccgcatggc

SEQ ID NO: 657550 - DNA, 478 bp, Homo sapiens
ccaggtgttaaaattcaaggcaatctggaacagggacctattttatacttccttaggagcacttttcaggagtccttttacgctgctttccctgccacgaagcgcttggactgcttactaaagccacgtatcctgattttacagaaacgtgggcaggtccagcagtgccactggagagctcccagagaagcccactcagaaggaagtggtcagaccaccctcgagccagagcggctggaagctggactggtcccatgaggcagaaggagcaccagcgcctgctgggtggtgtggggagagccctcagctgactctggacacacctgcttccggggcacgtggcccagagccgggcctgtggacgggcctttctttcttcttggggtggaccccgtccccacgatccctaaatggccaccccccagacagcccaacaggcagcgagaggcctgcaggcactgaggatgccaacagggct

SEQ ID NO: 657551 - DNA, 647 bp, Homo sapiens
tgcgttaggttggggtgctgatgtggcgctgagtcggcgtgagcgaggatgtggggtcgcgcagcccatgcttgttctgggctgaggctatggggggacgggatgacaagagcgttgtgcgtcatcgcccgctagcgggcagttgcttgggatgttgttcggcttgtgtggcccgggtggtcttgctcctgtggcggtctgcgtggcttcgtgcgtggccctgcgctctggggtgggtgggtgtgggcgtgtcggcgcgggcctgtagggcagtcgtggtcgtcgtggtgcctatgtgtgagcttggcggcctggccggttgggcgtgtagcccgttgtgggtgggtcgcgtttgcagggtggcggcaggagggccgtcttgtgcaggacagggtgtcgggttggtggcccttggaggtttgcgtgggcgcacgcccgggttagcgcgtgggcggagcggcaggtcacccatcgtgccgtgagtgtgagggcgtgccgcatgccgtggactgcctgatggtggcctccgctgacctctggtcccactgggaagactcagccctgcccgccagccaagccagaggcctgtgcagcccacctgggagggctcgtgcagaggcaggcctggactgggctggggccagctt

SEQ ID NO: 657552 - DNA, 289 bp, Homo sapiens
  misc_feature (7)..(7): n is a, c, g, or t
tgctctngtgtgatctagagatccccatctcgactgggtaataatacaaacataagtctccaatagggttgatagatgggtccaatggggttgtgaggagtcaggtatatgtgggaatttaaggtagtgggtgtggagctggaacgcttcctaaatggggggctgctttaaggcctactaggggtgtaaaatttttaactctctctacagggtttttccctagtgtccaaagagcggtccctcttgggactaccagttaattttacatgggggtacccattcgagatat

SEQ ID NO: 657553 - DNA, 240 bp, Homo sapiens
cagcccccacaacgcgcccttcaccccacccccacacccccactttcccacaccctgtgggtaaccctgtggtccttaggaggactacttccccacaagaccagttgaactaaattccattgaactagaagttaagactgccatccaaccactttgggctccttatgcctctgagtcaacaggccaataggggagttatggtgttggctgcggccaactgatccagactaacatggggca

SEQ ID NO: 657554 - DNA, 289 bp, Homo sapiens
  misc_feature (288)..(288): n is a, c, g, or t
aaaaaaaaaaaaaaaaaaacatggtctcccatccagaaccagaacaagagaaactataagccccccaaagtaccaggcatcaatcattgaaaactacaaagagaccagagcaggtctgaacacggagtccttacccatgggcttccgtatgttggctcttcccaggtccttaattagaagagccaaaaagtcttaaatggaaacgttttctaactgtaaaggataaggtcacatcgagtcacttaaagctggctttactgtggggttcatacacacctggctcgaacnc

SEQ ID NO: 657555 - DNA, 231 bp, Homo sapiens
aaaagatatctctgataagagggtctctggaccaagaccgaaggctgctagtggatggccaggaaattgctgtgagtttacttccagggatggctacatgcctcgatcagtacagtctacagaacttgggaagcacgtctactagctggagaggtcacatagctgccaatgtgcccatgacatttgccacccgagctggcatgagacataagaaaggtgcaagcaggagct

SEQ ID NO: 657556 - DNA, 476 bp, Homo sapiens
acaccagacaccttactaaccttgagacgcgagaaacctactggaggctcagaaggcatctagctgataagttgacggagctgtgactgctgtctgccttccgtagcagcatagcctgggcagcatgtcctgaggttacctcactcctttcttcctcttagcactttccccatgcatccctaacatttatctttcccagtttattccaaccgaaactgtatgcagagactccagtgacagtgggatccatatgggactattctcttcacttgaggccaccttggtgtcaaaagcctttgcagtccctcttagctgcttgctgtgtgagccttagctcttgaaatcactccttattcaactttcctttcaatagacctacgagaattttctctttctgctcttctcaattttccagcctctccattccattatttttgacaaaaaaaaaaggcaaagaaaagttacagagccccaaa

SEQ ID NO: 657557 - DNA, 1399 bp, Homo sapiens
tcagattcattttaagggaccttaaccgtgttcgcttaagtttgtgttctaaattagaattacagataaaacgttgacgtgtaagtaccatataatgattttatatttttattaaaaggttttttttagggctggtcaagttgaagcaggtgggagttttagcagggacacaaagaacttcgtgtacctggttgtgactcaatctcgtgtgtaaacaccacgtgcacctcaggccagccgtgattttaaaatattcacacagtccaaattatcttgggggaaattctttgcaagcattagatgtgccagaaatctgaggacttgacacgggattcattttattctaacgacactggggtgtcgctctgtcacccaggctggggtgcagtggtgttgatgatggctcactgcaggctgaagcttctctgtacctaggtgatcctccgtgtctgggcttcctagtgggctgggactcgcggaactgcatcacccatgccaggctgatattatctattattcgaggcacggtcgtaattcccacgtggttttaccccaatggttagatctttcgacacctcttggcggcctaaaacgagagtactaccccaatggtataaagataccacataatactcggagttatcgagatttttagcccatttgcccactgaagcgagagttaacacacatctactgtattaaatcacacaaatatttgtgaatgcccacttttataactctccatacactttggtataagagcgtggctcaatagattgaaatctacctcaacgagactattatcacattttggacacctccgcatctaaattgcacggacaaggcgaccctagtgtccccgaaatatgtacacgcgcgcctcccatgcgataaataaaaagcagacaaacattataaacacacctcaggagacaaaagaataaatgacacgcgcggcgcagatgtacgatagctcagtaagactcgcaagagcatcaaacaaccaaacaaacgacgccgaaaaaggtgcatgcgaatcccgcactgtgcctctggcacgcctgagcactataagcagccgacaccacacaacacacaaccagacaacacgcaacctcgcatagaagcgataatagccagctagatgtagtgaagaacacacggcacagccgccagtaaagactaacacatacggaccgcacacaactacaagatcaacatcaaatgtacaccgaactggagtataagaagcatagcgtagctacagacacagcagtgcgagcaagcacagcacgagctacgcgagtcagcgtgaacatacagacaaacaagacaggtacgagggccacaagagtagcacaaacgacaacataaagagtcagtataacagcaaccacag

SEQ ID NO: 657558 - DNA, 231 bp, Homo sapiens
  misc_feature (51)..(51): n is a, c, g, or t
  misc_feature (67)..(67): n is a, c, g, or t
  misc_feature (106)..(107): n is a, c, g, or t
  misc_feature (113)..(113): n is a, c, g, or t
  misc_feature (117)..(117): n is a, c, g, or t
  misc_feature (128)..(128): n is a, c, g, or t
ccccgctctggacagtcaccgccttcgcctcccacatccgggccagggacncggcgggcagcggggncaagccgggcgctgatactggtcgctgacagcgccaaanngaccancaanatgattttagngtggactaggacccttaacctaaaaaaagtttcccttaatcattcaaatccctatttgaagggtcccggagcgcaaaataaagtttaaaaccctgctccccca

SEQ ID NO: 657559 - DNA, 426 bp, Homo sapiens
gtgctacgagaaactccagattttatcattacgggtagtataagtctatgctgagctcagtacaaaagaacaaaaaacaaacaaaagagcaacaaaaaaggaaacagtacatattactaaagtaaaagactaaagtagagaagtatcatttaaaaaaacagaacatttacaagacaccagttattttgtgccccatatgtcattaaaaaagttactttacctttattattatttccctaggctagtcaagcagcaaaccattaatcggtcggagaaaccttcatgacatatgcccgactggctcttcgccacccacttgaaggacactacccaatcgatggaagcctttaatcgcacagccctccctattagcggactattggcggatgcagacatgttctactcgagcagttaccaaggaccact

SEQ ID NO: 657560 - DNA, 212 bp, Homo sapiens
  misc_feature (51)..(51): n is a, c, g, or t
  misc_feature (67)..(67): n is a, c, g, or t
  misc_feature (106)..(107): n is a, c, g, or t
  misc_feature (113)..(113): n is a, c, g, or t
  misc_feature (117)..(117): n is a, c, g, or t
  misc_feature (128)..(128): n is a, c, g, or t
ccccgctctggacagtcaccgccttcgcctcccacatccgggccagggacncggcgggcagcggggncaagccgggcgctgatactggtcgctgacagcgccaaanngaccancaanatgattttagngtggactaggacacgttaacctacagaagagtttcacttacatcattcaaactcactatgtggtaccgacgctcgcaacttcgt

SEQ ID NO: 657561 - DNA, 845 bp, Homo sapiens
cgtgccagaggcgccctctacaatgggggcattttgacgcgagcaaatgatttcccttttggccgccaagcagatgtcccaatccggagaaccaattgtcggacaacggttattctgggaaaggggagaaacacattcctggatggcgtttcttctgaacaaaatggactggttccagaacgcaccagaatggataagccccagttggaccattgtcggggacttgggcaacaatcacaccttgtactcggcagttttcccccctctgaattccggttatgtttcgcgtcccctcagagcacacctggggaccggtgacaaaggaggtttcagattacatccctcctctgtccccaggccccagacattctccaaggaccaaccagccagcccagaagtggcccagtcagaggtaccagcagcccttttacccatcatctccccgactgcccaatgggggcaagcaagacactctactaaacgccaagtagaggaaatggaagtggatgacttctatgatgggatccaacggctctataatgaagattatgtctcagaaaatgtgggttctgtgtgtggcactgatttatcagacaagagggacatgcttccccctgtccaccctttgcagcctgtttctgtcaagtagtttcaaaccagtgctacccttgagtgtaaactaaggtagactactttggggatgagaacaagccaaatcaggaaggctgtagaaggaatatacctttacacggctgatttggagtgagcccagaaaaaaaaaattaaactttcattatttgtgtggctaattattattcagcgttatttaagcacattaagaccca

SEQ ID NO: 657562 - DNA, 170 bp, Homo sapiens
atgagcctggctcccacctttcgcgggtacgcgattcttccgtcgtcccaccgactgggtcggcgcagcaactggactggtcttcgccacagacgacccggctatcgctgctggcgcagttcgaaggctggcacccggacatcctcgcgctgctgcacgcctcaaacgag

SEQ ID NO: 657563 - DNA, 449 bp, Homo sapiens
gaccggggcaagccatggaacggaaaaggcagacttctaatgcgttccatttataacatgtaatatatatcaaagacttaaaggagattaaagaccaatcagaataatttggcgactttaatgcttaggaagatcaaagttccctccaaacctaatttgatgttttattactaaaagcaaagaccagtatggtacagtattactccagagaaattaaaggaaaatccttagggcggcttcacccacattcattttatgaatggatacctcccctacctcaaaatgctttagggaggtactgctaccattacatggttccttattaaatttgaaaagtgcctgaaagtttgggcaccagaaagacaccccaacaacatgtgtctaaactgcaacttcaggttaatatgactaaagcagttacattgtgagaagggctgaaggtatgtgat

SEQ ID NO: 657564 - DNA, 479 bp, Homo sapiens
  misc_feature (233)..(233): n is a, c, g, or t
  misc_feature (254)..(254): n is a, c, g, or t
  misc_feature (259)..(259): n is a, c, g, or t
  misc_feature (272)..(272): n is a, c, g, or t
  misc_feature (275)..(276): n is a, c, g, or t
  misc_feature (297)..(297): n is a, c, g, or t
  misc_feature (313)..(313): n is a, c, g, or t
gctactcaggcgctggagaaatacaacatagagaaggacattgcggctcatatcaagaaggaatttgacaagaagtacaatcccacctggcattgcatcgtggggaggaacttcggtagttatgtgacacatgaaaccaaacacttcatctacttctacctgggccaagtggccattcttctgttcaaatctggttaaaagcatggactgtgccacacacccatgtatcctcncaaaaacagggatgcagcctnatatnccaaaaaccagantgnnattttccaccctgttaaaggnaactttgcaagtttgnaactttgttgtgttttgtaacaggccattctctgtactagtttgtcgtggttataaaacaattagcagaatagcctacatttgtatttattttctattccatacttctgcccacgttgttttctctcaaaatcccttcctttaaaaaataaatctgatgcaaatgt

SEQ ID NO: 657565 - DNA, 870 bp, Homo sapiens
cagcttcctggaagttcacccgtgtagccccttaccccccatttcgtgactcagttccgtcaatttatggtccaacatggtctaatcattttttgccccttataccgcctcttcctactagccctggtcaattttccacctcttccactcggttatcctttctgcaaattttctcgcaatctaccattggggaaaatactttaaggcctcggctttcatatcgctgtcaattattaccccacactgcattgaattcccgtatgtccctcatgatacttttactccgaataatctcgctcccaggggtatccataactctgggtattcactatttgggaagcttgtattgtagtcccagaactcgggaactttgtgtctgtgtcaaacgtgtgaagcagtagttattatattctatttttacccgttattaattacgggtaaatatgtatgtagaactttttgagcaattccggacagagtacaagtccacatagaagtcgaaccaccgaaatgcaagcactatttgtactttggtggatattcagattcttagttttatcacttttttttaaccagtaagtcattggagcaaatgtactatataaggtgaaaaaggtgctatatatgatcattgtatgagtcatttttagtagttatactataatcagttttccaatgatatgttagcttggatttttttttttatagctatttctttactgtgataaaaaatgcatgtggtaaacacctgctgtgtcacatacattgtcattctgtccagtattctcatattagaaacacaatttattagaatttcttggttaaagtatatacatttagcgtgtaccttccgagcgagtttatgtaata

SEQ ID NO: 657566 - DNA, 114 bp, Homo sapiens
tcgctagagaaagaatcccctttagcctggggggtcaggctgcagtgagctgtggtttgtgccactgtactccaggctgagtgacagagtgagaccccttgtccccaataaaac

SEQ ID NO: 657567 - DNA, 1354 bp, Homo sapiens
  misc_feature (441)..(441): n is a, c, g, or t
  misc_feature (1354)..(1354): n is a, c, g, or t
aggagaatcgcttgaacccaggaggcggaggtcgcagtgagccgagatcatgccagtgcactccagcctgggtaacaagagtgaaactccgtgtcaaaaaaaaaaaaaaaattgttactcatcctctcttgaaagcaaaaaggaaacccttaacagctctgaactcgtggctttaattttttctggctgtatttggggtgaccattggtatgcataaggcattaagtgttaacaaaaaaaaatttttttttgggctaaaaattgcaattcaccagttaaagaaggttccgaaaaaagccttagcccttcttcttcagaagaacccggggaagtgccagaagttacttacttagagaggaacgttgaagagttccgtgatgtgcaacatctcatgtgccctgtgttccaaatgtgaggtctctttgaacacgcggaattgcnccaaaatatataaacacggagttattattttgtatatctctataagatctcttatacagtgtgggtatacaccaatttttatatgtgccgagttttatagaactgtgaaatgtggcacattaattgtctctcctctctgtgggtgttaaaaggtgtgataactctgtggtctgtggataattttgtgtctctcttctgagagacgtgcacatgtgcacgtgtggggtcccatgtgagaaggcgccactctgtgtggcccccaaacgagctgctcccgaggaaaataatctacgcggtgtgttgtggcgccgagagccgtgccttttgttataggagaagaaacgctcatatgtgtgtgtctaccgtggggctccacgacgcgtgtaatgttttgctctctctgttaagagcacatgctagtatcctcctctcctaattttgtgggccccctgtgggcgtcccataatcttccgagacgtgctcttgtcgtccgctccgtgtggtggcggtaataattccctgtttgttgtgctccccctattagatgggcgccccgcattttgatcatcggttgtctcacccccatgttggggcggacacaacactggttgtttttgaccaccccacaagctgttgctgttacaacaccggcggcagggggaatccccccagcgtgatcagagaacctctttgaacggctcgtgaacaaaccagtatcttgttgtacaccgaccacacaaaggcggctgtgatcatcttgcggcagcgcccacactattctcagaggcgggggcccctctttttcccaccgcacatttgtctctttcaaaaacagtcgtcttgtcttacgtgtccgtgacaacgggacgaagacgagactcacaggcggttttggggccccttttgacaactn

SEQ ID NO: 657568 - DNA, 190 bp, Homo sapiens
atcaacgacgactctcattctcaatctcgtctctcgctcctgagtaatttctcatcatcctatcatatccaggtcatcacagcttatttctcaaactcaatctccttatctgtcataccagtgtcatactacattatgctgacgtctaattcattcctccatatatctgagttagatagagcagcagata

SEQ ID NO: 657569 - DNA, 443 bp, Homo sapiens
  misc_feature (64)..(64): n is a, c, g, or t
acggcgctcagataccattgacacccaagataatcatctagtcaggacatacttgagcaagacntagtggataatggtgcacatgatgagtttgcatcacctgactataccttacttacgggacgaggaactgtactgcaacgtggtggagctgaagtacacaggcaatgcaaacgcactcttcatcctccctgatcaagacaagatggaggaagtggaagccatgctgatcccagagaccctgaagcagtggagagactctctagagttcagagagataggtgagctctacctgccaaagttttccatctcgagggactataacctgaacgacatacttctcacgctggacattgaggaagccttcacacgacaggctgagcctgtcagggatcacagggagccggaacctagaagtcctccgagtggtccataaggctgtg

SEQ ID NO: 657570 - DNA, 403 bp, Homo sapiens
  misc_feature (3)..(3): n is a, c, g, or t
  misc_feature (10)..(10): n is a, c, g, or t
  misc_feature (54)..(54): n is a, c, g, or t
  misc_feature (119)..(119): n is a, c, g, or t
  misc_feature (139)..(139): n is a, c, g, or t
  misc_feature (161)..(161): n is a, c, g, or t
  misc_feature (186)..(186): n is a, c, g, or t
  misc_feature (215)..(215): n is a, c, g, or t
  misc_feature (259)..(259): n is a, c, g, or t
  misc_feature (264)..(264): n is a, c, g, or t
  misc_feature (355)..(355): n is a, c, g, or t
  misc_feature (369)..(369): n is a, c, g, or t
aanaagggantgggcttaaatcaggcaggcagggctttgactccttgccaactntgtggccttaggcaggttgtttacctctctgaacctgtttcctcatctgtaaaattggggtaatncctataaaaaggaccgatanaggcccgggggtttgctgtcangcctgtaatcccagcactttggganactgaggcaggtgggtcaccctgtccaanatggtgaaaccacgtctctactaaaattacaaaatcagctggcntggtntcgcacgcctataatcccagctacttgggaggctgaggcaggagaattgcttgaacccaggaggcggaggttgaagtgagctgagattgcnccactgcactccancctgggcaacagagtgagactccgcctcaaaaaa

SEQ ID NO: 657571 - DNA, 1245 bp, Homo sapiens
tccggccttcgcgcagcgcggcagcctgctccgcttgtgcccacgcgcacctaacaacagacgaacttaaccctactgggctgcactgcttgagcaaacggccaagcaagcacttcttctacttcatcgacacgttgttcccagctgcctacacccgctctgacacaagcggacgcgcacacgcacacacgcaactggcgccaaacctctcccactggcctctcctctctgcggccgcgcacagaccaggctcagcgcccccctgcgcactccctccttaccacagccacggccaccactacagcacaaccaaaagcgcccactccactcctggcgcgagcagcgcactacaacctgcactgcgcagctactcctcgcgcagcaaactcgcacaaggcacagactacgactctccttgcgcaaacacacaacaatgcactccttctgctccggccactctcacacgcacacgctaggcaacgcaacacgggccagcacctctcaatttagccatctcactcctccacccacaccagcctaccctacacctgcaccgctacactcacacctcttgcccccacctatgccccctctacctctctactctaccacaccacaccacgcacaacctgactcctcaactgcaccctctccccctctcactgctagctaaccccattccctctctccacactaacgcaactcctccatctacccacccccaagccactctccaggcactcccttgcaatctgcacttggcacccagtcacactcttcctccgcgctctcgcgggcccgctctcccctgcagtctcctgagcccgcaccctgccccgcacctgggccctctgccggcgccctcccaccctcgcacctctacctgggctctgccacgcttctttctccgggacccttcctccaacacctcagcgctccaccccttccccacattttcccgcgcgtccccaagctggcggtctaatttcgctctctgggcctcccttaaccgccccccccgtcctctctccaccacgcgcagctcccctctgcacttctccggccacccccttgtcgcgtctgcagcgcctcaacgctggtgtctccaaaccccgtctcttcgtcgccctcacccggcacctcgcgccgcgcgcccgctcggccgcactccctgtttccacgagaccgtcctctcacccgtgcgccgcccctccggcgcgcgccctccgccccctcttcgcgccc

SEQ ID NO: 657572 - DNA, 946 bp, Homo sapiens
gtatcaacgcagagtgcccattacggccgggggtgcgtcgacgtatgtgacgcgcaagcctggccgtcctccttccctcaagcagcccgaggccatggaggctgaagagacgatggaatgccttcaggagtcccctgaacatcataaaatgatcctcgaccgatggattgaaacagcgagagcaggaccggttaactgtgactatcaccctattttgtcggacgggcaccaccaatttttaggggctcaccaaagggctggttggagcttgctggtagtaagggttctttctacaaatttccttccagggagttttaccccaagaaccatgtgggtgcagatagagggtgtgagtaaaaatggcctttcgcccatttaaaaatggaggttcacttatacgtgcacacttttaatttgatacaaggggaggaagaagggacagccaaagtgattgttgtggaaaagcacgccagagtttcttacaaatatgctagaaaggatatcaaaagggccctttgaaagtcaggaaaacaagagaaaaaacctcagctcctctttaggaggaaaaactacccacggggatcaaattgaggccaacaacaaaaggacgatggccggaaacttccaagtgtctcactggagtctggccatctgcaggaatcagaaccctggtggaactggagggatagaggatggccgacgggcacacttgacgggtggaagatgacgggcccgaaccataagagggaaggtgcttcgcacagacaagccggaaaggttaaatcacaaccacggggcccctgaggagcggccagggggggcgatatacggaggaccggagggacaaaggcgaacaaacggggtccgtgccccaaaagggaataacacccggaggagggtgcaagactgaagggggcgacacgcccctagggggacaacaaccggt

SEQ ID NO: 657573 - DNA, 103 bp, Homo sapiens
ctgtcatttaccgagctacagtagctcgagtggatgctgggaaggggccttttgacactactgcactggattcatgtgagacaaaggtagcaggacactcatg

SEQ ID NO: 657574 - DNA, 211 bp, Homo sapiens
aaacgatatatggaggtcagcacggtgctcacgtgtcgacggaacttgtaccagggaggccatgcaccgaagtggtagaatacacgtacgaccaggctccagctattaacgatattatggaggtacagcacggtgctcacgtagtcgacggaactatgtaccagggaggcatgcaccgcagtagtgcatacacgtacgaactggaggcatg

SEQ ID NO: 657575 - DNA, 646 bp, Homo sapiens
tcaggcaaagcaggtggatcacttgtccaggagcttgaaaccccgtctctactaaaaatacgaaaaaaactagctgggcatggtggcacgcacctgtaataccagctactcaggaggttgaggcacaagaatcacttgaacttggaaggcagaggttgcagtgagctcaaactgtaccactgcactccagcctgggtgatgaagttaagactctgtctcaaaataaaaagaaagaaaaaagaaagaaaaaaaaaagaaaacctatttattaaaataatagctgaaaatggaagtcttccttgaggatttatagtcaaattgtcaaaagtcaaggacatagagaattctaaaaaaaacagcaagaggaaagtatcaagtcacatataagggagcatctattagactagcagcagatttctcagcagaaattccacaggcatggagagaatgggataatatgttcaaagtactgaaggaaaaaacaaatgggcagccaagaatctataagactttatttgtccctcatttctgaaggatagtttacaaattagcaaccaagagtgtgcgacactcttggttggtttgcatttgaaagcacactctcaggtgagttgtctctatccctaaaaccctgggagagggggcc

SEQ ID NO: 657576 - DNA, 1065 bp, Homo sapiens
catggtggtgggcacttgtaatcccacctactggggaggctgaggcaggagaatcgcttgaacccaggaggcggaggctggagtaagcagagattgcaacactgcactccagcatgggtgacaagagcgaaactccgtctcaaaaaaaaaaaggaattaaagggcatttggggttggagttgtgtgtatcctccttagtaacccatcacatcaacgggctaaagaagaaaagtcacgatcaatagatgcagaaaaagcaatttgacaaaattccaacacacatttcatgattaaaaaaaaaaaaaacctctttaacctaagaatggggggaaaattttccttcagctgtgtgtttaaacaacttcttccaaaacttccatacggctaccattcattactcaaatggggtgaaaaccttcaaggcttcccctttgtaaacactcgggaattattacagggatgttccctcttataacccaatctccttgttccaacattctggggaaagtcttaaggatcaagtgctgcaccacgtggaacgttccatagcctaacgggcagttgacaccccgagacaacgggcacattaaacggggtaataccagcgttgcagcacgacattaaacgagcggtgtgcccaactttgtgcaactggtggataaattcccgagtgctatgaagagttccgcaaattttgtgagaccaaattatctcccagagaaaatgagggccacagttcacgaggcaaggtttttaccaagggagcagacgaggaattctgacctttattcacgaagaaatttctccgaagcaccaacttttttccccccaaggaaatacactgtggaccgatgtgaacacacagagtgtggaaactctttggtggagaagatctcgagacagatgacaccatgatcaccaccatttaacgacgtgcggcagacacccccaaaaaacaacgggaaaaattaccaatgtagggggggcgtgtataaggtccaacaaacacaacaattgtttcgttccacagggggggcaacacgtgtgaagggaagaaacatacat

SEQ ID NO: 657577 - DNA, 731 bp, Homo sapiens
  misc_feature (15)..(15): n is a, c, g, or t
catcgaattcctttngctcggaaagcgcgccatggtgtgggaacccggaaattcggccattatggccgggggggaaaaaaaaaaaaaaaaaaaatttaaaaaccaggtgggccgcttgggccaagccgattttagattggggcaggttaaggcaggcggccgaatttggggctaattgggccaattggccttatggggggccgaataacatttaatggcccgcggtttaacaaggtggggacgggaaaaccctgggggttcccaaattaaatggcttggaagaaaatccccttttggccagttggggaaataccgaaagggcccgaacggatggcctttccaaacagtggcgaagcctgaagggcaaagggaaatggaaggggttaaaatttggtaaaaatccgggttaaattttggtaaaatcagttaatttttaacccaatgggccgaaatgggaaaaatccttaataaatcaaaggattggcccgggataggtttgagggttgttccagttgggaccaggagcccatttttaaggaccgtggattcaacggtaaagggccgacggtttataaggccgaggccccattacgtgaccctataccttaaataggtttttggggcccgggggcccaaaggccttaatgggacccctaagggaggcccccgatttaaaggcttgcggggaaaggccgctaaaggtggcaaagaagggcgggagggccgggccg

SEQ ID NO: 657578 - DNA, 735 bp, Homo sapiens
  misc_feature (420)..(420): n is a, c, g, or t
  misc_feature (514)..(514): n is a, c, g, or t
  misc_feature (605)..(605): n is a, c, g, or t
  misc_feature (649)..(649): n is a, c, g, or t
  misc_feature (655)..(655): n is a, c, g, or t
  misc_feature (666)..(667): n is a, c, g, or t
  misc_feature (677)..(677): n is a, c, g, or t
  misc_feature (692)..(692): n is a, c, g, or t
  misc_feature (700)..(700): n is a, c, g, or t
  misc_feature (702)..(702): n is a, c, g, or t
  misc_feature (704)..(704): n is a, c, g, or t
  misc_feature (720)..(720): n is a, c, g, or t
gcaataaagttttttggtgcacgggaatgaagacatttggtctccaacaaaccccggggagtcagtacagttaaggcgtccccaaataagctcagaagcaagggcactgatttttagggctttccctaaagaaagactgtttttttttgtacagtttcaatgcccatggaatagcaaaatgggctgataacctttttttaggctaagaggagccttgcttttcaggggtatatttaccttttaaagaaatctggctttataaagatgtttttgtaaacttaaaaataaggtaaaggaacaagggttttttttttttgagaagggtcccgcaaccctgttgtagtttgccccgacttttatgcaaaattccctttaaaaaaaaaaaaaaaaggggttaaaagttttttaaagcttttgggnaaaaggattccccaaattttccctttttagggccctgaggggcccccccattttgagggcccccttgggggactcctaaaaaacagttggcaanttagcccattgccccccccgggttgataattaaaaaaaaatgggaaaacacccccctgtaaggtttttaaaaattttttttttaagggtcnggccgggggttccccaaggaattttttaagttttgcccaaaaangggggnttcctttcagnnggggggtaanggaaaccccttaatnataagttnananccttaaaaaggggggnggcttttccttttta

SEQ ID NO: 657579 - DNA, 1092 bp, Homo sapiens
  misc_feature (207)..(207): n is a, c, g, or t
  misc_feature (266)..(266): n is a, c, g, or t
  misc_feature (288)..(288): n is a, c, g, or t
  misc_feature (293)..(293): n is a, c, g, or t
  misc_feature (297)..(297): n is a, c, g, or t
  misc_feature (308)..(308): n is a, c, g, or t
  misc_feature (362)..(362): n is a, c, g, or t
ggctcttcctccggggccgctggcactgcggccgctccgcaggagagaagccgggagcgggcgaggcggcggcggcagcagcgatggcaggaatagagttggagcggtgccagcagcaggcgaacgaggtgacggaaattatgcgtaacaacttcggcaaggtcctggagcgtggtgtgaagctggccgaactgcagcagcgttcanaccaactcctggatatgagctcaaccttcaacaagactacacagaacctggcccagaanaagtgctgggagaacatccgtntaccnggantctgcgtgggngctggtggtggttggtgtcctgctcatcatcctgattgtgctgctggtcgtctntctcctaccgtcagcagcagctgaccacgcagctacgctgccccaccggacccagcgcactgcacggcacttgccctcagcggccctgggcacctcgacccccagcctggctcctgaccgcgcgaccggccaacactggcctgcacctggccgacttctggctctccagcaggacctcgacgctgttccgctctcccttgacccacccccacgtgactgcccctcgggccagcccccaccatgtggccaccccctgcattttccctgctcctgccacagactggccccttgaccgggcagcatgctgctcactgcccactgcctggcgcccagccccacctggcagctccgccacacctgctgctccgcattaacacacaccccacacacaaaccccacaccacaaccaccatactccgcgccccacccgccctcaacaaaacccctcaacacaccaccatggagggcgacagcgacgcgcccgcacaaacgatgtccaatccccatcccagggtgcactcagacgagacaccccaagacaggagacacacgaccgccaccacacgatggacgcgagcaatctctcccaccacgatcaacataacgccccgcggagcaacacgcagcgtccttcgcacacaccacacaccacgagctcctagcgagagacccagaggcgaccacatcgcacaccgccgcactcgtgatagtgagccaacgccgtcagcaa

SEQ ID NO: 657580 - DNA, 474 bp, Homo sapiens
  misc_feature (207)..(207): n is a, c, g, or t
  misc_feature (266)..(266): n is a, c, g, or t
  misc_feature (288)..(288): n is a, c, g, or t
  misc_feature (293)..(293): n is a, c, g, or t
  misc_feature (297)..(297): n is a, c, g, or t
  misc_feature (308)..(308): n is a, c, g, or t
  misc_feature (362)..(362): n is a, c, g, or t
  misc_feature (464)..(464): n is a, c, g, or t
  misc_feature (468)..(468): n is a, c, g, or t
ggctcttcctccggggccgctggcactgcggccgctccgcaggagagaagccgggagcgggcgaggcggcggcggcagcagcgatggcaggaatagagttggagcggtgccagcagcaggcgaacgaggtgacggaaattatgcgtaacaacttcggcaaggtcctggagcgtggtgtgaagctggccgaactgcagcagcgttcanaccaactcctggatatgagctcaaccttcaacaagactacacagaacctggcccagaanaagtgctgggagaacatccgtntaccnggantctgcgtgggngctggtggtggttggtgtcctgctcatcatcctgattgtgctgctggtcgtctntctccctcagagccatgacagcagtaatgccccaaggaccccaggatgcaggcaattgcctcagggcttgggaattgaacccaactgttctggaaggagaancctngctggc

SEQ ID NO: 657581 - DNA, 127 bp, Homo sapiens
agtcggtaccagatcccctttcatccccactgggtgtacagtgcattatggcaaggaaagtgtcataatttgatactgtatctgttttccttcaaagtatagagctttgggggatggaaagggggat

SEQ ID NO: 657582 - DNA, 850 bp, Homo sapiens
ggcttgtcctggctctggaattttgggatcgcagcgggagcgggatgccgtgatctgctgatgcgcgggcagagctggggctgctgctggtgccgggcgagcgtgaccagtgcgtggagccatggaccgctagggcccggcctatccccgcgatgccgccggctgagtggccccagcgtcctcgcgcggctgttgccgctgctgtggtgctgctgctctggaggcgcctccctggtgctccctggctaagtcgccggcctgtgagccccccgagcccgcagggagcatccgtgatccaatggtgcgatggttgtattgttgaggcgggggagcttggtgccccgtgtgcccgtgggcctcagtggcatcgttgttttgggaaccggactcttgctggcaggcttggcaccacatgactcaggagggtgtggccacgcctgcccctcagttatcgcttgggcaccttgggttgctggtcacgtgctgcccgccctggcttcctcaccaagctctgtgccctggcgtgtttgacgaatgcttgcccttgtatgcggtctgtcaggccctctacctgctccctgagcggcggcacgctcatcctctatgaggacctggtgcacgattctcctaggcgtctccctggtgcccgtcccgagccttggtgcagttccagcgccggggcttgcccgcctggctgtcagctccaacctacatgccagctcttgggctgtcacttacgccttgccagaaccccagcaggaacttgcagggactttccctgccttcctgggcacatgaggccatccaagctcagggaaatgggatccttgactggagcctgattgcccat

SEQ ID NO: 657583 - DNA, 818 bp, Homo sapiens
  misc_feature (5)..(5): n is a, c, g, or t
  misc_feature (268)..(268): n is a, c, g, or t
  misc_feature (303)..(303): n is a, c, g, or t
  misc_feature (335)..(335): n is a, c, g, or t
  misc_feature (347)..(347): n is a, c, g, or t
  misc_feature (355)..(355): n is a, c, g, or t
  misc_feature (411)..(411): n is a, c, g, or t
  misc_feature (418)..(418): n is a, c, g, or t
  misc_feature (425)..(425): n is a, c, g, or t
  misc_feature (452)..(452): n is a, c, g, or t
  misc_feature (649)..(649): n is a, c, g, or t
  misc_feature (776)..(776): n is a, c, g, or t
atggnggtttcttcaattggtgtgtagtcctcaataattatatatgaaattgctgtcaaaccagtaagactgcatttatacatccatcattttcaggattgttggtaacctgggcatattttccccaaataactttgcctccttgtgtcacaaggcccaattcgctcacatttacttcaatgacagtacctttggtaataacacccaaagttgtatacagtggggatgagggattcttctttacaccaagtattggtaggcataaggnggctttcagttcaggatgtgttacatgggctttcntgaaacgcaagcccattggcctgatgaatctntcatatttaggnggttttcntgtaaagccatctccaacaaagcacactttagtaaccattctcttccatgccttcntctttcnctttccngttcgaataacttttaatacttcggtntcgcccggggcacgtactttaggcagagggacttcccattttcccgccggcgcggtgcggggcggtgtaatcatattggaaaggactttagcgcgagagtgtcccgcgcggtccagcagagaggcagggacgggcccggggggggcggtgcagcattcggttggttggtggggcgcttttcatgcatcttgatagtntttttcatttgtattttctcagcatgacgctgtttatggtaaagcttagccttcagaccaatcattttctttgccttctttgaacgttcatgagcctctcgactttccttctttctctttttctcanggtaatccaaacggtatccatagcgtttacggtgtaattcaa

SEQ ID NO: 657584 - DNA, 251 bp, Homo sapiens
agtaaagactaattaacatgtcacactccagaatcagtcatttctagttgtgaattccatctctgtcccttagttcctgtgtgagtttattaactgtggtaggacaactaagcctgtctcagctgcaaaatgtaaatgttagtacctacctaagagaggtttaatgaaggttaaatgagataagtatgccaagtccttaagtgtagtcccatgcgcatatgaaatgctctattgttagctgtaattatctt

SEQ ID NO: 657585 - DNA, 358 bp, Homo sapiens
  misc_feature (2)..(2): n is a, c, g, or t
  misc_feature (36)..(36): n is a, c, g, or t
  misc_feature (97)..(97): n is a, c, g, or t
  misc_feature (272)..(272): n is a, c, g, or t
  misc_feature (334)..(334): n is a, c, g, or t
  misc_feature (358)..(358): n is a, c, g, or t
gntcgacctcagaaacaggatcccacccactctganggaatggaagagtgctgacaatattttcttgagcacaaagaagggtgaagaaaatattgantagcactcttccattccctcagaaaccaggattcccaccccactctgacatagctgttccacacaagaaaactaacatgtaaaccctaaacaaagagagtttgatgccaagggttactttttctctttattctgtaatatatttatacacttttgctcaatatcaaaagttttgnagtcattataaataaatccagaaatatgtgctttatagcctccatatgagcaaataccaggncagaactgaccaaatgcacaaacn

SEQ ID NO: 657586 - DNA, 605 bp, Homo sapiens
  misc_feature (19)..(19): n is a, c, g, or t
  misc_feature (123)..(123): n is a, c, g, or t
  misc_feature (168)..(168): n is a, c, g, or t
  misc_feature (207)..(207): n is a, c, g, or t
  misc_feature (218)..(220): n is a, c, g, or t
  misc_feature (274)..(274): n is a, c, g, or t
  misc_feature (283)..(283): n is a, c, g, or t
  misc_feature (327)..(327): n is a, c, g, or t
  misc_feature (344)..(344): n is a, c, g, or t
  misc_feature (387)..(387): n is a, c, g, or t
  misc_feature (391)..(391): n is a, c, g, or t
  misc_feature (393)..(393): n is a, c, g, or t
  misc_feature (400)..(400): n is a, c, g, or t
  misc_feature (465)..(465): n is a, c, g, or t
  misc_feature (483)..(483): n is a, c, g, or t
  misc_feature (551)..(551): n is a, c, g, or t
  misc_feature (571)..(571): n is a, c, g, or t
  misc_feature (577)..(577): n is a, c, g, or t
tagcacgtcattctaacantttaatcatggaattcttcaaatttgctctgttaacaaattgaagactttcaatcaaatatgtaacattgctgaaatgaagaaatatttccagtataaattggnctgaactgataaatcaatgctttctcctcttcagattcagatttnaaatgatggttgtttttccgggcttcattaacaaaaaantctgctaaatnnnatgcggttttcacagcattaggtgcatgggaaatgcgcatccaaattcttccantcataaggngctttctctggatgccactgggcaccatggactggatacttatntccttccgattgttganataaagctcaatcttgccatctgtatttgtagttaagacattnaaananttctttnacttttcattcattgtaaaattcttcacggagaggctccacttatgggaattggcagtgagaggntctactgctagtgacagngacaactcaggggaaagttctgggcattctgctgtgcaattgacctccagtgaagttcagcggcattnccacgtcaacagtatctgtngcagtnaataagcactctccactaatcagcagtg

SEQ ID NO: 657587 - DNA, 401 bp, Homo sapiens
agggcctggagtaggcggtgcgtacggttttcccaggcccggccaagggctgggcagggattccaggtgggcccaacaagcttctggggttccggccacctggggaaaccgcgcctgccaaggaggcccccaaagggcagtgcagggttttgcctgggccccaggccctgcctgtgtttaaaactttggggactgggccaaggaagctcctcctcagcttttaactgtgggtgccacccatgggggtttccttccgcctttcaagatccccccagcctgaaggggcgcttaccatcccctttgccctgcagagccaaccgccaaggttgacctcaggtttggagccccctttggatgaactgcccccagcccccgccccattaaagacccggaagcctgga

SEQ ID NO: 657588 - DNA, 1768 bp, Homo sapiens
ggcagcgtggtctgtgacagccacacagtgtccagatacgagggtacgagatggctgctttacagaactctggtgacagataactgtccttatacttactcagctacactggacgacatatatgcggatcctgctctcttattgcaactcacaactcgcaagacaactgaaaacgtgacacttgcatgacggtggcctctcacaagggaaatacgaaattcatggctccacactgctcatggtgcactgcacggcacaactggcactccacgcgcccactccgcaaccgcctactccaaacagcgacagcaagccacccaacgcgcacgggccccccccgcagccaccacccaacacacagataacactgcgcacaggcgcagccaaccttatccaggcaactcctggagatctcccaaactccctcaacaccaagaaccaccctacaccctaaccaccagcgaaccccaacacacctgaaatcgcactgcaccgaatgaacactggcgaaacccccccttgaccacacaccccgccccagcgagcgcactgcatgcaccctccaatgaccctaacacatcggcccccaaccccctgaccatgctccgcaacgccactgcacccactatcgctcccccccaccagctggctccccataccccacccaatatcccactcctacagcacgcacacccacccacctacacaagcgaaaacccccccaggcaacatacggcgcacgcagcacaaccacaggaggaggcactcggccacacccacagccagccacagggcactcacaacccggccgcccacggacccattccatcacgacgcacaacgcggaaaccccacgccgacgccccacccacaacctccacaggcacctccacaacccaccgcacacccaacacgcccccacctcacccacgccgccccaaaacaggcccccacacaaccacacataacacctaacgacacaacgtcccacccacccggacccaacacggacacccaccacacgccccagcacaaagcaacccagacccacaccccgacaacgcacaacatacccaccaggacactagcccaagcctggcgcaaccctaagccatcagcacggcacaagacacaccttctcgacccacagccgcacggcaacactcgccttgcaacacgccctatgcaccagcaccacaacacgacacacaccctgccacaccccaacgagagcgaccatccacccaccgtaagccaaccaagcacagccaccacgagaacacgaacgaagggccacaccaccacagacctgcgacacccccaacaagcccggccctcatcccaccaccgacgccacgaccggcagcgccccacccaaccgacgaaccctggcacccgaaagcaccgcgcacacatcgaaacccccgccacaccacgccgcctgccgcgacacgacacaacgagcaacgaccaccccgacaccaactacacgggcaaacccacccacacacccgaaccaccacgacaccagaaacgcccactcacgacccaccgccaccgcacctgcgggcacccacgcccacccgctagcgcgcccccgaccacccgacccccctacggaagcaagcgcagacacaagaacaggacaacacactcgcaccgcccccaaacaaacgacacacaacaccagaccacacccaccagacgcgcccccaccacacagacgacgacccactcgcccaccgccacaaccccacacgcaaaaccg

SEQ ID NO: 657589 - DNA, 365 bp, Homo sapiens
  misc_feature (30)..(30): n is a, c, g, or t
cagggaaccaagcagcctttggtccagtgntgctccttggaacagttgagtgtggcccccaaccattttcctgggtagctcagtcataaaaccccgaatgcctccctcaaaatagcctttgagggaagggagctgttgacaagtgaagcccccaggttgtgtgggattccaccaggttattacagcttgtggggggagggagggtccattcccccagctttgaatcccagggtcccctcagcttcattgggccccagtgtttgtccccggaaaaagcaaatggccagtgaggatgatggaaagacccccgcccccctgtctaaaacctgggatcttaaaagggttattttggcttttatttttta

SEQ ID NO: 657590 - DNA, 257 bp, Homo sapiens
cccccccccttctcgggtgtctagaggatctcccgccgtacagttgcggccggctgtgatagagctggacttgaaccaggttctctagtggcacagctaccactgtgattcagtgccttagaccatcacaccactcgggggtcccgaacgaaaaggcatttttaaacaaatgaccctgctatacaatgcattcgaaacgtgtgcttcccaaagagataaatatgcccgctcacgcaactggtacggcggggggtacc

SEQ ID NO: 657591 - DNA, 516 bp, Homo sapiens
gagtgtaatatgcaattggtgtgatcacgggtcaccgcaggttccagcctcccggttcacgccattctcctgcctcagcctcccaagtaggctgggattacaggcgtctgccaccacgcccaggtaatattatgtatttttagtagtgacagggttacaccatgtaggccaggctggtctcgaactcctgacctagtgatccacctgcctcggtctcccaaagggctgagcttccaggcgtgagccaccacacctgtcctatttattaataaatgaagagacaaagtctcactctgtagcccaggctgaagtgcagtgacacaatctcagctcactgcaacctccacctcctgggtacaagcgataatcttgcctcagtctcctgagtagctgggataacaggtgtatgccagcacacccggctaattaaagtataagaagtagagatggggtagcaccatgtaggccaggttggacttgaactcctgagcttgtgatctgcctgcctcagcctcc

SEQ ID NO: 657592 - DNA, 105 bp, Homo sapiens
tacttacttacatacatttaaattttgagcatcatctcggtccattaactcacgctgcactcagtcagagttacaattcatttcgcggtaggattatgaaggacg

SEQ ID NO: 657593 - DNA, 503 bp, Homo sapiens
  misc_feature (6)..(6): n is a, c, g, or t
  misc_feature (8)..(8): n is a, c, g, or t
  misc_feature (15)..(16): n is a, c, g, or t
  misc_feature (484)..(484): n is a, c, g, or t
cgcggntngccagtnncggccgaatcgaactcgctgctgaacggctccgagccgatgatggtcggaaagcacaggatctcggcgcccatcagcgcgaggctgcgcgccgtctccgggtaccactggtcccagcagatgccgatgccgatccgcccgaaacgcgtatcccacaccctgaagccggtgtcgcccggcgtgaaatagaacttctccgtatagcccggaccgtccggaatatgtgtcttgcggtagacgccgagcacgcgtccgtccgcgtccgccacggcgatcgagttgtacgcggcattgcccgcgcgctcgaagaagccgatcggcagcacgatgccgagcctcgccggccagcgccgcgaaccgggcgatctgcgcgttgccttcgaacggctgcgcgagttcgagatggcgcacgttctggtcgaggcagaagtacggcatcgcgaacagctccgggcacagcacgagattngcccctgcgcagcggccgc

SEQ ID NO: 657594 - DNA, 82 bp, Homo sapiens
gcacgagatagaattgattcaaaacatacccctacagaaaatcagcaaacaaaaaaggaagacagcaagagagagaggaaga

SEQ ID NO: 657595 - DNA, 877 bp, Homo sapiens
  misc_feature (743)..(743): n is a, c, g, or t
  misc_feature (750)..(750): n is a, c, g, or t
  misc_feature (815)..(815): n is a, c, g, or t
ggcagaactctgctggcagctgagaggggaagccggaaagaggcaagttcctggtgcaaaggtggctctgcagcataatttaggcattggaggagctgtggttgtaacactctacaagatgggttttccggaagccgccagttcttttagaactcatcaaattgaagctgttccaaccagctctgcaaggtgatggatttaaggcaaatcttgttttcaaggagattgagaagaaacttgaagaggaaggggaacagtttgtgaagaaaatcggtggtattttgccttcaaggtgaaagatggccctgggggtaaagaggccacctgggtggtggatgtgaagaatggcaaaggatcagtgcttcctaactcagataagaaggctgactgcacaatcacaatggtgactcagacttcctggctttaatgactggtaaaatgaatcctcagtcggccttctttcaaggcaaattgaaaatcactggcaacatgggtctcgctatgaagttacaaaatcttcagcttcagccaggcaacgctaagctctgaagaactccctttggctactttgtgaaacatcaagatgagatatatagatatatatccatacattttattggtcagaattttagactgaaactacacatgggcaaatagcgtgggatagatttgttcctaatgggtgtgaccaatcctggtttcctatgcctcggggtgaatagagcctgatggtatacaatggnttggcgnattggtacaactggggcttacaaggtaaatgggaaaatggcgggggaaagggttccgaaaaaatnggacaggtaatccaagcatttttaaaaaacttgtttgggaaagagtttagggatttgggaaa

SEQ ID NO: 657596 - DNA, 953 bp, Homo sapiens
ggcagaactctgctggcagctgagaggggaagccggaaagaggcaagttcctggtgcaaaggtggctctgcagcataatttaggcattggaggagctgtggttgtaacactctacaagatgggttttccggaagccgccagttcttttagaactcatcaaattgaagctgttccaaccagctctgcaaggtgatggatttaaggcaaatcttgttttcaaggagattgagaagaaacttgaagagagaaggctgactgcacaatcacaatggtgactcagacttcctggctttaatgactggtaaaatgaatcctcagtcggccttctttcaaggcaaattgaaaatcactggcaacatgggtctcgctatgaagttacaaaatcttcagcttcagccaggcaacgctaagctctgaagaactccctttggctactttgtgaaacatcaagatgagatatatagatatatatccatacattttattggtcagaattttagactgaaactacacatgggcaaatagcgtgggatagatttgttcctaatgggtgtgaccaatcctggtttcctatgcctcggggtgaatagagcctgatggtatactaactgcttgtgggggaatgtgcatacaatgtgtgcattacaaagttaatatgggtacattatggtccggggtaacacatcggagtttcagaataaaattaggaacagtaaaatccaaagaattatgtaaacaaaaaagcttggttgagcttacaaagtcatattcaaggattattctgctgaagattcagtcttaagagttttcctgtgggagaactaagtacagaaacacaatgccaacagctggccagtaattaggtgttgtgcacttcatggtcattaatccactttctcaatagttcttaaaatcagtgaagattaaaaactctaaaaatttctgcatttcct

SEQ ID NO: 657597 - DNA, 151 bp, Homo sapiens
agaggattatcctacccccgtcctcattcgagaccccagtcgatgatgtggaggaagagcccacctgcaagatggacacgagccacaagctgaactgtgaaccaaggcacatccgcgcagataccacaggcctagtgagtctcagaaggga

SEQ ID NO: 657598 - DNA, 1085 bp, Homo sapiens
ggcagaactctgctggcagctgagaggggaagccggaaagaggcaagttcctggtgcaaaggtggctctgcagcataatttaggcattggaggagctgtggttgtaacactctacaagatgggttttccggaagccgccagttcttttagaactcatcaaattgaagctgttccaaccagctctgcaaggtgatggatttaaggcaaatcttgttttcaaggagattgagaagaaacttgaagaggaaggggaacagtttgtgaagaaaatcggtggtattttgccttcaaggtgaaagatggccctgggggtaaagaggccacctgggtggtggatgtgaagaatggcaaaggatcagtgcttcctaactcagataagaaggctgactgcacaatcacaatggtgactcagacttcctggctttaatgactggtaaaatgaatcctcagtcggccttctttcaaggcaaattgaaaatcactggcaacatgggtctcgctatgaagttacaaaatcttcagcttcagccaggcaacgctaagctctgaagaactccctttggctactttgtgaaacatcaagatgagatatatagatatatatccatacattttattggtcagaattttagactgaaactacacatgggcaaatagcgtgggatagatttgttcctaatgggtgtgaccaatcctggtttcctatgcctcggggtgaatagagcctgatggtatactaactgcttgtgggggaatgtgcatacaatgtgtgcattacaaagttaatatgggtacattatggtccggggtaacacatcggagtttcagaataaaattaggaacagtaaaatccaaagaattatgtaaacaaaaaagcttggttgagcttacaaagtcatattcaaggattattctgctgaagattcagtcttaagagttttcctgtgggagaactaagtacagaaacacaatgccaacagctggccagtaattaggtgttgtgcacttcatggtcattaatccactttctcaatagttcttaaaatcagtgaagattaaaaactctaaaaatttctgcatttcct

SEQ ID NO: 657599 - DNA, 421 bp, Homo sapiens
ggcacgagcatcttacgaggtcaggttttggggtatttttggttggttttttttggaggcgtaatctcactcggtcacctaggcgggagtgcaggggcatgatctcggcttacggcaacctccaccttccaggttcaaatgattctcacacctcatcttcctgagtagcggggattacaggcacctgccaccacgcctagccaattttggtatttttagtagagatggggtttcaccatgctgggccaggcgggtctcgaactcccgacttcaagtgatcctcccacctgggcctcccaaagggcggggattacaggcactcgccaccacgcccagctaatttttctatcttaagtagagatggggtttcgccatgtgggccaggcgggtctcgaactccggacctcaggtgatccaccgg

SEQ ID NO: 657600 - DNA, 318 bp, Homo sapiens
ccactccatcctgggcaataagagctcctgagcatcagttatctcccacctcagcctcctaagtagcttggactacaggtacgcgtcacagcccccagctagttgcagtactttttttttttttttaaaaaaacggggtctcactctgttgcctggactgaaaagccgtggtgcagtcccggttcactgcagtcttgacctcttggcctcaagtgatcttcccaccccagcttcctgagtagctgggactacaggtttgcgccaccatgcctggctaattttttcatagagactgggttttgccatattgccccggtt

SEQ ID NO: 657601 - DNA, 185 bp, Homo sapiens
agatccctggagtgcatggcttgacacagctcaggctcaaactgatccttccacctcagcctcccaagtagctgggaacacaggcacgtgccaccacgcctggctgatttttttttttttttttttttttggaggagacgggtttccccctttttccccaaggggggtccaaaaccctggggccg

SEQ ID NO: 657602 - DNA, 292 bp, Homo sapiens
  misc_feature (231)..(231): n is a, c, g, or t
gccctaccagaaagggaggtttgttatcattgcttcctatgaggctctactactctaccctcatttcatttcaacaaagggcagcgacctgttccaatggctggcttggaggcaggaggagcggggtctctaattagtgctgattgttgggactgattgagcctgtatagcatgtctcctactcacgaagcctcatggtgctgggctctggctggctcactgccttgtaanttcgtagcacgtttgggtaggccgagctcaggcagcacttggtagcaggtcctgccctttt

SEQ ID NO: 657603 - DNA, 413 bp, Homo sapiens
gctcgacctgtgatccaccttctcttctccacgcgactgctacttccagtcaagcacaggtattaagacaactgctcaccttgctgttctctgcttccttcaagccgcaagtttatgttttaaaaacatgaatcctagtcgggtgcgatactcacgcctgtaatcccagcactttgggaggctgaggcaggcggatcacgagatcaggagattgaaaccaccctggccaacatggtgaaacccgtctctcctaaaacacaaaaaatgagctgggcgtggtgatgcgcgcctgtaaacccagctactcagaaggctgaggcagggtaatcgtttgaaccggggaggtggaggttgcagtgagccaagatcgcgccactgcactccagcctggcgacagagcgagactccatctc

SEQ ID NO: 657604 - DNA, 108 bp, Homo sapiens
cgatacgctcatagaccgggtgtgctctttacgctgttgttacgtgctcgtcgggtttcgggggtcttcgcttgggtctccttgcggtctaggagcgtactcggggct

SEQ ID NO: 657605 - DNA, 429 bp, Homo sapiens
aaagtgagctcacagtaagcacagagtttgcatacgcaagatcatctacacgtatcatagtccaccgacgttgttctaaatgagcgttagggtaaacgacatatcctcgagcagttggataccgtagactgctgcttgaccaacgtatgatctagcatgacggttcacatataggctgcaattgtacggctctcaaagtatgatgacatggcttctgagattggccatgaccgccaggagtcattctggattcattagacagcataggcctagtcgtgacccactagagctgatgcggcagtaacataagatcttcattctcagcacacatcacgcgcagtcaccctgaataaactgtacgcataactatggccgataatgagacgtatctgtaaatagagttagcatctccgctaagctattattcat

SEQ ID NO: 657606 - DNA, 221 bp, Homo sapiens
acatgagaaatcaactgatgagtggcttggatatgtacatctctggtttaagtggacatcataatatgtatctacaggagtccattaaactaggaaattcaatctgaacagcacttgcaagcactttttcttctcctgttaagcagttatagcagcttgtttccattcaacaagacttcttcctcactagttttcaacaagtcgaaggtgtctgttctcgc

SEQ ID NO: 657607 - DNA, 360 bp, Homo sapiens
  misc_feature (8)..(8): n is a, c, g, or t
gaatctcngggacaaagcaaaagtaatgttaagagggaaacttatggtgcctaaacagcccacatcaaaagttagaaagatttaaaattaataacataacatcagacctaggggaactgcagaaacaacagcaaagtatctcaacttcaaagctagcagaagacaaaaaataaccaaaatcagaactgaaggaactggggacacacaaaccataaaaaaaaatcaacaaaattaggaatttgttttttgagagaataaataagatggacaaacaagtagctacactaataaaaaagaaagactatccaaataaacacaatcagaaatggtaaatgggacattaccactgagctaacagga

SEQ ID NO: 657608 - DNA, 614 bp, Homo sapiens
taggacttataaaagaggtcgaagggagcactcgttctgcccttccacctcttctgccataggaggacacctagatggtacgatctatgagggaggggccttcgcgggacactgaatctgctggacctggatctgggaatgcccagcctccaaaactatgagaaatttcggtggtttataaattaccaagttacggtagttggttatagcagcagacatagactaagacaggagggaaaggagggtgtggctttgggcttaagaagacatgtggagtttaaaaggagggtggaacatcccagaggaagtgtctagttggtagttagagaataaagcaagcaagcaaagaaataaacaagtctgggaacggagtgtaggacatggctggtcagaacgggcggtgagatattcattgggagtaattagtcgggtaataataagggaatacatcagacggagttccatgagaaagaaaaatcaaactataaaaaagagcccagaattacggatcatgacttagaaattactcacacttttctcccaaggatggggtcctggatctggacggggggctcaccaagttcatcctcaactcctaaatctttcaaaggtgc

SEQ ID NO: 657609 - DNA, 1158 bp, Homo sapiens
  misc_feature (146)..(146): n is a, c, g, or t
  misc_feature (243)..(243): n is a, c, g, or t
  misc_feature (257)..(257): n is a, c, g, or t
  misc_feature (271)..(271): n is a, c, g, or t
  misc_feature (273)..(273): n is a, c, g, or t
  misc_feature (292)..(293): n is a, c, g, or t
  misc_feature (297)..(297): n is a, c, g, or t
  misc_feature (332)..(332): n is a, c, g, or t
  misc_feature (335)..(335): n is a, c, g, or t
  misc_feature (339)..(339): n is a, c, g, or t
  misc_feature (344)..(344): n is a, c, g, or t
  misc_feature (356)..(356): n is a, c, g, or t
  misc_feature (358)..(359): n is a, c, g, or t
  misc_feature (363)..(363): n is a, c, g, or t
ggatttgttttttttggcaaagttaccggggccaccagatggtgcaaagttcttacatccagccaaaaaaaggcttaagtaaacttcaacagccatttggatttccatgaaacagacctatcagtgagatgcagagcttgaaggancagttttccatagacttaagcacgtggtgaagcaaagtttacacttgcaggattagaagaggttgaccgaaagaaggaaggacatggacagctatgntgttgggagccgtnttatagtctaaccntnagtcaagtggtttgttggnnaganagagcttttgcctttattaagggaaggcccggacncanacancctcnaggcatttgttntnncctntcagtatcctttctcttaattatctcacctcatccatgaagctggtatgtacagatttttcctttctttctcaatcctttaaaaaattaaagctctaaatctcatttccacttagattttaatgttgcattgtaacttaagataaaaccttgctctgatgttaaaaatactaaagtaagaagcaatatggcatagtgcttatgagcaggactacatagttctttctgaatacaaatctcagataaaacactatctcagtgatcaaccaggttaagcaacctttttagtgcctcaattattccatttgtaaaattgtaataatgatagtactaacctataagattgtggtgaggattaagtcagataatacaaaagaagcatttagagtatttcctggcattatctaccatttattgaatttttatggttaagaagaataaggaaaagcagaagaaaaggaaaagagaaaaaatacataagaagaaggaagagtggtaagctctagtaaattacaacaaacggtaacgtagaaaacatttgttagcccttaatataggccaggcactgtgttcaatgcttaaacctcattactgttctttgaagtggataacattattccttccattttaaagaaaggaatactaaagacaactttgtcaatattattcatgtaataaatgacagaatttgaccaagacaatagagaatgaactcttaatcactatattgttttattttttgaaaatagattttaagttcttattaaatgttaatgactcacatcaaaataaagcc

SEQ ID NO: 657610 - DNA, 226 bp, Homo sapiens
atggtcttgctctgtcgcgcgggctgagtgcagcggtgccatcttgtctcattgcaacctaaagatcctcttatctcagccccccaagtagcggggactacaggcacatgccaccacaccccactaatttgtgtgtattttcccatgttgcccaaactggtctggaactcctgagctcaagcaatccaccctccttggactcccgaagtgcgggattaaacgcatg

SEQ ID NO: 657611 - DNA, 299 bp, Homo sapiens
tatagcatacaggaacaggccgcagtgaatgacagcgtgacaggcacctggcagcgcaagaaggattcaggaatgccagactccttgaaatcatgtgggctttgttttttttttttttcccttttaaacttcttctcttttagaagggtgctggccggggttcccaaaaaaaaaagggttccaaaattcctttaattgcccgtgaataaggggcactgctacagcacttagttaccagagattcctccttatctcagggttgaggcaaacccaggattagacattagagattaaaggga

SEQ ID NO: 657612 - DNA, 1206 bp, Homo sapiens
  misc_feature (146)..(146): n is a, c, g, or t
  misc_feature (243)..(243): n is a, c, g, or t
  misc_feature (257)..(257): n is a, c, g, or t
  misc_feature (271)..(271): n is a, c, g, or t
  misc_feature (273)..(273): n is a, c, g, or t
  misc_feature (292)..(293): n is a, c, g, or t
  misc_feature (297)..(297): n is a, c, g, or t
  misc_feature (332)..(332): n is a, c, g, or t
  misc_feature (335)..(335): n is a, c, g, or t
  misc_feature (339)..(339): n is a, c, g, or t
  misc_feature (344)..(344): n is a, c, g, or t
  misc_feature (356)..(356): n is a, c, g, or t
  misc_feature (358)..(359): n is a, c, g, or t
  misc_feature (363)..(363): n is a, c, g, or t
  misc_feature (1172)..(1172): n is a, c, g, or t
ggatttgttttttttggcaaagttaccggggccaccagatggtgcaaagttcttacatccagccaaaaaaaggcttaagtaaacttcaacagccatttggatttccatgaaacagacctatcagtgagatgcagagcttgaaggancagttttccatagacttaagcacgtggtgaagcaaagtttacacttgcaggattagaagaggttgaccgaaagaaggaaggacatggacagctatgntgttgggagccgtnttatagtctaaccntnagtcaagtggtttgttggnnaganagagcttttgcctttattaagggaaggcccggacncanacancctcnaggcatttgttntnncctntcagtatcctttctcttaattatctcacctcatccatgaagctggtatgtacagatttttcctttctttctcaatcctttaaaaaattaaagctctaaatctcatttccacttagattttaatgttgcattgtaacttaagataaaaccttgctctgatgttaaaaatactaaagtaagaagcaatatggcatagtgcttatgagcaggactacatagttctttctgaatacaaatctcagataaaacactatctcagtgatcaaccaggttaagcaacctttttagtgcctcaattattccatttgtaaaattgtaataatgatagtactaacctataagattgtggtgaggattaagtcagataatacaaaagaagcatttagagtatttcctggcattatctaccatttattgaatttttatggttaagaagaataaggaaaagcagaagaaaaggaaaagagaaaaaatacataagaagaaggaagagtggtaagctctagtaaattacaacaaacggtaacgtagaaaacatttgttagcccttaatataggccaggcactgtgttcaatgcttaaacctcattactgttctttgaagtggataacattattccttccattttaaagaaaggaatactaaagacaactttgtcaatattattcatgtaataaatgacagaatttgaccaagacaatagagaatgaactcttaatcactatattgttttattttttgaaaatagattttaagttcttattaaatgttaatgactcacatcaaaataaagcccgcagcggccaggntttttcattattattatttttcccgcgttctaat

SEQ ID NO: 657613 - DNA, 412 bp, Homo sapiens
atttaaaaattaaataattgcaaatgagtggataaagaaactgatatatatatatctgattatatatatatatatctgattatgtatatatatctgattatatatatatgatggaatactacccggctataagaatgaatgaattaatggcatttgcagtaacctggatgggattggagactattattctaagtgaagtaactcaggaatggaaaaccaaacatcgttatgttctcgctcataagtaggagctaagctataaggatgcaaaggcataagaatgacacagtggcttttggggactcagagggaaagggtaggaaggagatgagggataaaagactacaaattgggttcatgtgtactgcttgggagatgggtgcaacaaaatctcagaaattaccactaaaga

SEQ ID NO: 657614 - DNA, 293 bp, Homo sapiens
  misc_feature (52)..(52): n is a, c, g, or t
cccaaagtgcttttggtataaacaagtcagccctccccatatcccgtgagtncccaaatcccatggatccctgaattcatggatttaacccagctgcagataaaaaatattcagaaaaaaaaagatggttgcatctgtactgaacatgtctgtactgttttgcttgtcattattttctaaacaatacagtataacaactatttacatggcatttacattgtattagggattataagtaatctagaggtgatttaaagtatatgggagtctcttatatcccaggaagcctgtct

SEQ ID NO: 657615 - DNA, 309 bp, Homo sapiens
aaagtatggatggggctgggtgtggtggctgacacctgtaatcccagcactttggagaccaaggcagctggatcacttgaggtcagaagttcgagaccagcctagccaacatggtgaaacccatctctactaaaaatacaaaaattagccaggtgtggtggcgcatcttgttaatcccagctacttgggaggctgaagcagaagaatcgattgaactttggggaggcggaggttgcagttgagtgggggatttgcaccacttgcatttccagccttgggtaaaaaaagagcgagattctttgtcttcaa

SEQ ID NO: 657616 - DNA, 324 bp, Homo sapiens
gcaattccagcagcgcatgcatcattcatttattgtttgattaatgacaagtccttggctttgtctcacaagctgatatgcagtggtgcgaccacggctcacggcagcctcagccaaccagatgtaagcgatctggttcccacctcagcctcccgagtagtaagtatctgggaccacaggcggtgcccagggtttttttttttttttttttctccgttggtagagacggggtctcactgtggccaggactgctctgaaactcctgttttcaagtgatccctttgcctcctccccatttaggcctcccgctgttggaactgctga

SEQ ID NO: 657617 - DNA, 129 bp, Homo sapiens
cggtcacactcataagggctacagtcatcttaaaataggtcagctatctctagcaattataactcttaccatggataactttttctaagcaccttaaatcacatgaatattctgccttacataaatttg

SEQ ID NO: 657618 - DNA, 195 bp, Homo sapiens
aagcttgcggccgccaactttaccgtgcagttggatgactacctgaacgggcgggccgtgcagaaccgggaggtccagggcttcgagtcggccacctttctaggctacttcaaggctggcctgaagtacaagaaaggaggtgtgggattaagaattaagcacgtggtacccaacgaggtgggggtgcagagactc

SEQ ID NO: 657619 - DNA, 442 bp, Homo sapiens
  misc_feature (2)..(2): n is a, c, g, or t
  misc_feature (18)..(18): n is a, c, g, or t
  misc_feature (22)..(22): n is a, c, g, or t
  misc_feature (31)..(31): n is a, c, g, or t
  misc_feature (45)..(46): n is a, c, g, or t
  misc_feature (52)..(52): n is a, c, g, or t
  misc_feature (67)..(67): n is a, c, g, or t
  misc_feature (172)..(172): n is a, c, g, or t
  misc_feature (174)..(174): n is a, c, g, or t
  misc_feature (204)..(204): n is a, c, g, or t
  misc_feature (414)..(414): n is a, c, g, or t
  misc_feature (422)..(422): n is a, c, g, or t
cngaaagagtgaaacatncagnaccacaggnctcgcactgctganntggcanagtcacagctgcgtngtactgggtgcctgcgtgtacccaggacagcccaggaccgtgtattactcattagtgcacaagtattacttagtgcacaatatacagtctctagaagatgacttntngccttcagtcgccgctccctttgatgtatngttctaagggcagtgctcgttcctctgccctggtttagacaggtacctgatagcacactgtggtgcttctcaagtgggggtctgggggtcaaccagatcagaaacacttggatggggcctaacacagatgcccttcctgggccctgttcatgcagtagaacatgtaagaaagctttaatcctcccaacatgcctgggaagttaaggtggnattctccnttaactcacagagtagataa

SEQ ID NO: 657620 - DNA, 958 bp, Homo sapiens
gtacatccgagtggtgagtagctagctgatctggtagtgtggatctcgtcatcggtaataccgtctaaccagcattgcggtacttggcgtgcatccagagctgatcgtgacagtagcaagatatgcgaaattccatagcatctttaacactcatttgacaaatggcatggcgatgacatctataatgcaactaacggatctgggaactgtctctcagacctgcttggtgcgtgaaaatcctcgcatgaagtcaggtgttccagcaggaaccaatgatccagtgcaagatagaattgcctgataggtaactggtcataaattgacattcccctgaattttgctggacagatgactggtcctgaaaaatgctttgacaccagtccgttgcaagaaaggaatgttaggcagaaggcatacccggcgtgtccgatacaggagtggcaagaggtcattgattacgtggtctagcagatactagctgccattgtgatgactaaacctttgtagagacagttaactagttgttgaacttgcccatgatgatctgggatctcagctatcgactcgtgatgcgtcaagttcaactagttatgacgtttgtacaccttgatgaactggcagttgaatgacttgtcggaattgtgtaatctcgttgccaagtcgtaatgggcctttctcgggaggacgcctcggaacggttcccctctgcaagatatgcgtgacggaaaaggagcatgcgcaggtccccaagtaacggcagttccaacgctttgaaagtgacacacgtcgcggggacctggcgaataagcctcgattccaaaagcgccagggcgtgattccacatctaatggaggggtagaggttcctcccctctctccctcctcttttctgtctcccatcatcctatttggcaacacgacacagcaacgtgcacaagcagaaccagaacaaacaacac

SEQ ID NO: 657621 - DNA, 608 bp, Homo sapiens
cttggggccctcgcgtaggcttccgttgttcgcctgttaactggtcctcccgtgaatgttcttggtttttccggcccccctttatatccgaggttcccccccgtgggccgggtctccgcggccattttcgtcccccgggaattctgcgccccctttccctcgcccccggtgaattagtgccgtgggcctattcctcccgccgacttagccggtgattagccgccctctctgtggtggcgcctcatatttattctcataggcgcccaccctggctcgccgccccaatccccccgcgtgtgcgtttcgtgtcgcccaacccgctccgctttcgcaatgttcggcgctttgggggctgcccctctcgcgtgggcccgagatcccacgcctctggcgggccgcgtgtcccgtggtttaggcttgtctccccgcccgccaatgccgcggtcatgccaatatcttacctgtgaggcccacataaaggtttgccaccggagcccacgttcactcccatgtggagtatacaccccccactccctttttcttaaggtcctcaacattctcaacaccatataggggtttctcgcaaatctcccacaataaacaagaac

SEQ ID NO: 657622 - DNA, 339 bp, Homo sapiens
  misc_feature (43)..(43): n is a, c, g, or t
  misc_feature (158)..(158): n is a, c, g, or t
  misc_feature (160)..(160): n is a, c, g, or t
  misc_feature (237)..(237): n is a, c, g, or t
  misc_feature (243)..(243): n is a, c, g, or t
  misc_feature (330)..(330): n is a, c, g, or t
cttgggagggcccttcaggaagtaggagttgggggttggggantttggtagacccagaaacttctggggacgtcataatagttactaatatttggaggcagtgggagatgctggccccaaggttgaggtatcagttagagcagaacaattggacctananctggtttttcctttgggtttaggtgtaagtgaactattatcattggaaataaaaaaactggaaaaaaaaggttatanactgtncagcactacacagctgcaggcacacagatggtacacatttcccagaaagacacataggtagacacgtggctgtcacccatgacacanaaacaatca

SEQ ID NO: 657623 - DNA, 459 bp, Homo sapiens
  misc_feature (11)..(11): n is a, c, g, or t
  misc_feature (27)..(27): n is a, c, g, or t
  misc_feature (38)..(38): n is a, c, g, or t
ctggggaaaangcctccttactggtancctattactcnaaaatgaaacacgggaggtctcccactgcccatgcccttggccctaaaatggcccttggttttcccttggaaagtccatcctgcatctgccctctcgtaagactattaacttagtacttaaggtcccagaacaaaaatagaaaatgtttatgtgggccgggcatggtggctcacacctgtaatcccagcactttgggaggctgaggcgggcgagtcacatgaggttgggagtttgagaccagcctgaccaacatggtgaaaccccgtctctactaaatatacaaaattagccggacgtggtggtgcttgcctgtaatcccagctatttgggaggctgaggcaggagattgcttgaacccaggaaggggaggttgcggtgagccgagatcgcgccattgtactccagcctgagcaacaagag

SEQ ID NO: 657624 - DNA, 109 bp, Homo sapiens
  misc_feature (39)..(39): n is a, c, g, or t
  misc_feature (61)..(61): n is a, c, g, or t
  misc_feature (66)..(66): n is a, c, g, or t
ttatggagctctgagtgctggtggacagtgcccctcccnccttccttcttccccacaacanaaganaccagcgactcccgcaaagggactaggttcctccctctcctgc

SEQ ID NO: 657625 - DNA, 942 bp, Homo sapiens
  misc_feature (40)..(40): n is a, c, g, or t
  misc_feature (62)..(62): n is a, c, g, or t
  misc_feature (70)..(70): n is a, c, g, or t
  misc_feature (79)..(79): n is a, c, g, or t
  misc_feature (86)..(86): n is a, c, g, or t
  misc_feature (93)..(93): n is a, c, g, or t
  misc_feature (97)..(97): n is a, c, g, or t
  misc_feature (107)..(107): n is a, c, g, or t
  misc_feature (121)..(121): n is a, c, g, or t
  misc_feature (124)..(124): n is a, c, g, or t
  misc_feature (130)..(131): n is a, c, g, or t
  misc_feature (150)..(150): n is a, c, g, or t
  misc_feature (152)..(152): n is a, c, g, or t
  misc_feature (156)..(156): n is a, c, g, or t
  misc_feature (160)..(160): n is a, c, g, or t
  misc_feature (194)..(194): n is a, c, g, or t
  misc_feature (206)..(206): n is a, c, g, or t
  misc_feature (215)..(215): n is a, c, g, or t
  misc_feature (281)..(281): n is a, c, g, or t
  misc_feature (291)..(291): n is a, c, g, or t
  misc_feature (383)..(383): n is a, c, g, or t
  misc_feature (394)..(394): n is a, c, g, or t
  misc_feature (414)..(414): n is a, c, g, or t
  misc_feature (469)..(469): n is a, c, g, or t
  misc_feature (561)..(561): n is a, c, g, or t
  misc_feature (644)..(644): n is a, c, g, or t
  misc_feature (815)..(815): n is a, c, g, or t
  misc_feature (876)..(876): n is a, c, g, or t
  misc_feature (933)..(933): n is a, c, g, or t
aaaagccatgtatttcagggacctcagggcgcacctccgnctgcctacccctccccccaccncccctccnccccccccnccacccnccccccncccncccccctacncgcccccacccccnccncacccnncccccccccgccccccccncncccncccncccccccccccccccccccccccccccccccccncccccccccccnccccccccnccccacccctcccccccccccccaccccccccccccccccccccccccgcccctcccccccccccncccccacccncccccccccccccccccccctccccaccccctccccccacccccccccccccccccccccccccccccccccccccccccccctcccccccnccccccccccncccccccccccccccccccncgaccccccccccccccccccccccccccacccccccccccccccaccacctccncccacgccccccccccccccacctccccggccacccccccacccccccttctccccccccccccccccaacccccccccccacacccccagnggagcgcagccgtggggctctgccaagtgtgggcgctgccccctctgcacacaggggctcacaggggcagagcctttgctggnggtccaggcgctgtttggaggaccccgagggactgaggagcagccagggacccgcctgctcccgtcctcacccagatcaggaaccagggcctccctgttcacggtgacacaggtcagggctcagagtgaccctcggctgtcacctgctcacagggatgctggtggctggtngagacaccgcactgcacacgggaatgcctaggtcccttcccgacccagccagctgcagggnacggggaccttgatagttaagggcttttcaaacatgcatccatttactgacacttcntgttctttt

SEQ ID NO: 657626 - DNA, 350 bp, Homo sapiens
gtttttttgtggaaaagtaaggagttaggtggcttgataataggcagggaaacccgattgtcggggctatgacccttttttccagtatgctacctgatttgtttggctggcccctaggtggcagccttggttttacttctctgcttttttaaagaaatttcaggaaggatgatccttcccgttagtttggccttttttgtcgtttgtgcccataacttggggttatccctatgtcctcagattcctcctaggggagagtttttgtttttatttccaaatttaattttcccttgtttcccagaaatttgtggtgataaaaatggaaaaataaaaatttggggggttagtga

SEQ ID NO: 657627 - DNA, 1246 bp, Homo sapiens
ggcgatcagatcgatctaagatggcgactgtcgaagccggaaaccagccctagtcctaatcccgccgactacggaagacggggaccatcgggaatctgacttcgaggaggtagcataatccaagaacggacttagtatttacaacattgcccgtacagaaccagatgcggcactcggtggtccttgacaaaccaatgattagagagcaaatacctgtggggaaggcaaagccgggcggcgtgattctccaatgtcggactagcttgtggaacgacctttgtggcgctctgtacaaccattattccagtgtgtctagtaatttacatgcctggctgtgactaactcacttttaacagggatggtattggagccatatgtgggacagatgagaaaaaacaaaacgggggaggacgaatggcataagttacatttgaacaaaacagcagagacgaaagtggaccctcgatacgccttttggctagagaccacttctggggccttatgtggagaatctttgtgatgactaccagggatgatggtctgtggcgctgttggttcacactggttagagctaacagcgtgcatcaacgcataaggccacataatggcgactactcggacattgttggacaccccgaagaaacgtggtgaaccccattataagcggcagcggactcacacgggcaacgcgtctcagggactgttccttccaaaagactacggcggactctggcgaatccaggtcccaccgccaagaaaccacacgggtcacaaacaggagggcgacctccaccccttatcacacacagcgctgcggggggtgacaaagaagaacacccttcggagagccccacaacagagagaaccggggccaagagaccccaaattgtggcgcccgggtcccaaaacgagcttcctaacagccacgagaggggagacccaacgacgcgggcacccccacaggtgtgctcgacacagcaaaagaagacacaccccacctaggtgtcaaccgagagcagatcaactacaggtgggcggggggctacccttcaaaagcacaggaagcctgctaacaaaaagtacgtggccagatccaggtgagacacaacaacaacaggcagtcaccaaagccaccatgtaccacagtactccgtaaacaccggcaagaatcagtcttctgctttgttttttgtatataaggttttctgttgctctgtacactagacagtgggcgagagggagagag

SEQ ID NO: 657628 - DNA, 599 bp, Homo sapiens
ttcgtgatcgatgtggtgacgtcgtgctaaaaaaaaaaaaaaaataaaaaaaaaaaataaaaaaaaaaaataaaaaaaaaaaaaaaaatcaaaaagaaccatgaagagacctacaactctaaataaaaatttttaataaaaaaaagagtttttaattaaagaacataaaaattagttatagagggggccactattacatgtggcaacctacaatagattgacctacattcataactaaagctgaaaggcaacaaccactaaatgcctaaataagaatgatttttgaaaactccttttcttggcctcttttggcccgagctgatttttccctctcattggctttttctttaggcctgtataaggttaagattggccaactttctgttgttgtacggttatttcaagtcctgggccggcggtttttatttaggaaattgataaccctggcggggccccccataaagcgccttaaggaatatccccttttgcccaggttgggtataacaaaagggccccccccgaacccccttttcaaatgtttgcttatcccgaacgggataggtttattgataccccctattttttgctaaattccccgg

SEQ ID NO: 657629 - DNA, 644 bp, Homo sapiens
gggcacagcggacaccaggactccaaaatggcgtcagttgtaccagtgaaggacaaaaaacttctggaggtcaaactgggggagctgccaagctggatcttgatgcgggacttcagtcctagtggcattttcggagcgttccaaagaggttactaccggtactacaacaaagtaacattccaatgttgaccgcaagggggagcatctcgggggattaaccatggttgctgggcatgctaccgtgctctttagcctactcctttttcccttaacaaagcatctcaacgcaacgagcgggcttccggaaaattaccaacttgaagagggaacacacttcttggaagcccccccgcgaccccaacgacccttttgagccccggaagccccccttcccgtgacgcggaaaccacaaatcctccaaattccggttaggctggcaagtccctttttcacttattttcccttaacttcaaggcgaaactttttaaacgcttcccagacatttacagacccacttgaccgttgggagccacaccgcatcgcgcggagcagcgggcaaacgccgccaggcactagagctgactcacacacaaccactctatcgcagacgcagacgtcgcgtctcccctcagccgccccctccc

SEQ ID NO: 657630 - DNA, 881 bp, Homo sapiens
gggcctgtgccggccatcaagaccatcaccatcacggcgatgggcaaggtggacggcaatgtgcctagagcgggagtgctgcatacgtgggggcctaaactaacgtggacgtcgatgtcgtggcttctgtgctgggcgcccctgcttcgtgtacctgtttatcggcacgtcctttctggctggccggctttgtcgtcgctcttcggtatccgcaccatcatgaagcacgatcggcaccaagacagagatagctggagaagctcatggtgcgcattggcgtcttcagcgtgctgtacactgtgccagccaccatcgtcatcgcctgctacttctacgagcaaggccttccgggaccagtgggaacgcagctcgggtaggcccagagcgtgcaaggagcatacgcgtatcccctgccgctcacctccaggcgggcggaggcgcccagccgcacccgcccatgagcccggacttcacggtcttcatgattaagtaccgttatgacgctgatcgtgggcatcacgtcgggcttctggatctgggtccggcaagaccctcaactcctggaggaagttctacacgaggctcaccaacagcaaacaaggggagactacagtctgagacccggggctcagcgccatgcccaggcctcggccggggcgcagcgatcccacaaagccagcgccgtggagttcgtgccaatccggacatctcgaggtttcctcagctagacaactctgtatcgacaggctcctttgaacaaactcagctcacggcaaaagcttcacgtgcgtgaggcaaaaggacagagagggcccgagctgccagagggaggatggacagacctcttgccctcacactctgtaacccggagggtcgcttta

SEQ ID NO: 657631 - DNA, 883 bp, Homo sapiens
ggcctttataattggtctcggatgtttcgtgtcctctccggttgcatatttgtcctgggattcatgtccgcttctcggttttgcctggggtttgaataacttattcatcttggagaattagctttaaagtgggcttagacatctgaaacaaatttcagccagtgttgtttacgctcatctcttttcgtcttacgcctttagcacagtatcttacatcttgaatttaatagagtctacttgattaaaatgatgtgggatgaatgaatattagaagtaataatataaggaatcaatgggaaacgtaaactatttagtatgtaggttttgttattattcccagcatttgtcaatatttacttagttactctgtaaattactgtggctgcgtagtttatacatgcctgtgcactatattaattagaagaccatagaacatgccatgcaggttggctaatgctatgggggtttttaccacagttgcaattgtggaagaaattatttggtacattaaatcaaaaaagttggtaaaacatcgaacttttatacctcagtgtatacagatgtgcaagacagaatatgcttatttccttttctagcatataagtgatattatttggcttatgacactaacactattaatgacaggagtcaatcagcctctacagctatcacaatataatgagatcccaatgatgattctttatgtactttgaatgttaattagctttgggactttgattggctggcaaacattttatcattgtcagcatttaattcttagatttcaaaaatagcttacaggatttaaacatggtgtggtattctacagcctttgtgtctcatgagatctttttgagagcacaatgtacatcggagtctggga

SEQ ID NO: 657632 - DNA, 104 bp, Homo sapiens
aggaggcagaacatctggcttacctgtgttgaatactgtgaagggaggcaaagaacagacaggagcaacggcttctgtcatttatgttcctccgccttttgctg

SEQ ID NO: 657633 - DNA, 242 bp, Homo sapiens
tcgctaaccacttctttattggacgtcctgttacattgattgacagctttctcctaagatagagtctcgcggtcactcaggctggagtgcaggggtaacgatcacatctcattgtagccttgaactcctggccccaagcaatcctcccgcctcagcatcccaagtaactggaactacaggcaagcaccaccacgcccagacattaaaaaaaaaaaattgtggggagacagggcccttgctat

SEQ ID NO: 657634 - DNA, 424 bp, Homo sapiens
tgtccagcttcctgagtagctgggggcggtcaccatgttggtgcatggctggtctcaaactcctgatcttgttgatccacccgcctcagcctcctaacgatgctggtgattacaggcgtgtgccaccactcccggtcccaatcatacatttttatttagagtggaccaccagaagcgaacatggattcaaacttgcagctattggattcctgggccttacatctagtctggcatctcctcgtgggattccaactggcatctatatcaacatgagagtcacgagggacatcgcattgttttatgatgttctgtttttatgtatgttttctggatgaaataccagggtgaaagggagatagccaattggattagagctcaagtgccacgccaagtaacttggcagagtattcagtaatggtccacc

SEQ ID NO: 657635 - DNA, 660 bp, Homo sapiens
ttggtgcagtgggggcctgtccagccctctctcgccatgcttccccaagtgacgtccactgacttgtcaccagcgacctgctctgtttcatgcccaccccctgaggaatgacttatggggatcctaacaccctggtgccctgcaccagacaggccgtggtcagggccaggccatcagtgccgggttcttgcacacatgagtatcccacgtgcttgcctgactatgactgtgtgctcatgtgtttttggtgtcctgtagcatgtgtcgttgaaactgtgaccatcactcaggtccaaacaagtgatgtggcccatcgtaggtcacgagtttatgcaactttacagtgtgtgtcgataacaggtacgttctaccatgctttttgaataccatctcataactctttattttagtaataatgcctcagtgtaggtcctggtaagctacagcggacttgctcgaggtttaaattgtcctggctcttagaatcatgccagcacaattaggcaggcaccgagcccatggcagcagcctcggcatccggattgtgcttaggcttcaggcggtatatgtttatcacagatgaatatacaaatgttgtggtgtctctttgggaaaaaattccaactacgagggggccccacaagttccggacgataccca

SEQ ID NO: 657636 - DNA, 384 bp, Homo sapiens
  misc_feature (296)..(296): n is a, c, g, or t
agtccgtgcgataataaaaatgacggcgccggtaaagctcagggggttgggatgaaaagggctgtaacaacgagggctatgtggctgatggaagagtatgcaatgagcgatttaaggtctgttggtcgtaggcagatggagctggtaataataatgcctcatagggatagcacataagggggtatccttttgggttggggtgggcatcagaaatcagtaggggagagagatctaaagaaaatggtggatatgaagatgtatttatggtaagaaaggtgatgagggaaagaaaggtnatatgagagaggatctcatatggcaaagggtggtcctaaagtagaaggactaattacgaaagagggacagggagaaaacgagggtacc

SEQ ID NO: 657637 - DNA, 205 bp, Homo sapiens
ccgtaaatgggggggtagtggttaccccgggctgggcccctccaggagtcacaaattaggcccccgcaaagactggtgacacgctttttagcaggggcccctggggacttcaactgcccaacaacatggaggatggtgtcctgaggcctccaaggacggtccccccccctttacgtttccccaataaagcctttttaaaacctga

SEQ ID NO: 657638 - DNA, 277 bp, Homo sapiens
  misc_feature (94)..(94): n is a, c, g, or t
  misc_feature (235)..(235): n is a, c, g, or t
  misc_feature (270)..(270): n is a, c, g, or t
ccaagagacaccccccgcactcctgtgcccgagctgtctcatctgtgattcacagtctgctctttctggctgcttgtcgtgagaagtgattttnaaccccgaggttagaaagggagctatttttgagctgctttttgttaaaaggcaaattttctgctggggactggctttaccccgtctacctaaatcatttcttactgcctcctgtaacagtcgccttttgtgttctgctggnatttgtttgaacacagtccacaggttcagtggttncatctct

SEQ ID NO: 657639 - DNA, 968 bp, Homo sapiens
ggactggctctgttcggatgccggccgggggggacgaggtgcaatcctctcctcgcggctgggtgtgcttagcaatcacctcccacatctgccaaaggcaggctccgagagtgcttggcggtgacagagcgcctgcgacgcccatgtcgagatgctccgtgaggatggtcaccatgtactgaggaggtatgtgacggagcagcagctgtgaggagggaagtcttcccctctgggccatgtaactatctggcatcgttacctgtctttgcgtccccatccgaacaggcgctcttggagcatccgtgggatgcggtcgtgcaatgcttgctggcctcacaagactgcgtcgagacctatgtcccctgagcatcgaaaaatcgtagtagcgagtctacaggacgaccaactgctgatcatcatcctccgtacagattgtcggggactggagcagtgtgctagagtccatagcggacagacatctaagttgggaacctgtgcgtgcatgttgtacttgcacatgattttcggctggactcttcaattctgacacacggggtcatctctgaacccgtggaccggacaggaccttaggtgtagaaatagccatggcccagacctttgtggggaccatctggtgcctaaaggattcatagccgtgtggccatggtaaccctacaattccatgtagaaacggcgcaaagggccagtcgattgggggagcatgcagctgcgaaggaccatagggttgtcatgcgtccagttggtccgggggattgacgctcacagagaggctagcctaggccaggggaattcactgggcaacgtggcaagatgggacctggccatgagggggcactgacataggaagcacgatccgacacatctgccccacacagggaagaggccccaagggacacgcagcatcaagaacccagcatcacaggacacaacgggccccaaaagacccc

SEQ ID NO: 657640 - DNA, 148 bp, Homo sapiens
cagtggcgtgctacggatccgcactcatgttcattacagtagataactctgctgtgagatcccaaggatttgaagactggacttctggaagtttatggggacttagcagcaaattgcttacaatgaaacaaatgaactcttatttggg

SEQ ID NO: 657641 - DNA, 942 bp, Homo sapiens
gggtcatggcggctcagtgcgtgaggttggcgcggcgcagtcttcctgcttgggcgttgtctctcagtgccatctccccggtagttcgtgcacagccatgaaacaaaagaacagtggccagaagcctggaatgaggacatgggtcatgagtgaacagaaggcagatcctcctggctacagagaagaccctcctggtaaccagaaggtcaagattcggaggaagcagctgaatggagactgtggacaacacatactaacacgagctatggcagacggctgagaacttacggcgagaggagccagaaataggtggaggaggcaaaattatacggcattcagagccttctgctaggcacttgtttggaggtggcatgacgttctggatgaagggaacagcgagtgatgttccaccaatgaacgaaagttacgagacgaataaaccctcatcgtgaagagcctctatgaaagcggctggtcatgactgaatgtccagatccagaagagtgttcacaacagcactggcattgcttaatgttgaacccctgtcggagccaagttcgacccttatgagcatgaggccttgttccaccacaccggtcgaggggaaggagccagggcacagtggccctagttagccaaagctgtggtaccagctgcatcgggctgcactctggatacccggccgggtgtagggtggtgaacggaaagctaagcttatgatcgatgggggcgggctgtttgtaagcctccatggatgtaactctcgacgctgttcaatgcgcccaacaatcagtagtttgacgtctaccaaactaatgtgtaccttgttaccatgggttgtcgtcaagcggtgcccgatgatgatggaccctatggacggtcctttaggcccccgtttgcatccatcttagaggacaagcccgtgtccgagaaagaaggttg

SEQ ID NO: 657642 - DNA, 727 bp, Homo sapiens
  misc_feature (342)..(342): n is a, c, g, or t
  misc_feature (345)..(345): n is a, c, g, or t
  misc_feature (404)..(404): n is a, c, g, or t
  misc_feature (493)..(493): n is a, c, g, or t
  misc_feature (502)..(502): n is a, c, g, or t
  misc_feature (686)..(686): n is a, c, g, or t
gcatccgggaccggggtgtctgtggccggaggctgatcaggattattgcatcgagctttagtgtcttcttattcaacaccgaaaataagcttctgctacagcaaagatcagatgctaagattacctttccaggttgttttacgaatacgtgtggtagtcatccattaagcaatccagccgagcttgaggaaagtgacgcccttggagtgaggcgagcagcacagagacggctgaaagctgagctaggaattccctgtggaagaggttcctccagaagaaattaattatttaacacgaattcactacaaagctcagtctgatggtatctggggtgaacatganatngattacatttggtgggtgaggaagaatgtaactttgaatccagatcccaatgagattanaagctatgtgttatgtgtcaaaggaagaactaaaagaacttctgaaaagaagcagccaggtggtgaaattaagataacgccatggtttnaaaattatngcagcgacttttctctttaacatggtgggataacttaaatcatttgaatcagttgtggaccatgagaaaaatatccagaatgtgaatcatgtaggtaaatgattaccgaacaaatttatctgcttaacaaacttaagaatgactttttcctttaaatttagttctatcattactttatcattanttacgtcatcatcgtaccactccttatgtatatataccgat

SEQ ID NO: 657643 - DNA, 181 bp, Homo sapiens
  misc_feature (64)..(64): n is a, c, g, or t
ccttgggcgaggcagtctcaaaaataaaaaataaataaatgcttgggtagaacctagatggtgncacactgaggttcatttagttttacagtaaacacctatgaagatttagttaatgttacaaaatgtgacaccaggccctaccccaatagagtgaaggtatgagactgcctcgccaaat

SEQ ID NO: 657644 - DNA, 207 bp, Homo sapiens
caaattactgactcgttgatctgcttgtcttacgcctcccaaagtgtgggattacaggcgtgagccaatgcacccagcctttttttttttcctcaaaatagggttaaaaatggaaagcaacagatccagtcagattttttttttttttttttttttttttttttttgacaaccccccatataccccccgggggggggtgggaaaaaa

SEQ ID NO: 657645 - DNA, 207 bp, Homo sapiens
tagcaggatcgcttttacgcaggcacttttacgcgcgcactttttcgcaggccacctactacatgcagcctaattgtgaagcgcgaccctagcaatatcaagcattaacctttcctctacacttatcatcttccttttacgcagtgcgcctgggttcttaggaaataaatgggggaagtattgtagcgagttgaaagattagtgccg

SEQ ID NO: 657646 - DNA, 567 bp, Homo sapiens
gactctgtctcaaagaaaagcaaacaaaaaaaccacatacaatggaactccaataggtctggcaacagacttttcagtggaaaccttataggccaggagagaatggcatgacatattttaggtgctgaaggaaaaaaacttttaccttcaaatagtatacccagcaaaaatgtccttcaaacatgaaggagaaatactttcccagacagacaaaagctgagggatttcatcaacaccagacctgtcttacaagaaatgccaaaaggagttcaatctgaaagaaaactaacaaattctggacttaaattcaacacttgaccaattggacctgatatatacatctacagaacacgctacccaacaaccacagaatgcattcttctaatctgcagatagaacatactctaagattgaccacatgcttggtcataaagcaagtctcaataaatttttttaaaaacctgaaaatcaagccaagtatcttcttagatctcagtggaataaaaatagaaatcaataccaagaggaacactcaaaatacacaaatacatggaaattaaataattg

SEQ ID NO: 657647 - DNA, 483 bp, Homo sapiens
  misc_feature (16)..(16): n is a, c, g, or t
  misc_feature (61)..(61): n is a, c, g, or t
  misc_feature (73)..(73): n is a, c, g, or t
  misc_feature (214)..(214): n is a, c, g, or t
  misc_feature (233)..(233): n is a, c, g, or t
  misc_feature (306)..(306): n is a, c, g, or t
aggtttaacaatccanaatccctagggggcaaaacccattgggttttttgggaacctgttnaaacctgcggtnccccctaagcaaagtattaaatgtaggggatgtccacctcaggcctgcgttgcacgggggctgagttcaactgcgacgctctaactgacgcgtgcttacatgtgcttctcacttccggagcacaggcaggtggctgcgggnccccagctctgaatggatncccatgatgcaactggggcagcccttgctttttgcttgctctcccacagaaacctttggccttgcaactttancctttgtcccgattgggtcccagatacacaaaatgtacaaatgtaaacttgctcattttattaaaattcttttagttctttgttctttctgtaattttttaaaataaaaattgccttgatggagtgatggtttttactcgcaccatacctagtctaaataaagagttctagaatctg

SEQ ID NO: 657648 - DNA, 171 bp, Homo sapiens
tgggttctctagatgtgtgcctgcaggcgtgtccgctagacaggccgtcggtatacaagtgtcgtgacgtgggcggtgtggattggtactccgggaacttgttaaagctattttctctacgtggtacactttgaatatttctataacaaaaaaatgctagtggcatacaaa

SEQ ID NO: 657649 - DNA, 514 bp, Homo sapiens
atgtggacaagtacagtgcttaactctgttaactataaggaagtgaaaacttagtagtatgataggttatttagatgtaaagatgttgtggataccattatatgtaccaccaggttcagaggctcagatgtaatatgtaaatggtatgtcatacgatactatgatgtaattggaaatatggtctataggttatgaatcacttggcagcaccagctgagcaggctgtctgttgtattcattgtggtcatagcacctaacacacattgtagcctcaatcgcagtgcagcacagactagcaagttcctcagtgcatggcttcatgatcagcaaatggcctcatgtcaaatcatttagcatgtacattttgtgtcacagcaacatacagactggctgtaccaccaactcactcacctgtaatgacaggcctgtccaaccacatctcccttttccatgcactgtggtcagccagccatcggcaaagcaagctgatttaaagcggtgtgcattggctcag

SEQ ID NO: 657650 - DNA, 958 bp, Homo sapiens
gtgtagacggacagaggaggcgtagcggtcatagcgacttgagctgcgccggagtggccggaacacgtatgtcatgcatctcagtgcataattgacattgaataaaatgaatatattggcaaacttacttgtaaagaggccgaatgtacgtaaatcatttatgataaatctgttgtataatctttgtacagagactatccaataaggaggtcagacatattttttagcatagagcggtttgcaatgcaaacacttctttacttatgaatagatgatggtgttgaaagagattcgagagagagattaaacagaactatatagtagagagtggaatgtgggatgggaaagagcttagtaagtttatgataagtttcctctagggcaaaattacaggatgcttgtgcaacactatatcgacttgaatgaattttccgcataaccctaggcagaaaaactatttggaattcgatatatctaacttttgaatcttagactgattcagggccagcacgggtgaatggttatgccatccatggtgggttaaccataacgttctaactctttgcaagtggggacgatatctcctgtttgctgccaaaaaaaaatgctcctggagctggccctttgctagagacttgtaattcagggcgtgcatctgtctgttgccagtacggacgaccaagtatccagccaacttttggctgcggtcggtttctgattctaaccctgtgcaggtttagctatacgtaccgttgcatgggttatggcaggctcccctaattttcgcgtggtcctttaatgtggctcgagcctcttacttattgggcttagcgaaatggtttagcgtaattgggccgcctttacggccagagatgcctttccgggcatttttcgggcacctgttttttcccctttcttttcttggagtgttagaggacgctttttatccccttggggg

SEQ ID NO: 657651 - DNA, 134 bp, Homo sapiens
  misc_feature (84)..(84): n is a, c, g, or t
atagggaatgaagagggatgtcacacctgcttgggcctgatatggcgctggggatcagcacgcgagcgtgtggatggacttggncagccagcttgaagacctgggtctggaggcgtctctctaagaaatcctct

SEQ ID NO: 657652 - DNA, 928 bp, Homo sapiens
catgtgacgggacatgcacacgaagtgcccccgggtacagacaatgtctgtcccagtttaaaactacccgctgggtgtctgtgaggggcccgtatttcaaaagcgtatggggggaatttgtgacaacggggaggttgagcccccacggtcgtggcgcggtagaacacacccccccccggggaacggcacaagacacctccttccccacaatctcagaattaagaatttcaagtgcctttggtgcgcaaagaaagaatgtataaccttgtttccttggtgccctactcgtaagccccggttgagacatgctcaagcagtgtaagtgtacccagacaccggcgtacatttgaccaataattagtgtagtgtggagaaagcaacatggggtctctttgcaagggaggagaaccgctgcaacagcatgtcctcacggagcggctgatgttgctagctacaacaagggtgtaatgtggcaacaaataagcaacttctggaaccaccagggttagtgtcaaacgcaccaatgaactatgtgtcacgcccatcgttaatcatcctatttggtgtacttgtgctataacctcggcgacaaaaaatatggccgcttcaggctctacctcttgtcccccccccaccacagagggggagctagaagcagaagccaacttgttgccagaaggcgaggttaatgagctgtgtgtaggacacatgcgtcttattcgcggggtggatactcgccgcacaagtgtcaaaatagctgagcgtaaggaagtgtgtctattgacatgctattcttagcggacgtcgttgatgtttctttccaacaattcagatgatgctacgaatgtttcccgaggatgtatcggagagaacaagtattgcttttgctcaagaaacaggcgccaaaaattttccccccaacataaca

SEQ ID NO: 657653 - DNA, 513 bp, Homo sapiens
  misc_feature (1)..(1): n is a, c, g, or t
  misc_feature (98)..(98): n is a, c, g, or t
  misc_feature (104)..(104): n is a, c, g, or t
  misc_feature (111)..(111): n is a, c, g, or t
  misc_feature (116)..(116): n is a, c, g, or t
  misc_feature (119)..(119): n is a, c, g, or t
  misc_feature (121)..(122): n is a, c, g, or t
  misc_feature (125)..(125): n is a, c, g, or t
  misc_feature (127)..(127): n is a, c, g, or t
  misc_feature (131)..(131): n is a, c, g, or t
  misc_feature (135)..(136): n is a, c, g, or t
  misc_feature (138)..(138): n is a, c, g, or t
  misc_feature (152)..(152): n is a, c, g, or t
  misc_feature (154)..(154): n is a, c, g, or t
  misc_feature (162)..(162): n is a, c, g, or t
  misc_feature (165)..(165): n is a, c, g, or t
  misc_feature (181)..(182): n is a, c, g, or t
  misc_feature (189)..(189): n is a, c, g, or t
  misc_feature (191)..(191): n is a, c, g, or t
  misc_feature (213)..(213): n is a, c, g, or t
  misc_feature (217)..(219): n is a, c, g, or t
  misc_feature (225)..(225): n is a, c, g, or t
  misc_feature (232)..(232): n is a, c, g, or t
  misc_feature (236)..(236): n is a, c, g, or t
  misc_feature (253)..(253): n is a, c, g, or t
  misc_feature (256)..(256): n is a, c, g, or t
  misc_feature (259)..(259): n is a, c, g, or t
  misc_feature (266)..(266): n is a, c, g, or t
  misc_feature (273)..(273): n is a, c, g, or t
  misc_feature (279)..(280): n is a, c, g, or t
  misc_feature (298)..(298): n is a, c, g, or t
  misc_feature (307)..(307): n is a, c, g, or t
  misc_feature (318)..(318): n is a, c, g, or t
  misc_feature (329)..(329): n is a, c, g, or t
  misc_feature (344)..(344): n is a, c, g, or t
  misc_feature (355)..(355): n is a, c, g, or t
  misc_feature (379)..(379): n is a, c, g, or t
  misc_feature (495)..(495): n is a, c, g, or t
nagggggaaggccccaagtgggcccctgcctgttgttctctctggctccagagatgtctgcataggcctcagcttctcactggccaatctcctcttcntgggcnccagccnctgcnaancnnccncncccncccnncntgctgctccccctncncccctganccnccggcttgcccctctnnccctccncncccgggcccggcagcccccctngccnnncccgcntcctggngcangccagagcctcccctgnccnccnccctctnctgggcnctctcnnccccgcccccggcccccncccccgacnatttcgtgtcnccagtctccancctggcgaccaaacnctgcccttgtncgcaaggcaaccccaggagccccngggctgcctggtgggggtgggcccggctgtccgtaccacgtaccacccttgatgtgttatcccccccctagcaggcagacctttcccaaggactccgttcccagccacaccttctnaccttacccctgtcccat

SEQ ID NO: 657654 - DNA, 912 bp, Homo sapiens
aatgtctcaacacaccttcttcgacccgccggaggaggagaccccgattctataacaacagctattctgatctcggtcatcctgaagtgttatatcttatcctaccaggcttcggaataatctccgataaggttgtaaggttactactctcggaaaaaaagaaacattgataggtacataggtatggtcgtagagcttatgatatcagttggtttccgtaggggttatcgtgtgagcacaaccatatatttacgagtaggagatagacgtagacagcagaggatatgtcaacttccgtgatcataatcaatcgttgatcccgagcggagtcgaagagtatttagttgactcgatgaaaatccacggaagcaatatgaaatgatgcctgctgtagtgtcaagagcgctaggattcatcttacttttcaactgtaggtggtgtgaatgaatggtattagtaaatcataactgagacatcgtactgcaggatagtactacgtggtaactgcaattacactatgtcctatcaataggagctgtattggcatgcataggagggttcattcactgattgccctattctaggttaagcctagaacaagactaggtccaaagtcattgggtatcatatccatcggcggtacatgtactttcgtcccaaagacattctcggcgtatcgggaatggccgaggttaatcggattatccggtgcttaaacgaggtgaaatcttataattgtgggcatcattcttacagagagatgaaaatttcatgattggaaactgtcgaagaaagtctaatatgaaagcctaagggggttttgtgcgctcaaattaaacgttatatgaaaaggggagccccggggacggtcgtaaaaaaaaagcgggaaatggggggattgatgtacgaaca

SEQ ID NO: 657655 - DNA, 159 bp, Homo sapiens
  misc_feature (128)..(128): n is a, c, g, or t
cacggatcttgttggtcgatcactgtactccagcctgggctacagagcagactctgtctcaaaaaaaagaaaaaaacagagagcatggacttgggagatacattatttggaatttggaatctcagctntcatcactggcagtacagtggatcgaccaag

SEQ ID NO: 657656 - DNA, 288 bp, Homo sapiens
  misc_feature (40)..(40): n is a, c, g, or t
  misc_feature (46)..(46): n is a, c, g, or t
  misc_feature (56)..(57): n is a, c, g, or t
  misc_feature (60)..(60): n is a, c, g, or t
  misc_feature (75)..(75): n is a, c, g, or t
  misc_feature (264)..(264): n is a, c, g, or t
taaaactactgtatagtagatttccaacaaactatcgttnctaatnaacctttccnncanttccctcaatatccntttattccctgggctctctcctcctcttctcttaataaagcccccagacgtgggctgtgatgggacagcagctgcaggttgggaagtggggcgcgtccaggatacccaccacatgggtgttaattgccctttgtggaaattttggggggtgaggagggtcaggccctcttttgccccatcttttgtcanttcttaggtcattgtatccggggg

SEQ ID NO: 657657 - DNA, 116 bp, Homo sapiens
cacttatgcgtgggccacttatgcgtggccacttatgcgtcacttatgcgtggggaagatgctggaacagagtcatgagctctagcccggtaggcctagccccgggagatgcaggc

SEQ ID NO: 657658 - DNA, 873 bp, Homo sapiens
  misc_feature (45)..(45): n is a, c, g, or t
  misc_feature (270)..(271): n is a, c, g, or t
  misc_feature (273)..(273): n is a, c, g, or t
  misc_feature (278)..(279): n is a, c, g, or t
  misc_feature (288)..(288): n is a, c, g, or t
  misc_feature (295)..(295): n is a, c, g, or t
  misc_feature (315)..(315): n is a, c, g, or t
  misc_feature (317)..(317): n is a, c, g, or t
  misc_feature (319)..(319): n is a, c, g, or t
  misc_feature (323)..(324): n is a, c, g, or t
  misc_feature (333)..(333): n is a, c, g, or t
  misc_feature (335)..(335): n is a, c, g, or t
  misc_feature (342)..(343): n is a, c, g, or t
  misc_feature (345)..(346): n is a, c, g, or t
  misc_feature (351)..(351): n is a, c, g, or t
  misc_feature (359)..(359): n is a, c, g, or t
  misc_feature (363)..(363): n is a, c, g, or t
  misc_feature (375)..(375): n is a, c, g, or t
  misc_feature (385)..(385): n is a, c, g, or t
  misc_feature (392)..(392): n is a, c, g, or t
  misc_feature (410)..(410): n is a, c, g, or t
  misc_feature (415)..(415): n is a, c, g, or t
  misc_feature (421)..(421): n is a, c, g, or t
  misc_feature (473)..(473): n is a, c, g, or t
  misc_feature (480)..(480): n is a, c, g, or t
  misc_feature (483)..(483): n is a, c, g, or t
  misc_feature (489)..(489): n is a, c, g, or t
  misc_feature (546)..(546): n is a, c, g, or t
  misc_feature (555)..(555): n is a, c, g, or t
  misc_feature (589)..(589): n is a, c, g, or t
  misc_feature (660)..(660): n is a, c, g, or t
ccgccgccgcctgtaactgatgcagaggttaccccaccgcctcanccgccacccacagcccgccgccgccgccgcctcccgggcgacgccgggggccgacgcactgcagaggtgccggcaggttccgcccgcggaagtgtcctcggccggcgcaccgcgctccgcccgcgctccgaccccggcccggctggcaccccctcgacgcctccgccgccgcgctcctttcctcctcctctcctctggcgcgcccgctcgctccctcgctttttnncnttttnntcttccctnttccctntccttccctcacctcttttnantntaanntccctcttntnggttttnntnnccatncccttgantctnccctcccagccntcgctctctngctagcnctcagcgcggcccccgcnatganggaggngggtgccggtgccgttgccgccgctgccgtcgcagggggggagtcgggttancagaaantanattgangagtgtccaaagtagcagtggaagtttggaggggcagacatcttggtcccagctctncaagtctcnaaacccgggctcggcggcggcggccaggtccctnctgaatcacacgccgccatccgggaggcccagggaaggtgcaatggatgagcttcatagtctggatccaanaaggcaagagttattggaagctagatttactggagttgcaagtgggagcactggaagtacgggcagttgcagtgttggagctaaagcctcaacaaataacgaaagctctaatcacagttttggaagcttgggatctttaagtgacaaagaatcagagagtcttgctctgttgcccaggctggagtgcactggcacaatctcagctcactgcaa

SEQ ID NO: 657659 - DNA, 1300 bp, Homo sapiens
gctctccctacctccctcctcaggggcaacgagacaggagaatggggttcctgctgtggggcgaattcatctccactacaccgcgagcgttccttacgtcacatctgtgatttgagctcctcctggcgccaggcagacctggcagcgggcgaaagagctcccgaggaagcacagcttgaggtcaggttctatgcgctttcgttaagttttaggggactagagctaccggaacggacggggaatcaaaggagttctcgtatccgtcagtcccatattcccctacgcgcgcagccccacaagttcatccaggggaccgcgttgcgcttgctctgcctaggctggtaagcccatggtgtcctcgaagtagtacggcgcaagtggtgaccgtcaaggaccgtattaggtctcgttcagtgcatcacagcatctagaaccaccgaggagtcgtagcgatctaggttaggcacgtcatcctgtctcctgaaatacgctcagtgtggaaagaaatggtctgcacgaagcactttcccatgcaaccttcccgcttcgcaccatgtcaccaacttggccaacgagtggcacttggaacggctgacagcaaaagttcagagaggggacccgacgtatactcgtcaccgacgaaccccctggaggttaggcaggacggccagcgcagcaatgctaaatgatcctggcacgtgctggtctacgacgacgccatacgtggttgtgaagatgtcgcaatggtgagaacaaacgcacacaaggacagaagatgataagcacaaaaagaccgacgaaacgagacatgcagaagacgggaagagcggaaagcacggtaagcaggtcagaacaaggacacaggacccaaaccactcgacccatgtgagccaccagcaagccacccgcagccgtcccaaggagagacgcacaacgccaagcgcgcccgcaacaagaacacaccctgagagcatagcacaaacgtccgatggacccaaccagaccccaaccaaccacacatcaacccaggaagcacgccaaaagcaacccaacgcatgaccgatccaccacgcccccaagagcagccgaaggacagagccgacgagcgcacaggttgaggcggacaaacacacgacacagcccaaggtcgaaccagcaggaaacaacacacacacgcacacaagacagacacaaacagacgacgcaaccaacacagcacaagagagacacaacaagcaagagaacaagaacaacaaagacacaaacaccaggagaaagcaacccgtgaggacacgcccac

SEQ ID NO: 657660 - DNA, 552 bp, Homo sapiens
cgcctagctgttcttgatgatcctcgttgtccgccatcctaggtatccacgacgtagctaagaggagctggaaccaatccttatgaagcttctccaactcaatagaaaaagagggactcctccctaactcactttatgaggccagcatcatcctgataccaaagcctggcagagacacaagaaaataagaattttaggccaatatccctgatgaacatcgatgcaaaaatcctcaataaaatactgccaaaccgaatccagaagcacatcaaaaagcttatccaccacaatcagctgggcttcatccctgggatgcacggctggttcaacatatgcaaatcaataaatgtaatccatcacacagacagaaccaaagacaaaaaccacaggattatctcaatagatgcagaaaaggcctttgacaaaattcaacagcccttcatgctaaaaactctcaataaactagatattgatgggacgtatctcaaaataataagacctatttatgacaaacccacagccaatcggctgccattgggggtaccgagctcg

SEQ ID NO: 657661 - DNA, 194 bp, Homo sapiens
aggcctcgcggtgacttgatgggattcaaaaccttggttctcagacaaggcccacatttttgaactgaggatagaagtctggcgtttccgatttgcagaacataacacgcattcagttgggataagttttttcatcagtcccacagacagggtcatatatcttgagtgcatccattacgttcattgtgacattc

SEQ ID NO: 657662 - DNA, 4088 bp, Homo sapiens
tctcgcgagagttcagctcccttcttagccgtggctgcctcagcacctcgaggatcgacatggacgctctcgaggactacgtttggccgcgggcaacctcggagcttatactcctcccagtgacgggtctggagtgcgtgggggaccggctgttggcgggtgagggtcccgatgtcctggtgtacagcttggactttggtgggcatctgcggatgataaagcgagtgcagaacctgcttggccactatcttatccatggcttccgggtacggccagagcctaatggagaccttgacttggaggccatggtggctgtgtttggaagcaagggactccgagttgtgaaaattagctggggacagggccacttctgggagctttggcgctctggcctgtggaacatgtctgactggatttgggatgcacgctggcttgagggaaatatagccttggccctgggccacaactcagtggtgctatatgaccctgtagtagggtgcatcctgcaagaggtgccctgcacagacaggtgcaccctctcttcagcctgcctgattggagacgcctggaaggagctgaccatagtggcaggtgctgtttccaaccagctcttggtctggtacccagcaactgccttagcagacaacaaacctgtagcacctgaccgacgaatcagtgggcatgtgggcatcatcttcagcatgtcatacctggaaagcaagggattgctggctacagcttcagaagaccgaagcgttcgtatctggaaggtgggcgacctgcgagtgcctgggggtcgggtgcagaatattgggcactgctttgggcacagcgcccgtgtgtggcaggtcaagcttctagagaattaccttatcagtgcaggagaggattgtgtctgcttggtgtggagccatgaaggtgagatcctccaggcctttcggggacaccagggacgtgggatccgggccatagctgcccatgagaggcaggcctgggtgatcactgggggtgatgactcaggcattcggctgtggcacttggtagggcgtgggtaccggggattgggggtctcggctctctgcttcaagtcccgtagtaggccaggtacactcaaggctgtgactctggctggctcttggcgactgctggcagtgactgatacaggggccctgtatctctatgacgtcgaggtcaagtgctgggagcagctgctagaggataaacatttccagtcctactgcctgctggaggcagctcctggtcccgagggcttcggattgtgtgctatggccaatggggaaggtcgtgtcaaggttgtccccatcaacactccaactgctgctgtggaccagaccctgtttcctgggaaggtgcacagcttgagctgggccctgcgtggttatgaggagctcctgttgctggcatcgggccctggcggggtagtagcttgcctagagatctcagccgcaccctctggcaaggccatctttgtcaaggaacgttgtcggtacctgctgcccccaagcaagcagagatggcacacatgcagtgccttcctacccccaggtgacttcctggtgtgtggtgaccgccggggctctgtgctgctattcccctccagaccaggtctgctcaaggaccctggggtgggaggcaaggctcgggctggtgctggggcacctgtagtgggtagtggtagtagtgggggtgggaatgctttcactgggttgggcccagtgtctaccctgccctctctgcacgggaagcagggtgtgacctcagtcacatgccatggtggctatgtgtataccacagggcgtgatggagcctactaccagctgtttgtacgagacggccagctccagccagtcctaaggcagaagtcctgtcgaggcatgaactggctagctgggctccgtatagtgcccgatgggagcatggttatcctgggtttccatgccaatgagtttgtggtgtggaaccctcggtcacacgagaagctgcacatcgtcaactgtggtggagggcaccgttcgtgggcattctctgatactgaggcggccatggcctttgcttacctcaaggatggggatgtcatgctgtacagggctctgggtggctgcacccggccacacgtgattctccgggagggtctgcatggccgtgagatcacttgtgtaaagcgtgtgggcaccattaccctggggcctgaatatggagtgcccagcttcatgcagcctgatgacctggagcctggcagtgaggggcccgacttgactgacattgtgatcacatgtagtgaggacactactgtctgtgtcctagcactccctacaaccacaggctcagcccacgcactcacagctgtttgtaaccatatctcctcggtacgtgctgtggctgtgtggggcattggcaccccaggtggccctcaggatcctcagccaggcctgactgcccatgtggtgtctgcgggggggcgggctgagatgcactgcttcagcatcatggttactccggaccccagcaccccaagccgcctcgcctgccatgtcatgcacctttcgtcccaccggctagatgagtattgggaccggcaacgcaatcggcatcggatggttaaggtagacccagagaccaggtacatgtcccttgctgtgtgtgaacttgaccagcccggccttggcccccttgtggctgcagcctgtagtgatggggccgtaaggctctttcttttgcaggattctgggcggattctgcagctccttgctgaaaccttccaccataagcgatgtgtcctcaaggtccactcctttacacacgaggcacccaaccagaggcggaggctcctcctgtgcagcgcagctactgatggcagcctggctttctgggatctcaccaccatgctagaccatgactccactgtcctggagcctccagtggatcctgggcttccctaccggcttggcaccccctccctgactctccaggcccacagctgtggtatcaacagcctgcacaccttgcccacccgtgagggccaccatctcgtggccagtggcagtgaagatggatccctccatgtcttcgtgcttgctgtggagatgctacagctagaagaggctgtgggagaggctgggctggtaccccagctgcgtgtgctagaggaatactctgtcccctgtgcacatgctgcccatgtgacaggcctcaagatcctaagcccaagcatcatggtctcagcctccattgatcaacggctgaccttctggcgtctggggcatggtgaacccaccttcatgaatagcactgtgttccatgtgcctgatgtggctgacatggactgctggcctgtgagccctgagtttggccaccgttgtgcccttgggggtcaggggcttgaggtttacaactggtatgactgaggtatcctgcggtggctggcgtgctgggcatggggcctgctcacagacagcatggagcagggaagggctgtctgtgcccatgctcagcatgccttgaggggaggaggtggtggccgtgggttcctgatgtcggtgcaggagctgaaggtgagtggagtgctgccaagaatatgcccgactccccatgacaagacagaactttgtaacaaacagtaccaatttattttggccgtgggtttttgctttttttccagttgatgactttgtgaacattcccaggtattggagcctctgtggccttaaatgtggctcagtggagggagacccagcatagccaggccagtatggagcacctcacgcacagctctcagaagctgcaggcggacgaacatctgaccaaagaggtgtggtcgaggctcctgaaagagaaagggcctgctggtctcatcctctgcttcctttgcctttaccctatacctctctgcacgtcccaccccgttttgctgtgtgctcacccccaggatgtgtacccggttgtagtaggagctgaaatccatgctgagctgtaccaggaacttgcatatctagagacagagactgagtcactggcccatctctttgctcttgtgccccaggccagaataaagaatagagtgtagagtg

SEQ ID NO: 657663 - DNA, 404 bp, Homo sapiens
  misc_feature (61)..(61): n is a, c, g, or t
  misc_feature (71)..(71): n is a, c, g, or t
  misc_feature (114)..(114): n is a, c, g, or t
  misc_feature (135)..(135): n is a, c, g, or t
  misc_feature (149)..(149): n is a, c, g, or t
  misc_feature (159)..(159): n is a, c, g, or t
  misc_feature (182)..(183): n is a, c, g, or t
  misc_feature (200)..(200): n is a, c, g, or t
  misc_feature (203)..(203): n is a, c, g, or t
  misc_feature (295)..(295): n is a, c, g, or t
  misc_feature (314)..(314): n is a, c, g, or t
aaatgatcggttccaaaaaattttaaatgttaagaggtttaaaacattttgctggctgttnatcataaaanttcatgaagtaaataattttgcagaaagtgcaataagccctgncttttgaactgaaaagaaggnaagtgtttttttgngcagtgcttntgaggttcatataatagtcttgnnctataatgtgctttacnacncgataaatgacaaaaacaagccctgtttcatgtttcatttagtgcaaaaagtcaaatttccccagtgttttgttgtctgttggacctgctgnaactacagtagttgaatantgcggtagcatttcagttctctttttttattaaagggctcaaaaattgttttttaaatgttttcaaaaacaattaaaaacattttatatt

SEQ ID NO: 657664 - DNA, 2114 bp, Homo sapiens
tctcgcgagagttcagctcccttcttagccgtggctgcctcagcacctcgaggatcgacatggacgctctcgaggactacgtttggccgcgggcaacctcggagcttatactcctcccagtgacgggtctggagtgcgtgggggaccggctgttggcgggtgagggtcccgatgtcctggtgtacagcttggactttggtgggcatctgcggatgataaagcgagtgcagaacctgcttggccactatcttatccatggcttccgggtacggccagagcctaatggagaccttgacttggaggccatggtggctgtgtttggaagcaagggactccgagttgtgaaaattagctggggacagggccacttctgggagctttggcgctctggcctgtggaacatatctcctcggtacgtgctgtggctgtgtggggcattggcaccccaggtggccctcaggatcctcagccaggcctgactggaaggagctgaccatagtggcaggtgctgtttccaaccagctcttggtctggtacccagcaactgccttagcaccccaagccgcctcgcctgccatgtcatgcacctttcgtcccaccggctagatgagtattgggaccggcaacgcaatcggcatcggatggttaaggtagacccagagaccaggtacatgtcccttgctgtgtgtgaacttgaccagcccggccttggcccccttgtggctgcagcctgtagtgatggggccgtaaggctctttcttttgcaggattctgggcggattctgcagctccttgctgaaaccttccaccataagcgatgtgtcctcaaggtccactcctttacacacgaggcacccaaccagaggcggaggctcctcctgtgcagcgcagctactgatggcagcctggctttctgggatctcaccaccatgctagaccatgactccactgtcctggagcctccagtggatcctgggcttccctaccggcttggcaccccctccctgactctccaggcccacagctgtggtatcaacagcctgcacaccttgcccacccgtgagggccaccatctcgtggccagtggcagtgaagatggatccctccatgtcttcgtgcttgctgtggagatgctacagctagaagaggctgtgggagaggctgggctggtaccccagctgcgtgtgctagaggaatactctgtcccctgtgcacatgctgcccatgtgacaggcctcaagatcctaagcccaagcatcatggtctcagcctccattgatcaacggctgaccttctggcgtctggggcatggtgaacccaccttcatgaatagcactgtgttccatgtgcctgatgtggctgacatggactgctggcctgtgagccctgagtttggccaccgttgtgcccttgggggtcaggggcttgaggtttacaactggtatgactgaggtatcctgcggtggctggcgtgctgggcatggggcctgctcacagacagcatggagcagggaagggctgtctgtgcccatgctcagcatgccttgaggggaggaggtggtggccgtgggttcctgatgtcggtgcaggagctgaaggtgagtggagtgctgccaagaatatgcccgactccccatgacaagacagaactttgtaacaaacagtaccaatttattttggccgtgggtttttgctttttttccagttgatgactttgtgaacattcccaggtattggagcctctgtggccttaaatgtggctcagtggagggagacccagcatagccaggccagtatggagcacctcacgcacagctctcagaagctgcaggcggacgaacatctgaccaaagaggtgtggtcgaggctcctgaaagagaaagggcctgctggtctcatcctctgcttcctttgcctttaccctatacctctctgcacgtcccaccccgttttgctgtgtgctcacccccaggatgtgtacccggttgtagtaggagctgaaatccatgctgagctgtaccaggaacttgcatatctagagacagagactgagtcactggcccatctctttgctcttgtgccccaggccagaataaagaatagagtgtagagtg

SEQ ID NO: 657665 - DNA, 133 bp, Homo sapiens
agtaaactagtgtcacaccactgtactccagcctgtgtgacagaccaaatactgcctgaaggcaaaattttaaaataaataaattgcttggggaattctacttacacgtgagataagccactgttctaaatga

SEQ ID NO: 657666 - DNA, 453 bp, Homo sapiens
gctgagcccgcttcggccgggacgatggtaaagtatttcctggtgccagagcgtgctccggatgcttcctgggacctagtggttcgccgccttcttggcatgcgtgtacccgaatccctagtatgcaaacatgtcttgacgtgaagacatagtacaccgtggaggtgactccgctgcaccagcaagactgcttgttcccggctgactcgcttgagcaagaccaacaggatagccactgctgggccgagcgacctatttcctgccaatgttgctcactcggtgtaacgtccctggcagtgatctctacttgctggacccatcagaatcagaccatgactaccttcacctggaacatcaaccacgcccggctgatggtggtggcggaacgatgtatcactgtgtgaactctgacaacagtggctggcactgaaatccgccgggaatcctggtctc

SEQ ID NO: 657667 - DNA, 773 bp, Homo sapiens
tctcgcgagagttcagctcccttcttagccgtggctgcctcagcacctcgaggatcgacatggacgctctcgaggactacgtttggccgcgggcaacctcggagcttatactcctcccagtgacgggtctggagtgcgtgggggaccggctgttggcgggtgagggtcccgatgtcctggtgtacagcttggactttggtgggcatctgcggatgataaagcgagtgcagaacctgcttggccactatcttatccatggcttccgggtacggccagagcctaatggagaccttgacttggaggccatggtggctgtgtttggaagcaagggactccgagttgtgaaaattagctggggacagggccacttctgggagctttggcgctctggcctgtggaacatgtctgactggatttgggatgcacgctggcttgagggaaatatagccttggccctgggccacaactcagtggtgctatatgaccctgtagtagggtgcatcctgcaagaggtgccctgcacagacaggtgcaccctctcttcagcctgcctgattggagacgcctggaaggagctgaccatagtggcaggtgctgtttccaaccagctcttggtctggtacccagcaactgcctttatacctctctgcacgtcccaccccgttttgctgtgtgctcacccccaggatgtgtacccggttgtagtaggagctgaaatccatgctgagctgtaccaggaacttgcatatcaataaagaatagagtgtagagtg

SEQ ID NO: 657668 - DNA, 236 bp, Homo sapiens
acatactattgagcgaaagtagcacataagacacccataaaagtagagatacatctgcctgtcacacaagtaggacttaaatatacacgtgacttgtcctcgagtttctacgctctacgaactggagaccgacaacatgtatcgaggctattctgcagtcttctctttctcaccgaatttagccccaattaattttttccgcttcaattactgtcacaaaagccggtggttatcta

SEQ ID NO: 657669 - DNA, 751 bp, Homo sapiens
tctcgcgagagttcagctcccttcttagccgtggctgcctcagcacctcgaggatcgacatggacgctctcgaggactacgtttggccgcgggcaacctcggagcttatactcctcccagtgacgggtctggagtgcgtgggggaccggctgttggcgggtgagggtcccgatgtcctggtgtacagcttggactttggtgggcatctgcggatgataaagcgagtgcagaacctgcttggccactatcttatccatggcttccgggtacggccagagcctaatggagaccttgacttggaggccatggtggctgtgtttggaagcaagggactccgagttgtgaaaattagctggggacagggccacttctgggagctttggcgctctggcctgtggaacatatctcctcggtacgtgctgtggctgtgtggggcattggcaccccaggtggccctcaggatcctcagccaggcctgactggaaggagctgaccatagtggcaggtgctgtttccaaccagctcttggtctggtacccagcaactgccttagcaccccaagccgcctcgcctgccatgtcatgcacctttcgtcccaccggctagaatgaaggttaattttggggggggggaaacccccggggccaaaaccgggccaaaattcccgggggccaatttccgggggactttgggggttttttaacacaggggggtttaaggaaacccccccaagggaaagggaaaccccaag

SEQ ID NO: 657670 - DNA, 5654 bp, Homo sapiens
  misc_feature (5629)..(5630): n is a, c, g, or t
  misc_feature (5632)..(5632): n is a, c, g, or t
  misc_feature (5634)..(5635): n is a, c, g, or t
  misc_feature (5638)..(5638): n is a, c, g, or t
  misc_feature (5640)..(5641): n is a, c, g, or t
tctcgcgagagttcagctcccttcttagccgtggctgcctcagcacctcgaggatcgacatggacgctctcgaggactacgtttggccgcgggcaacctcggagcttatactcctcccagtgacgggtctggagtgcgtgggggaccggctgttggcgggtgagggtcccgatgtcctggtgtacagcttggactttggtgggcatctgcggatgataaagcgagtgcagaacctgcttggccactatcttatccatggcttccgggtacggccagagcctaatggagaccttgacttggaggccatggtggctgtgtttggaagcaagggactccgagttgtgaaaattagctggggacagggccacttctgggagctttggcgctctggcctgtggaacatgtctgactggatttgggatgcacgctggcttgagggaaatatagccttggccctgggccacaactcagtggtgctatatgaccctgtagtagggtgcatcctgcaagaggtgccctgcacagacaggtgcaccctctcttcagcctgcctgattggagacgcctggaaggagctgaccatagtggcaggtgctgtttccaaccagctcttggtctggtacccagcaactgccttagcagacaacaaacctgtagcacctgaccgacgaatcagtgggcatgtgggcatcatcttcagcatgtcatacctggaaagcaagggattgctggctacagcttcagaagaccgaagcgttcgtatctggaaggtgggcgacctgcgagtgcctgggggtcgggtgcagaatattgggcactgctttgggcacagcgcccgtgtgtggcaggtcaagcttctagagaattaccttatcagtgcaggagaggattgtgtctgcttggtgtggagccatgaaggtgagatcctccaggcctttcggggacaccagggacgtgggatccgggccatagctgcccatgagaggcaggcctgggtgatcactgggggtgatgactcaggcattcggctgtggcacttggtagggcgtgggtaccggggattgggggtctcggctctctgcttcaagtcccgtagtaggccaggtacactcaaggctgtgactctggctggctcttggcgactgctggcagtgactgatacaggggccctgtatctctatgacgtcgaggtcaagtgctgggagcagctgctagaggataaacatttccagtcctactgcctgctggaggcagctcctggtcccgagggcttcggattgtgtgctatggccaatggggaaggtcgtgtcaaggttgtccccatcaacactccaactgctgctgtggaccagaccctgtttcctgggaaggtgcacagcttgagctgggccctgcgtggttatgaggagctcctgttgctggcatcgggccctggcggggtagtagcttgcctagagatctcagccgcaccctctggcaaggccatctttgtcaaggaacgttgtcggtacctgctgcccccaagcaagcagagatggcacacatgcagtgccttcctacccccaggtgacttcctggtgtgtggtgaccgccggggctctgtgctgctattcccctccagaccaggtctgctcaaggaccctggggtgggaggcaaggctcgggctggtgctggggcacctgtagtgggtagtggtagtagtgggggtgggaatgctttcactgggttgggcccagtgtctaccctgccctctctgcacgggaagcagggtgtgacctcagtcacatgccatggtggctatgtgtataccacagggcgtgatggagcctactaccagctgtttgtacgagacggccagctccagccagtcctaaggcagaagtcctgtcgaggcatgaactggctagctgggctccgtatagtgcccgatgggagcatggttatcctgggtttccatgccaatgagtttgtggtgtggaaccctcggtcacacgagaagctgcacatcgtcaactgtggtggagggcaccgttcgtgggcattctctgatactgaggcggccatggcctttgcttacctcaaggatggggatgtcatgctgtacagggctctgggtggctgcacccggccacacgtgattctccgggagggtctgcatggccgtgagatcacttgtgtaaagcgtgtgggcaccattaccctggggcctgaatatggagtgcccagcttcatgcagcctgatgacctggagcctggcagtgaggggcccgacttgactgacattgtgatcacatgtagtgaggacactactgtctgtgtcctagcactccctacaaccacaggctcagcccacgcactcacagctgtttgtaaccatatctcctcggtacgtgctgtggctgtgtggggcattggcaccccaggtggccctcaggatcctcagccaggcctgactgcccatgtggtgtctgcgggggggcgggctgagatgcactgcttcagcatcatggttactccggaccccagcaccccaagccgcctcgcctgccatgtcatgcacctttcgtcccaccggctagatgagtattgggaccggcaacgcaatcggcatcggatggttaaggtagacccagagaccaggtacatgtcccttgctgtgtgtgaacttgaccagcccggccttggcccccttgtggctgcagcctgtagtgatggggccgtaaggctctttcttttgcaggattctgggcggattctgcagctccttgctgaaaccttccaccataagcgatgtgtcctcaaggtccactcctttacacacgaggcacccaaccagaggcggaggctcctcctgtgcagcgcagctactgatggcagcctggctttctgggatctcaccaccatgctagaccatgactccactgtcctggagcctccagtggatcctgggcttccctaccggcttggcaccccctccctgactctccaggcccacagctgtggtatcaacagcctgcacaccttgcccacccgtgagggccaccatctcgtggccagtggcagtgaagatggatccctccatgtcttcgtgcttgctgtggagatgctacagctagaagaggctgtgggagaggctgggctggtaccccagctgcgtgtgctagaggaatactctgtcccctgtgcacatgctgcccatgtgacaggcctcaagatcctaagcccaagcatcatggtctcagcctccattgatcaacggctgaccttctggcgtctggggcatggtgaacccaccttcatgaatagcactgtgttccatgtgcctgatgtggctgacatggactgctggcctgtgagccctgagtttggccaccgttgtgcccttgggggtcaggggcttgaggtttacaactggtatgactgaggtatcctgcggtggctggcgtgctgggcatggggcctgctcacagacagcatggagcagggaagggctgtctgtgcccatgctcagcatgccttgaggggaggaggtggtggccgtgggttcctgatgtcggtgcaggagctgaaggtgagtggagtgctgccaagaatatgcccgactccccatgacaagacagaactttgtaacaaacagtaccaatttattttggccgtgggtttttgctttttttccagttgatgactttgtgaacattcccaggtattggagcctctgtggccttaaatgtggctcagtggagggagacccagcatagccaggccagtatggagcacctcacgcacagctctcagaagctgcaggcggacgaacatctgaccaaagaggtgtggtcgaggctcctgaaagagaaagggcctgctggtctcatcctctgcttcctttgcctttaccctatacctctctgcacgtcccaccccgttttgctgtgtgctcacccccaggatgtgtacccggttgtagtaggagctgaaatccatgctgagctgtaccaggaacttgcatatctagagacagagactgagtcactggcccatctctttgctcttgtgccccaggccagaataaagaatagagtgtagagtgtcctggttgtctatgcctcaccatctctgtgcgtacagcaatgtggagccccggggctgtgcagtccagcactgctgtccggctcagcagatccggaaaggggaggatactgttgaagagcaacaaccactcaccctgttggggagaaaggtgctgggaggggaagtccaggcctccttgtgccagctaccaggagggacactcacctcatcatgtagcagtgagaagtccagactgctcacaggaggaaaagtggggtacagaccttgttccatactacacttgtaactctcaaagagtgtggcaagacgggcacaattatacatgacaaaggtgccactctttgtgcccttcgtggagatactgctgtcagccagagccaggaagagctgactctgtggggctgtgctcagcatctcaaacttgatggtggccacagagagaacaccaaagatctctgtccaggctgggtcttgtgccagatccccaccatgcttcagtgctgaggccttgcacacctgggtatgccggaactcgtagtactcaggggcagtcatcagagtgccaggtgcaccagctactttcacagggccacagatgaggtgcttctgtctgagtggagccttgtcaaccaacttccgccaaagcaggtccaacttctgttgctggaactcctcctcacagctaacaacatgtacaaccaggcagccgcctgtaccagtatctgaggccccagccaggcctgggtggctgtcctcgggccaatgccatagagcctcttgcagctcagccagcacagagaggagatcctcagtcaccagacagttgtccaggttggggtcatagccagctgtgcggccctgttcttccaccagctccttcagacacagtctgcctaggatgccaggggacagtgtcctcccgtcattagcagaggtaagttcttcaagggcgtggctcctcagggtgtgggaggaagctctctccgaggcagcgggccagtccacccgcagttgctgcaggaaggtcagcatgtgcggatcccgcacagctggcactaggcgcacgcacaccccgtgagcgcgcagggctcgcgccaggtgatcggccacgagcaccgtacgcagctggctcaagcggagtgcgcagggggagctgcgcagtgctgggcagtgtagtaagacgcgctggcccagcgaggcaggcgaggcgggcgtggcataggcggccacggcgctgaggacgcgctcgaagacggcggaccgctgcagttggagagacagacccgcgggggtcggcgcgcagcgcagcaccggggccacaccggggccctgcaggcaggcgagggcatggagcaaatgctccggaacctggccgtcatcgaagcgcgcctgcagcgcgcggtgcggtgccagaaagtctcgggaacgcaggtggcgggtgcgcgtctccttgatccacaccggaccgcctggccccagggccgcgttgagggcccccagcgtctccccgaccccaaggcgccctggtcgccatgcatnncnannttncnngccagtacagccg

SEQ ID NO: 657671 - DNA, 233 bp, Homo sapiens
gaaggacttgaaagctagtagctgcattctggtatatcaaaggctgatggatgatcctcgactgcggagtggagctgaatgatggcgtgatcattaccgtctgttgttgcagctgaatttgaggttgaggctagcgcttgtagcggagctgaagaataggagttgccctgcatgtgctgggaactgaggtggaagaaaccttgacttgcagagttgtagcctgtggggaggcc

SEQ ID NO: 657672 - DNA, 326 bp, Homo sapiens
ttagctcgatattcatatatggcataattttcgctatctagtatcttcaaatttgtagtctttgtaacacccacataaccttttgtggatcactgtacactcactatttggtagacagaatccatgtacctttgctcaaggttcagcactgaataatttcattgtcattctttcatttgcatgtttgtgctttttaaatgagccaagcactcagcggggaaactatcacctaaaatcagtgaggaaacacacgcactcacaaagggcaggggcatggggatcgtggcgagcagagtgggcgaggtgcctttacgacatggtgatta

SEQ ID NO: 657673 - DNA, 5583 bp, Homo sapiens
  misc_feature (5558)..(5559): n is a, c, g, or t
  misc_feature (5561)..(5561): n is a, c, g, or t
  misc_feature (5563)..(5564): n is a, c, g, or t
  misc_feature (5567)..(5567): n is a, c, g, or t
  misc_feature (5569)..(5570): n is a, c, g, or t
tctcgcgagagttcagctcccttcttagccgtggctgcctcagcacctcgaggatcgacatggacgctctcgaggactacgtttggccgcgggcaacctcggagcttatactcctcccagtgacgggtctggagtgcgtgggggaccggctgttggcgggtgagggtcccgatgtcctggtgtacagcttggactttggtgggcatctgcggatgataaagcgagtgcagaacctgcttggccactatcttatccatggcttccgggtacggccagagcctaatggagaccttgacttggaggccatggtggctgtgtttggaagcaagggactccgagttgtgaaaattagctggggacagggccacttctgggagctttggcgctctggcctgtggaacatgtctgactggatttgggatgcacgctggcttgagggaaatatagccttggccctgggccacaactcagtggtgctatatgaccctgtagtagggtgcatcctgcaagaggtgccctgcacagacaggtgcaccctctcttcagcctgcctgattggagacgcctggaaggagctgaccatagtggcaggtgctgtttccaaccagctcttggtctggtacccagcaactgccttagcagacaacaaacctgtagcacctgaccgacgaatcagtgggcatgtgggcatcatcttcagcatgtcatacctggaaagcaagggattgctggctacagcttcagaagaccgaagcgttcgtatctggaaggtgggcgacctgcgagtgcctgggggtcgggtgcagaatattgggcactgctttgggcacagcgcccgtgtgtggcaggtcaagcttctagagaattaccttatcagtgcaggagaggattgtgtctgcttggtgtggagccatgaaggtgagatcctccaggcctttcggggacaccagggacgtgggatccgggccatagctgcccatgagaggcaggcctgggtgatcactgggggtgatgactcaggcattcggctgtggcacttggtagggcgtgggtaccggggattgggggtctcggctctctgcttcaagtcccgtagtaggccaggtacactcaaggctgtgactctggctggctcttggcgactgctggcagtgactgatacaggggccctgtatctctatgacgtcgaggtcaagtgctgggagcagctgctagaggataaacatttccagtcctactgcctgctggaggcagctcctggtcccgagggcttcggattgtgtgctatggccaatggggaaggtcgtgtcaaggttgtccccatcaacactccaactgctgctgtggaccagaccctgtttcctgggaaggtgcacagcttgagctgggccctgcgtggttatgaggagctcctgttgctggcatcgggccctggcggggtagtagcttgcctagagatctcagccgcaccctctggcaaggccatctttgtcaaggaacgttgtcggtacctgctgcccccaagcaagcagagatggcacacatgcagtgccttcctacccccaggtgacttcctggtgtgtggtgaccgccggggctctgtgctgctattcccctccagaccaggtctgctcaaggaccctggggtgggaggcaaggctcgggctggtgctggggcacctgtagtgggtagtggtagtagtgggggtgggaatgctttcactgggttgggcccagtgtctaccctgccctctctgcacgggaagcagggtgtgacctcagtcacatgccatggtggctatgtgtataccacagggcgtgatggagcctactaccagctgtttgtacgagacggccagctccagccagtcctaaggcagaagtcctgtcgaggcatgaactggctagctgggctccgtatagtgcccgatgggagcatggttatcctgggtttccatgccaatgagtttgtggtgtggaaccctcggtcacacgagaagctgcacatcgtcaactgtggtggagggcaccgttcgtgggcattctctgatactgaggcggccatggcctttgcttacctcaaggatggggatgtcatgctgtacagggctctgggtggctgcacccggccacacgtgattctccgggagggtctgcatggccgtgagatcacttgtgtaaagcgtgtgggcaccattaccctggggcctgaatatggagtgcccagcttcatgcagcctgatgacctggagcctggcagtgaggggcccgacttgactgacattgtgatcacatgtagtgaggacactactgtctgtgtcctagcactccctacaaccacaggctcagcccacgcactcacagctgtttgtaaccatatctcctcggtacgtgctgtggctgtgtggggcattggcaccccaggtggccctcaggatcctcagccaggcctgactgcccatgtggtgtctgcgggggggcgggctgagatgcactgcttcagcatcatggttactccggaccccagcaccccaagccgcctcgcctgccatgtcatgcacctttcgtcccaccggctagatgagtattgggaccggcaacgcaatcggcatcggatggttaaggtagacccagagaccaggtacatgtcccttgctgtgtgtgaacttgaccagcccggccttggcccccttgtggctgcagcctgtagtgatggggccgtaaggctctttcttttgcaggattctgggcggattctgcagctccttgctgaaaccttccaccataagcgatgtgtcctcaaggtccactcctttacacacgaggcacccaaccagaggcggaggctcctcctgtgcagcgcagctactgatggcagcctggctttctgggatctcaccaccatgctagaccatgactccactgtcctggagcctccagtggatcctgggcttccctaccggcttggcaccccctccctgactctccaggcccacagctgtggtatcaacagcctgcacaccttgcccacccgtgagggccaccatctcgtggccagtggcagtgaagatggatccctccatgtcttcgtgcttgctgtggagatgctacagctagaagaggctgtgggagaggctgggctggtaccccagctgcgtgtgctagaggaatactctgtcccctgtgcacatgctgcccatgtgacaggcctcaagatcctaagcccaagcatcatggtctcagcctccattgatcaacggctgaccttctggcgtctggggcatggtgaacccaccttcatgaatagcactgtgttccatgtgcctgatgtggctgacatggactgctggcctgtgagccctgagtttggccaccgttgtgcccttgggggtcaggggcttgaggtttacaactggtatgactgaggtatcctgcggtggctggcgtgctgggcatggggcctgctcacagacagcatggagcagggaagggctgtctgtgcccatgctcagcatgccttgaggggaggaggtggtggccgtgggttcctgatgtcggtgcaggagctgaaggtgagtggagtgctgccaagaatatgcccgactccccatgacaagacagaactttgtaacaaacagtaccaatttattttggccgtgggtttttgctttttttccagttgatgactttgtgaacattcccaggtattggagcctctgtggccttaaatgtggctcagtggagggagacccagcatagccaggccagtatggagcacctcacgcacagctctcagaagctgcaggcggacgaacatctgaccaaagaggtgtggtcgaggctcctgaaagagaaagggcctgctggtctcatcctctgcttcctttgcctttaccctatacctctctgcacgtcccaccccgttttgctgtgtgctcacccccaggatgtgtacccggttgtagtaggagctgaaatccatgctgagctgtaccaggaacttgcatatctagagacagagactgagtcactggcccatctctttgctcttgtgccccaggccagaataaagaatagagtgtagagtgtcctggttgtctatgcctcaccatctctgtgcgtacagcaatgtggagccccggggctgtgcagtccagcactgctgtccggctcagcagatccggaaaggggaggatactgttgaagagcaacaaccactcaccctcatcatgtagcagtgagaagtccagactgctcacaggaggaaaagtggggtacagaccttgttccatactacacttgtaactctcaaagagtgtggcaagacgggcacaattatacatgacaaaggtgccactctttgtgcccttcgtggagatactgctgtcagccagagccaggaagagctgactctgtggggctgtgctcagcatctcaaacttgatggtggccacagagagaacaccaaagatctctgtccaggctgggtcttgtgccagatccccaccatgcttcagtgctgaggccttgcacacctgggtatgccggaactcgtagtactcaggggcagtcatcagagtgccaggtgcaccagctactttcacagggccacagatgaggtgcttctgtctgagtggagccttgtcaaccaacttccgccaaagcaggtccaacttctgttgctggaactcctcctcacagctaacaacatgtacaaccaggcagccgcctgtaccagtatctgaggccccagccaggcctgggtggctgtcctcgggccaatgccatagagcctcttgcagctcagccagcacagagaggagatcctcagtcaccagacagttgtccaggttggggtcatagccagctgtgcggccctgttcttccaccagctccttcagacacagtctgcctaggatgccaggggacagtgtcctcccgtcattagcagaggtaagttcttcaagggcgtggctcctcagggtgtgggaggaagctctctccgaggcagcgggccagtccacccgcagttgctgcaggaaggtcagcatgtgcggatcccgcacagctggcactaggcgcacgcacaccccgtgagcgcgcagggctcgcgccaggtgatcggccacgagcaccgtacgcagctggctcaagcggagtgcgcagggggagctgcgcagtgctgggcagtgtagtaagacgcgctggcccagcgaggcaggcgaggcgggcgtggcataggcggccacggcgctgaggacgcgctcgaagacggcggaccgctgcagttggagagacagacccgcgggggtcggcgcgcagcgcagcaccggggccacaccggggccctgcaggcaggcgagggcatggagcaaatgctccggaacctggccgtcatcgaagcgcgcctgcagcgcgcggtgcggtgccagaaagtctcgggaacgcaggtggcgggtgcgcgtctccttgatccacaccggaccgcctggccccagggccgcgttgagggcccccagcgtctccccgaccccaaggcgccctggtcgccatgcatnncnannttncnngccagtacagccg

SEQ ID NO: 657674 - DNA, 341 bp, Homo sapiens
tcgtgggcagtagacaccaccgatagatatcatacaatttctcaaatgacaaagatttgccattatgaattcctttgctatagacgttcaaacaccccaagccaagattgagcctcagtcccatagtcgtgacattacaagctgctcgcgatgagggtgtcaggcaatgtgcaagggggcgaggtgagaagcaagaaagcaaagtggatcacgtctaatctatgctgaaggagaacttcaagtaagggagctccgtggcccgggacctggctgtgaacaccctccgctgggagcctcagtggtcagcagtggccacagcagtgcgagccactgcaaaagcg

SEQ ID NO: 657675 - DNA, 5557 bp, Homo sapiens
  misc_feature (5532)..(5533): n is a, c, g, or t
  misc_feature (5535)..(5535): n is a, c, g, or t
  misc_feature (5537)..(5538): n is a, c, g, or t
  misc_feature (5541)..(5541): n is a, c, g, or t
  misc_feature (5543)..(5544): n is a, c, g, or t
tctcgcgagagttcagctcccttcttagccgtggctgcctcagcacctcgaggatcgacatggacgctctcgaggactacgtttggccgcgggcaacctcggagcttatactcctcccagtgacgggtctggagtgcgtgggggaccggctgttggcgggtgagggtcccgatgtcctggtgtacagcttggactttggtgggcatctgcggatgataaagcgagtgcagaacctgcttggccactatcttatccatggcttccgggtacggccagagcctaatggagaccttgacttggaggccatggtggctgtgtttggaagcaagggactccgagttgtgaaaattagctggggacagggccacttctgggagctttggcgctctggcctgtggaacatgtctgactggatttgggatgcacgctggcttgagggaaatatagccttggccctgggccacaactcagtggtgctatatgaccctgtagtagggtgcatcctgcaagaggtgccctgcacagacaggtgcaccctctcttcagcctgcctgattggagacgcctggaaggagctgaccatagtggcaggtgctgtttccaaccagctcttggtctggtacccagcaactgccttagcagacaacaaacctgtagcacctgaccgacgaatcagtgggcatgtgggcatcatcttcagcatgtcatacctggaaagcaagggattgctggctacagcttcagaagaccgaagcgttcgtatctggaaggtgggcgacctgcgagtgcctgggggtcgggtgcagaatattgggcactgctttgggcacagcgcccgtgtgtggcaggtcaagcttctagagaattaccttatcagtgcaggagaggattgtgtctgcttggtgtggagccatgaaggtgagatcctccaggcctttcggggacaccagggacgtgggatccgggccatagctgcccatgagaggcaggcctgggtgatcactgggggtgatgactcaggcattcggctgtggcacttggtagggcgtgggtaccggggattgggggtctcggctctctgcttcaagtcccgtagtaggccaggtacactcaaggctgtgactctggctggctcttggcgactgctggcagtgactgatacaggggccctgtatctctatgacgtcgaggtcaagtgctgggagcagctgctagaggataaacatttccagtcctactgcctgctggaggcagctcctggtcccgagggcttcggattgtgtgctatggccaatggggaaggtcgtgtcaaggttgtccccatcaacactccaactgctgctgtggaccagaccctgtttcctgggaaggtgcacagcttgagctgggccctgcgtggttatgaggagctcctgttgctggcatcgggccctggcggggtagtagcttgcctagagatctcagccgcaccctctggcaaggccatctttgtcaaggaacgttgtcggtacctgctgcccccaagcaagcagagatggcacacatgcagtgccttcctacccccaggtgacttcctggtgtgtggtgaccgccggggctctgtgctgctattcccctccagaccaggtctgctcaaggaccctggggtgggaggcaaggctcgggctggtgctggggcacctgtagtgggtagtggtagtagtgggggtgggaatgctttcactgggttgggcccagtgtctaccctgccctctctgcacgggaagcagggtgtgacctcagtcacatgccatggtggctatgtgtataccacagggcgtgatggagcctactaccagctgtttgtacgagacggccagctccagccagtcctaaggcagaagtcctgtcgaggcatgaactggctagctgggctccgtatagtgcccgatgggagcatggttatcctgggtttccatgccaatgagtttgtggtgtggaaccctcggtcacacgagaagctgcacatcgtcaactgtggtggagggcaccgttcgtgggcattctctgatactgaggcggccatggcctttgcttacctcaaggatggggatgtcatgctgtacagggctctgggtggctgcacccggccacacgtgattctccgggagggtctgcatggccgtgagatcacttgtgtaaagcgtgtgggcaccattaccctggggcctgaatatggagtgcccagcttcatgcagcctgatgacctggagcctggcagtgaggggcccgacttgactgacattgtgatcacatgtagtgaggacactactgtctgtgtcctagcactccctacaaccacaggctcagcccacgcactcacagctgtttgtaaccatatctcctcggtacgtgctgtggctgtgtggggcattggcaccccaggtggccctcaggatcctcagccaggcctgactgcccatgtggtgtctgcgggggggcgggctgagatgcactgcttcagcatcatggttactccggaccccagcaccccaagccgcctcgcctgccatgtcatgcacctttcgtcccaccggctagatgagtattgggaccggcaacgcaatcggcatcggatggttaaggtagacccagagaccaggtacatgtcccttgctgtgtgtgaacttgaccagcccggccttggcccccttgtggctgcagcctgtagtgatggggccgtaaggctctttcttttgcaggattctgggcggattctgcagctccttgctgaaaccttccaccataagcgatgtgtcctcaaggtccactcctttacacacgaggcacccaaccagaggcggaggctcctcctgtgcagcgcagctactgatggcagcctggctttctgggatctcaccaccatgctagaccatgactccactgtcctggagcctccagtggatcctgggcttccctaccggcttggcaccccctccctgactctccaggcccacagctgtggtatcaacagcctgcacaccttgcccacccgtgagggccaccatctcgtggccagtggcagtgaagatggatccctccatgtcttcgtgcttgctgtggagatgctacagctagaagaggctgtgggagaggctgggctggtaccccagctgcgtgtgctagaggaatactctgtcccctgtgcacatgctgcccatgtgacaggcctcaagatcctaagcccaagcatcatggtctcagcctccattgatcaacggctgaccttctggcgtctggggcatggtgaacccaccttcatgaatagcactgtgttccatgtgcctgatgtggctgacatggactgctggcctgtgagccctgagtttggccaccgttgtgcccttgggggtcaggggcttgaggtttacaactggtatgactgaggtatcctgcggtggctggcgtgctgggcatggggcctgctcacagacagcatggagcagggaagggctgtctgtgcccatgctcagcatgccttgaggggaggaggtggtggccgtgggttcctgatgtcggtgcaggagctgaaggtgagtggagtgctgccaagaatatgcccgactccccatgacaagacagaactttgtaacaaacagtaccaatttattttggccgtgggtttttgctttttttccagttgatgactttgtgaacattcccaggtattggagcctctgtggccttaaatgtggctcagtggagggagacccagcatagccaggccagtatggagcacctcacgcacagctctcagaagctgcaggcggacgaacatctgaccaaagaggtgtggtcgaggctcctgaaagagaaagggcctgctggtctcatcctctgcttcctttgcctttaccctatacctctctgcacgtcccaccccgttttgctgtgtgctcacccccaggatgtgtacccggttgtagtaggagctgaaatccatgctgagctgtaccaggaacttgcatatctagagacagagactgagtcactggcccatctctttgctcttgtgccccaggccagaataaagaatagagtgtagagtgtcctggttgtctatgcctcaccatctctgtgcgtacagcaatgtggagccccggggctgtgcagtccagcactgctgtccggctcagcagatccggaaaggggaggatactcatcatgtagcagtgagaagtccagactgctcacaggaggaaaagtggggtacagaccttgttccatactacacttgtaactctcaaagagtgtggcaagacgggcacaattatacatgacaaaggtgccactctttgtgcccttcgtggagatactgctgtcagccagagccaggaagagctgactctgtggggctgtgctcagcatctcaaacttgatggtggccacagagagaacaccaaagatctctgtccaggctgggtcttgtgccagatccccaccatgcttcagtgctgaggccttgcacacctgggtatgccggaactcgtagtactcaggggcagtcatcagagtgccaggtgcaccagctactttcacagggccacagatgaggtgcttctgtctgagtggagccttgtcaaccaacttccgccaaagcaggtccaacttctgttgctggaactcctcctcacagctaacaacatgtacaaccaggcagccgcctgtaccagtatctgaggccccagccaggcctgggtggctgtcctcgggccaatgccatagagcctcttgcagctcagccagcacagagaggagatcctcagtcaccagacagttgtccaggttggggtcatagccagctgtgcggccctgttcttccaccagctccttcagacacagtctgcctaggatgccaggggacagtgtcctcccgtcattagcagaggtaagttcttcaagggcgtggctcctcagggtgtgggaggaagctctctccgaggcagcgggccagtccacccgcagttgctgcaggaaggtcagcatgtgcggatcccgcacagctggcactaggcgcacgcacaccccgtgagcgcgcagggctcgcgccaggtgatcggccacgagcaccgtacgcagctggctcaagcggagtgcgcagggggagctgcgcagtgctgggcagtgtagtaagacgcgctggcccagcgaggcaggcgaggcgggcgtggcataggcggccacggcgctgaggacgcgctcgaagacggcggaccgctgcagttggagagacagacccgcgggggtcggcgcgcagcgcagcaccggggccacaccggggccctgcaggcaggcgagggcatggagcaaatgctccggaacctggccgtcatcgaagcgcgcctgcagcgcgcggtgcggtgccagaaagtctcgggaacgcaggtggcgggtgcgcgtctccttgatccacaccggaccgcctggccccagggccgcgttgagggcccccagcgtctccccgaccccaaggcgccctggtcgccatgcatnncnannttncnngccagtacagccg

SEQ ID NO: 657676 - DNA, 5387 bp, Homo sapiens
  misc_feature (5362)..(5363): n is a, c, g, or t
  misc_feature (5365)..(5365): n is a, c, g, or t
  misc_feature (5367)..(5368): n is a, c, g, or t
  misc_feature (5371)..(5371): n is a, c, g, or t
  misc_feature (5373)..(5374): n is a, c, g, or t
tctcgcgagagttcagctcccttcttagccgtggctgcctcagcacctcgaggatcgacatggacgctctcgaggactacgtttggccgcgggcaacctcggagcttatactcctcccagtgacgggtctggagtgcgtgggggaccggctgttggcgggtgagggtcccgatgtcctggtgtacagcttggactttggtgggcatctgcggatgataaagcgagtgcagaacctgcttggccactatcttatccatggcttccgggtacggccagagcctaatggagaccttgacttggaggccatggtggctgtgtttggaagcaagggactccgagttgtgaaaattagctggggacagggccacttctgggagctttggcgctctggcctgtggaacatgtctgactggatttgggatgcacgctggcttgagggaaatatagccttggccctgggccacaactcagtggtgctatatgaccctgtagtagggtgcatcctgcaagaggtgccctgcacagacaggtgcaccctctcttcagcctgcctgattggagacgcctggaaggagctgaccatagtggcaggtgctgtttccaaccagctcttggtctggtacccagcaactgccttagcagacaacaaacctgtagcacctgaccgacgaatcagtgggcatgtgggcatcatcttcagcatgtcatacctggaaagcaagggattgctggctacagcttcagaagaccgaagcgttcgtatctggaaggtgggcgacctgcgagtgcctgggggtcgggtgcagaatattgggcactgctttgggcacagcgcccgtgtgtggcaggtcaagcttctagagaattaccttatcagtgcaggagaggattgtgtctgcttggtgtggagccatgaaggtgagatcctccaggcctttcggggacaccagggacgtgggatccgggccatagctgcccatgagaggcaggcctgggtgatcactgggggtgatgactcaggcattcggctgtggcacttggtagggcgtgggtaccggggattgggggtctcggctctctgcttcaagtcccgtagtaggccaggtacactcaaggctgtgactctggctggctcttggcgactgctggcagtgactgatacaggggccctgtatctctatgacgtcgaggtcaagtgctgggagcagctgctagaggataaacatttccagtcctactgcctgctggaggcagctcctggtcccgagggcttcggattgtgtgctatggccaatggggaaggtcgtgtcaaggttgtccccatcaacactccaactgctgctgtggaccagaccctgtttcctgggaaggtgcacagcttgagctgggccctgcgtggttatgaggagctcctgttgctggcatcgggccctggcggggtagtagcttgcctagagatctcagccgcaccctctggcaaggccatctttgtcaaggaacgttgtcggtacctgctgcccccaagcaagcagagatggcacacatgcagtgccttcctacccccaggtgacttcctggtgtgtggtgaccgccggggctctgtgctgctattcccctccagaccaggtctgctcaaggaccctggggtgggaggcaaggctcgggctggtgctggggcacctgtagtgggtagtggtagtagtgggggtgggaatgctttcactgggttgggcccagtgtctaccctgccctctctgcacgggaagcagggtgtgacctcagtcacatgccatggtggctatgtgtataccacagggcgtgatggagcctactaccagctgtttgtacgagacggccagctccagccagtcctaaggcagaagtcctgtcgaggcatgaactggctagctgggctccgtatagtgcccgatgggagcatggttatcctgggtttccatgccaatgagtttgtggtgtggaaccctcggtcacacgagaagctgcacatcgtcaactgtggtggagggcaccgttcgtgggcattctctgatactgaggcggccatggcctttgcttacctcaaggatggggatgtcatgctgtacagggctctgggtggctgcacccggccacacgtgattctccgggagggtctgcatggccgtgagatcacttgtgtaaagcgtgtgggcaccattaccctggggcctgaatatggagtgcccagcttcatgcagcctgatgacctggagcctggcagtgaggggcccgacttgactgacattgtgatcacatgtagtgaggacactactgtctgtgtcctagcactccctacaaccacaggctcagcccacgcactcacagctgtttgtaaccatatctcctcggtacgtgctgtggctgtgtggggcattggcaccccaggtggccctcaggatcctcagccaggcctgactgcccatgtggtgtctgcgggggggcgggctgagatgcactgcttcagcatcatggttactccggaccccagcaccccaagccgcctcgcctgccatgtcatgcacctttcgtcccaccggctagatgagtattgggaccggcaacgcaatcggcatcggatggttaaggtagacccagagaccaggtacatgtcccttgctgtgtgtgaacttgaccagcccggccttggcccccttgtggctgcagcctgtagtgatggggccgtaaggctctttcttttgcaggattctgggcggattctgcagctccttgctgaaaccttccaccataagcgatgtgtcctcaaggtccactcctttacacacgaggcacccaaccagaggcggaggctcctcctgtgcagcgcagctactgatggcagcctggctttctgggatctcaccaccatgctagaccatgactccactgtcctggagcctccagtggatcctgggcttccctaccggcttggcaccccctccctgactctccaggcccacagctgtggtatcaacagcctgcacaccttgcccacccgtgagggccaccatctcgtggccagtggcagtgaagatggatccctccatgtcttcgtgcttgctgtggagatgctacagctagaagaggctgtgggagaggctgggctggtaccccagctgcgtgtgctagaggaatactctgtcccctgtgcacatgctgcccatgtgacaggcctcaagatcctaagcccaagcatcatggtctcagcctccattgatcaacggctgaccttctggcgtctggggcatggtgaacccaccttcatgaatagcactgtgttccatgtgcctgatgtggctgacatggactgctggcctgtgagccctgagtttggccaccgttgtgcccttgggggtcaggggcttgaggtttacaactggtatgactgaggtatcctgcggtggctggcgtgctgggcatggggcctgctcacagacagcatggagcagggaagggctgtctgtgcccatgctcagcatgccttgaggggaggaggtggtggccgtgggttcctgatgtcggtgcaggagctgaaggtgagtggagtgctgccaagaatatgcccgactccccatgacaagacagaactttgtaacaaacagtaccaatttattttggccgtgggtttttgctttttttccagttgatgactttgtgaacattcccaggtattggagcctctgtggccttaaatgtggctcagtggagggagacccagcatagccaggccagtatggagcacctcacgcacagctctcagaagctgcaggcggacgaacatctgaccaaagaggtgtggtcgaggctcccccaggatgtgtacccggttgtagtaggagctgaaatccatgctgagctgtaccaggaacttgcatatcatctctgtgcgtacagcaatgtggagccccggggctgtgcagtccagcactgctgtccggctcagcagatccggaaaggggaggatactgttgaagagcaacaaccactcaccctcatcatgtagcagtgagaagtccagactgctcacaggaggaaaagtggggtacagaccttgttccatactacacttgtaactctcaaagagtgtggcaagacgggcacaattatacatgacaaaggtgccactctttgtgcccttcgtggagatactgctgtcagccagagccaggaagagctgactctgtggggctgtgctcagcatctcaaacttgatggtggccacagagagaacaccaaagatctctgtccaggctgggtcttgtgccagatccccaccatgcttcagtgctgaggccttgcacacctgggtatgccggaactcgtagtactcaggggcagtcatcagagtgccaggtgcaccagctactttcacagggccacagatgaggtgcttctgtctgagtggagccttgtcaaccaacttccgccaaagcaggtccaacttctgttgctggaactcctcctcacagctaacaacatgtacaaccaggcagccgcctgtaccagtatctgaggccccagccaggcctgggtggctgtcctcgggccaatgccatagagcctcttgcagctcagccagcacagagaggagatcctcagtcaccagacagttgtccaggttggggtcatagccagctgtgcggccctgttcttccaccagctccttcagacacagtctgcctaggatgccaggggacagtgtcctcccgtcattagcagaggtaagttcttcaagggcgtggctcctcagggtgtgggaggaagctctctccgaggcagcgggccagtccacccgcagttgctgcaggaaggtcagcatgtgcggatcccgcacagctggcactaggcgcacgcacaccccgtgagcgcgcagggctcgcgccaggtgatcggccacgagcaccgtacgcagctggctcaagcggagtgcgcagggggagctgcgcagtgctgggcagtgtagtaagacgcgctggcccagcgaggcaggcgaggcgggcgtggcataggcggccacggcgctgaggacgcgctcgaagacggcggaccgctgcagttggagagacagacccgcgggggtcggcgcgcagcgcagcaccggggccacaccggggccctgcaggcaggcgagggcatggagcaaatgctccggaacctggccgtcatcgaagcgcgcctgcagcgcgcggtgcggtgccagaaagtctcgggaacgcaggtggcgggtgcgcgtctccttgatccacaccggaccgcctggccccagggccgcgttgagggcccccagcgtctccccgaccccaaggcgccctggtcgccatgcatnncnannttncnngccagtacagccg

SEQ ID NO: 657677 - DNA, 283 bp, Homo sapiens
  misc_feature (9)..(9): n is a, c, g, or t
tcctgatanctggcatttactcccatgagtctctgttgggtcagtgctgatgatcagaaacttatgatttgggatactcgttcaaaccatacttcccaaacaagcactcagtttgatgctcacactgctgaagtgaactgcctttctttcaaatccttatagtgagtcattcttgccacaggatcagctgacaagactgttgccttgttgggatctgagaaatctggaaaacttaaagtttgcattccttttgagttcacatataaggatgaaacatattccc

SEQ ID NO: 657678 - DNA, 5754 bp, Homo sapiens
  misc_feature (5729)..(5730): n is a, c, g, or t
  misc_feature (5732)..(5732): n is a, c, g, or t
  misc_feature (5734)..(5735): n is a, c, g, or t
  misc_feature (5738)..(5738): n is a, c, g, or t
  misc_feature (5740)..(5741): n is a, c, g, or t
tctcgcgagagttcagctcccttcttagccgtggctgcctcagcacctcgaggatcgacatggacgctctcgaggactacgtttggccgcgggcaacctcggagcttatactcctcccagtgacgggtctggagtgcgtgggggaccggctgttggcgggtgagggtcccgatgtcctggtgtacagcttggactttggtgggcatctgcggatgataaagcgagtgcagaacctgcttggccactatcttatccatggcttccgggtacggccagagcctaatggagaccttgacttggaggccatggtggctgtgtttggaagcaagggactccgagttgtgaaaattagctggggacagggccacttctgggagctttggcgctctggcctgtggaacatgtctgactggatttgggatgcacgctggcttgagggaaatatagccttggccctgggccacaactcagtggtgctatatgaccctgtagtagggtgcatcctgcaagaggtgccctgcacagacaggtgcaccctctcttcagcctgcctgattggagacgcctggaaggagctgaccatagtggcaggtgctgtttccaaccagctcttggtctggtacccagcaactgccttagcagacaacaaacctgtagcacctgaccgacgaatcagtgggcatgtgggcatcatcttcagcatgtcatacctggaaagcaagggattgctggctacagcttcagaagaccgaagcgttcgtatctggaaggtgggcgacctgcgagtgcctgggggtcgggtgcagaatattgggcactgctttgggcacagcgcccgtgtgtggcaggtcaagcttctagagaattaccttatcagtgcaggagaggattgtgtctgcttggtgtggagccatgaaggtgagatcctccaggcctttcggggacaccagggacgtgggatccgggccatagctgcccatgagaggcaggcctgggtgatcactgggggtgatgactcaggcattcggctgtggcacttggtagggcgtgggtaccggggattgggggtctcggctctctgcttcaagtcccgtagtaggccaggtacactcaaggctgtgactctggctggctcttggcgactgctggcagtgactgatacaggggccctgtatctctatgacgtcgaggtcaagtgctgggagcagctgctagaggataaacatttccagtcctactgcctgctggaggcagctcctggtcccgagggcttcggattgtgtgctatggccaatggggaaggtcgtgtcaaggttgtccccatcaacactccaactgctgctgtggaccagaccctgtttcctgggaaggtgcacagcttgagctgggccctgcgtggttatgaggagctcctgttgctggcatcgggccctggcggggtagtagcttgcctagagatctcagccgcaccctctggcaaggccatctttgtcaaggaacgttgtcggtacctgctgcccccaagcaagcagagatggcacacatgcagtgccttcctacccccaggtgacttcctggtgtgtggtgaccgccggggctctgtgctgctattcccctccagaccaggtctgctcaaggaccctggggtgggaggcaaggctcgggctggtgctggggcacctgtagtgggtagtggtagtagtgggggtgggaatgctttcactgggttgggcccagtgtctaccctgccctctctgcacgggaagcagggtgtgacctcagtcacatgccatggtggctatgtgtataccacagggcgtgatggagcctactaccagctgtttgtacgagacggccagctccagccagtcctaaggcagaagtcctgtcgaggcatgaactggctagctgggctccgtatagtgcccgatgggagcatggttatcctgggtttccatgccaatgagtttgtggtgtggaaccctcggtcacacgagaagctgcacatcgtcaactgtggtggagggcaccgttcgtgggcattctctgatactgaggcggccatggcctttgcttacctcaaggatggggatgtcatgctgtacagggctctgggtggctgcacccggccacacgtgattctccgggagggtctgcatggccgtgagatcacttgtgtaaagcgtgtgggcaccattaccctggggcctgaatatggagtgcccagcttcatgcagcctgatgacctggagcctggcagtgaggggcccgacttgactgacattgtgatcacatgtagtgaggacactactgtctgtgtcctagcactccctacaaccacaggctcagcccacgcactcacagctgtttgtaaccatatctcctcggtacgtgctgtggctgtgtggggcattggcaccccaggtggccctcaggatcctcagccaggcctgactgcccatgtggtgtctgcgggggggcgggctgagatgcactgcttcagcatcatggttactccggaccccagcaccccaagccgcctcgcctgccatgtcatgcacctttcgtcccaccggctagatgagtattgggaccggcaacgcaatcggcatcggatggttaaggtagacccagagaccaggtacatgtcccttgctgtgtgtgaacttgaccagcccggccttggcccccttgtggctgcagcctgtagtgatggggccgtaaggctctttcttttgcaggattctgggcggattctgcagctccttgctgaaaccttccaccataagcgatgtgtcctcaaggtccactcctttacacacgaggcacccaaccagaggcggaggctcctcctgtgcagcgcagctactgatggcagcctggctttctgggatctcaccaccatgctagaccatgactccactgtcctggagcctccagtggatcctgggcttccctaccggcttggcaccccctccctgactctccaggcccacagctgtggtatcaacagcctgcacaccttgcccacccgtgagggccaccatctcgtggccagtggcagtgaagatggatccctccatgtcttcgtgcttgctgtggagatgctacagctagaagaggctgtgggagaggctgggctggtaccccagctgcgtgtgctagaggaatactctgtcccctgtgcacatgctgcccatgtgacaggcctcaagatcctaagcccaagcatcatggtctcagcctccattgatcaacggctgaccttctggcgtctggggcatggtgaacccaccttcatgaatagcactgtgttccatgtgcctgatgtggctgacatggactgctggcctgtgagccctgagtttggccaccgttgtgcccttgggggtcaggggcttgaggtttacaactggtatgactgaggtatcctgcggtggctggcgtgctgggcatggggcctgctcacagacagcatggagcagggaagggctgtctgtgcccatgctcagcatgccttgaggggaggaggtggtggccgtgggttcctgatgtcggtgcaggagctgaaggtgagtggagtgctgccaagaatatgcccgactccccatgacaagacagaactttgtaacaaacagtaccaatttattttggccgtgggtttttgctttttttccagttgatgactttgtgaacattcccaggtattggagcctctgtggccttaaatgtggctcagtggagggagacccagcatagccaggccagtatggagcacctcacgcacagctctcagaagctgcaggcggacgaacatctgaccaaagaggtgtggtcgaggctcctgaaagagaaagggcctgctggtctcatcctctgcttcctttgcctttaccctatacctctctgcacgtcccaccccgttttgctgtgtgctcacccccaggatgtgtacccggttgtagtaggagctgaaatccatgctgagctgtaccaggaacttgcatatctagagacagagactgagtcactggcccatctctttgctcttgtgccccaggccagaataaagaatagagtgtagagtgtcctggttgtctatgcctcaccatctctgtgcgtacagcaatgtggagccccggggctgtgcagtccagcactgctgtccggctcagcagatccggaaaggggaggatactgttgaagagcaacaaccactcaccctgttggggagaaaggtgctgggaggggaagtccaggcctccttgtgccagctaccaggagggacactcacctcatcatgtagcagtgagaagtccagactgctcacaggaggaaaagtggggtacagaccttgttccatactacacttgtaactctcaaagagtgtggcaagacgggcacaattatacatgacaaaggtgccactctttgtgcccttcgtggagatactgctgtcagccagagccaggaagagctgactctgtggggctgtgctcagcatctcaaacttgatggtggccacagagagaacaccaaagatctctgtccaggctgggtcttgtgccagatccccaccatgcttcagtgctgaggccttgcacacctgggtatgccggaacctgtgtttggaagagaggaatgccagtgggcagggtcctgggtaaagagtcccccctcattaccctggcttaggttggtgttcctcccagcctcactcactcgtagtactcaggggcagtcatcagagtgccaggtgcaccagctactttcacagggccacagatgaggtgcttctgtctgagtggagccttgtcaaccaacttccgccaaagcaggtccaacttctgttgctggaactcctcctcacagctaacaacatgtacaaccaggcagccgcctgtaccagtatctgaggccccagccaggcctgggtggctgtcctcgggccaatgccatagagcctcttgcagctcagccagcacagagaggagatcctcagtcaccagacagttgtccaggttggggtcatagccagctgtgcggccctgttcttccaccagctccttcagacacagtctgcctaggatgccaggggacagtgtcctcccgtcattagcagaggtaagttcttcaagggcgtggctcctcagggtgtgggaggaagctctctccgaggcagcgggccagtccacccgcagttgctgcaggaaggtcagcatgtgcggatcccgcacagctggcactaggcgcacgcacaccccgtgagcgcgcagggctcgcgccaggtgatcggccacgagcaccgtacgcagctggctcaagcggagtgcgcagggggagctgcgcagtgctgggcagtgtagtaagacgcgctggcccagcgaggcaggcgaggcgggcgtggcataggcggccacggcgctgaggacgcgctcgaagacggcggaccgctgcagttggagagacagacccgcgggggtcggcgcgcagcgcagcaccggggccacaccggggccctgcaggcaggcgagggcatggagcaaatgctccggaacctggccgtcatcgaagcgcgcctgcagcgcgcggtgcggtgccagaaagtctcgggaacgcaggtggcgggtgcgcgtctccttgatccacaccggaccgcctggccccagggccgcgttgagggcccccagcgtctccccgaccccaaggcgccctggtcgccatgcatnncnannttncnngccagtacagccg

SEQ ID NO: 657679 - DNA, 5578 bp, Homo sapiens
  misc_feature (5553)..(5554): n is a, c, g, or t
  misc_feature (5556)..(5556): n is a, c, g, or t
  misc_feature (5558)..(5559): n is a, c, g, or t
  misc_feature (5562)..(5562): n is a, c, g, or t
  misc_feature (5564)..(5565): n is a, c, g, or t
tctcgcgagagttcagctcccttcttagccgtggctgcctcagcacctcgaggatcgacatggacgctctcgaggactacgtttggccgcgggcaacctcggagcttatactcctcccagtgacgggtctggagtgcgtgggggaccggctgttggcgggtgagggtcccgatgtcctggtgtacagcttggactttggtgggcatctgcggatgataaagcgagtgcagaacctgcttggccactatcttatccatggcttccgggtacggccagagcctaatggagaccttgacttggaggccatggtggctgtgtttggaagcaagggactccgagttgtgaaaattagctggggacagggccacttctgggagctttggcgctctggcctgtggaacatgtctgactggatttgggatgcacgctggcttgagggaaatatagccttggccctgggccacaactcagtggtgctatatgaccctgtagtagggtgcatcctgcaagaggtgccctgcacagacaggtgcaccctctcttcagcctgcctgattggagacgcctggaaggagctgaccatagtggcaggtgctgtttccaaccagctcttggtctggtacccagcaactgccttagcagacaacaaacctgtagcacctgaccgacgaatcagtgggcatgtgggcatcatcttcagcatgtcatacctggaaagcaagggattgctggctacagcttcagaagaccgaagcgttcgtatctggaaggtgggcgacctgcgagtgcctgggggtcgggtgcagaatattgggcactgctttgggcacagcgcccgtgtgtggcaggtcaagcttctagagaattaccttatcagtgcaggagaggattgtgtctgcttggtgtggagccatgaaggtgagatcctccaggcctttcggggacaccagggacgtgggatccgggccatagctgcccatgagaggcaggcctgggtgatcactgggggtgatgactcaggcattcggctgtggcacttggtagggcgtgggtaccggggattgggggtctcggctctctgcttcaagtcccgtagtaggccaggtacactcaaggctgtgactctggctggctcttggcgactgctggcagtgactgatacaggggccctgtatctctatgacgtcgaggtcaagtgctgggagcagctgctagaggataaacatttccagtcctactgcctgctggaggcagctcctggtcccgagggcttcggattgtgtgctatggccaatggggaaggtcgtgtcaaggttgtccccatcaacactccaactgctgctgtggaccagaccctgtttcctgggaaggtgcacagcttgagctgggccctgcgtggttatgaggagctcctgttgctggcatcgggccctggcggggtagtagcttgcctagagatctcagccgcaccctctggcaaggccatctttgtcaaggaacgttgtcggtacctgctgcccccaagcaagcagagatggcacacatgcagtgccttcctacccccaggtgacttcctggtgtgtggtgaccgccggggctctgtgctgctattcccctccagaccaggtctgctcaaggaccctggggtgggaggcaaggctcgggctggtgctggggcacctgtagtgggtagtggtagtagtgggggtgggaatgctttcactgggttgggcccagtgtctaccctgccctctctgcacgggaagcagggtgtgacctcagtcacatgccatggtggctatgtgtataccacagggcgtgatggagcctactaccagctgtttgtacgagacggccagctccagccagtcctaaggcagaagtcctgtcgaggcatgaactggctagctgggctccgtatagtgcccgatgggagcatggttatcctgggtttccatgccaatgagtttgtggtgtggaaccctcggtcacacgagaagctgcacatcgtcaactgtggtggagggcaccgttcgtgggcattctctgatactgaggcggccatggcctttgcttacctcaaggatggggatgtcatgctgtacagggctctgggtggctgcacccggccacacgtgattctccgggagggtctgcatggccgtgagatcacttgtgtaaagcgtgtgggcaccattaccctggggcctgaatatggagtgcccagcttcatgcagcctgatgacctggagcctggcagtgaggggcccgacttgactgacattgtgatcacatgtagtgaggacactactgtctgtgtcctagcactccctacaaccacaggctcagcccacgcactcacagctgtttgtaaccatatctcctcggtacgtgctgtggctgtgtggggcattggcaccccaggtggccctcaggatcctcagccaggcctgactgcccatgtggtgtctgcgggggggcgggctgagatgcactgcttcagcatcatggttactccggaccccagcaccccaagccgcctcgcctgccatgtcatgcacctttcgtcccaccggctagatgagtattgggaccggcaacgcaatcggcatcggatggttaaggtagacccagagaccaggtacatgtcccttgctgtgtgtgaacttgaccagcccggccttggcccccttgtggctgcagcctgtagtgatggggccgtaaggctctttcttttgcaggattctgggcggattctgcagctccttgctgaaaccttccaccataagcgatgtgtcctcaaggtccactcctttacacacgaggcacccaaccagaggcggaggctcctcctgtgcagcgcagctactgatggcagcctggctttctgggatctcaccaccatgctagaccatgactccactgtcctggagcctccagtggatcctgggcttccctaccggcttggcaccccctccctgactctccaggcccacagctgtggtatcaacagcctgcacaccttgcccacccgtgagggccaccatctcgtggccagtggcagtgaagatggatccctccatgtcttcgtgcttgctgtggagatgctacagctagaagaggctgtgggagaggctgggctggtaccccagctgcgtgtgctagaggaatactctgtcccctgtgcacatgctgcccatgtgacaggcctcaagatcctaagcccaagcatcatggtctcagcctccattgatcaacggctgaccttctggcgtctggggcatggtgaacccaccttcatgaatagcactgtgttccatgtgcctgatgtggctgacatggactgctggcctgtgagccctgagtttggccaccgttgtgcccttgggggtcaggggcttgaggtttacaactggtatgactgaggtatcctgcggtggctggcgtgctgggcatggggcctgctcacagacagcatggagcagggaagggctgtctgtgcccatgctcagcatgccttgaggggaggaggtggtggccgtgggttcctgatgtcggtgcaggagctgaaggtgagtggagtgctgccaagaatatgcccgactccccatgacaagacagaactttgtaacaaacagtaccaatttattttggccgtgggtttttgctttttttccagttgatgactttgtgaacattcccaggtattggagcctctgtggccttaaatgtggctcagtggagggagacccagcatagccaggccagtatggagcacctcacgcacagctctcagaagctgcaggcggacgaacatctgaccaaagaggtgtggtcgaggctcctgaaagagaaagggcctgctggtctcatcctctgcttcctttgcctttaccctatacctctctgcacgtcccaccccgttttgctgtgtgctcacccccaggatgtgtacccggttgtagtaggagctgaaatccatgctgagctgtaccaggaacttgcatatctagagacagagactgagtcactggcccatctctttgctcttgtgccccaggccagaataaagaatagagtgtagagtgtcctggttgtctatgcctcaccatctctgtgcgtacagcaatgtggagccccggggctgtgcagtccagcactgctgtccggctcagcagatccggaaaggggaggatactgttgaagagcaacaaccactcaccctgttggggagaaaggtgctgggaggggaagtccaggcctccttgtgccagctaccaggagggacactcacctcatcatgtagcagtgagaagtccagactgctcacaggaggaaaagtggggtacagaccttgttccatactacacttgtaactctcaaagagtgtggcaagacgggcacaattatacatgacaaaggtgccactctttgtgcccttcgtggagatactgctgtcagccagagccaggaagagctgactctgtggggctgtgctcagcatctcaaacttgatggtggccacagagagaacaccaaagatctctcgtagtactcaggggcagtcatcagagtgccaggtgcaccagctactttcacagggccacagatgaggtgcttctgtctgagtggagccttgtcaaccaacttccgccaaagcaggtccaacttctgttgctggaactcctcctcacagctaacaacatgtacaaccaggcagccgcctgtaccagtatctgaggccccagccaggcctgggtggctgtcctcgggccaatgccatagagcctcttgcagctcagccagcacagagaggagatcctcagtcaccagacagttgtccaggttggggtcatagccagctgtgcggccctgttcttccaccagctccttcagacacagtctgcctaggatgccaggggacagtgtcctcccgtcattagcagaggtaagttcttcaagggcgtggctcctcagggtgtgggaggaagctctctccgaggcagcgggccagtccacccgcagttgctgcaggaaggtcagcatgtgcggatcccgcacagctggcactaggcgcacgcacaccccgtgagcgcgcagggctcgcgccaggtgatcggccacgagcaccgtacgcagctggctcaagcggagtgcgcagggggagctgcgcagtgctgggcagtgtagtaagacgcgctggcccagcgaggcaggcgaggcgggcgtggcataggcggccacggcgctgaggacgcgctcgaagacggcggaccgctgcagttggagagacagacccgcgggggtcggcgcgcagcgcagcaccggggccacaccggggccctgcaggcaggcgagggcatggagcaaatgctccggaacctggccgtcatcgaagcgcgcctgcagcgcgcggtgcggtgccagaaagtctcgggaacgcaggtggcgggtgcgcgtctccttgatccacaccggaccgcctggccccagggccgcgttgagggcccccagcgtctccccgaccccaaggcgccctggtcgccatgcatnncnannttncnngccagtacagccg

SEQ ID NO: 657680 - DNA, 293 bp, Homo sapiens
ccatcaccccttaatgtatctttataacatcaccacgtcaccttataacctctttatgaccccttaatgtatctttataacatcaccacgtcaccttataacctccttatgtctcctttgtaggtacctactgcagtcacattccccctcaggacctaatgagtatctgtgacagactgagcctctatttcacctccaacaacaaggtggtggacaccggcttcagggccacctggaaggctgtggaccccagccagggtgagtggagctgggcttcagggcctcgtcgacgc

SEQ ID NO: 657681 - DNA, 149 bp, Homo sapiens
cccaactgctgactgcaaacagacgtcactgttcatctgattttgatgcgtgtctcattaccaaagctgggttaccagtgtatacacaagtgttggaagtttgagcattgcaatttcaacgacgccaccacctcctcttcggtttcctc

SEQ ID NO: 657682 - DNA, 686 bp, Homo sapiens
  misc_feature (312)..(312): n is a, c, g, or t
  misc_feature (427)..(427): n is a, c, g, or t
  misc_feature (686)..(686): n is a, c, g, or t
ggctgcaggttgtcacctagtccaagcttatgaaaactgtgagctgcttagaggtgaaatcttcaatgccccttaatttcttcacttaattacaaaaatataaaaattaaaaccatatgctttcaagcataattatgtggatttcacctctttcatctggataggtcagccttgaaacatctttcaaaattaaaatatataataattttattacagaattgtgagttttttattagggatatttatgcaataggcacactgtttttacaatggtctctgatctattaaatccaaacagatatatgtattagnttatatattggattttagaacttactttatcaaaaatatcctttcttttcattaaatgcaaggtttacttgccaaattcttttttctggcttctggaatctctctctctttttanacacacacacacacacacacacacacacacacacacttctattgttgcagaacaacttattccaaactttaacatcttacaacaacaaatacaagttattttagaatcaatgggtacatgtgcaagtctgttacatgggtgcaatgcataatgctaagggtttggcttctaatgaatctggtccccaataagggacatagtaccccacaaggaaggtttccggtacttcaggttttttcctttgccggaccaggggggn

SEQ ID NO: 657683 - DNA, 204 bp, Homo sapiens
ctcattgcatagtgagactctgtgtctacaaaaaaaaaaagaaagaaaaaaaattaagatactgcattgttttgggaaaatatttatgggtcatccctttgagctccatgttccacaaggcttgtctaaaattgcgcggagatttgggaggtaccgaagctcgaatttcgttaatctcatgtggctcatagcttgtttccctgt

SEQ ID NO: 657684 - DNA, 1038 bp, Homo sapiens
ggcacaacgacggcaaagaacgagaagaagtggtccatcagtgatgaagcgcatcctacgggacgtgtggtccacggcacgctatccagatgggacactgatagtttgtgtggctctgcgttactgggcgtcatgtatgagctcgatctggtgttggcagcgtactatatgtggctgtgagctatacaggtaggctcgcctcagacagcctggagcaaacagtacctaatgctgtccatgctctcgtaactctcgaaccagaacgcggcatgctttaggctccctcatcgatcgtactctgtggtacactgattgagtgcggacgctcttccatctggcgagacggctctgggttgaacctgcgctgcgtgatcggcatggctaagtgtacttgctacatcatcgtcttctcacgtacaacgagtcgtctctacgtcccttctgtactcatgcttgtagtaccaggtgttcacgggctaactgttccctgcattcgtgcgcgacctgactattctggaggttcgggactatggcagcggtccgatcgctcacatctgtctctctcactactttctacctgagctttcatgtgcctcaggaggaatacgatggggcacgtcattctgacgcctggtctctagcatgtgatggctgactgggtggccgcggtacgccgtgtgcccatgggcctgggccatgcatctcctctactatggtgtggagatatccagactgggtcctcgtctaccttggtccataagggtgggagcggtcttacgtctctcggtctgcgcctttgccttctggcgtaggcccttgcgggctcatgactacagtcagaccgtgatcagccccacggtacttatcctagaggacacgcgacaagccatgactgatcgtccgtgatgagctgcctgtatgcagggcacctcggaccctgaaccatggagaaggccacaaggtacagtcagcaaagaaccgttacttccttatacatcccacgttacagactgattcgtcaaggaggttcccacctgg

SEQ ID NO: 657685 - DNA, 558 bp, Homo sapiens
  misc_feature (23)..(23): n is a, c, g, or t
ctggcttgctgttcattacttanagctgtgcttgctctctgaagagcttcttgtacttcattctgaacagtagacagtgttttcttcaattcacttaattgctgttccatgctctcgatggctttcctcttatcatcctgaagttcttgcttttccttctctacttccatcaatttcttctccaactgtgtctgaaactctgctgattctttcaagcgaacttcaatgttcttatgaacctcctcagtcacctgtttctccttgttcagggaatcttctaagctggtcaccatggctcgatactgctccacattactggtacttgtcttgagtctctccttcaagtcattgacctgttcttcagcctgccttagctgacttttaagatcatcaacgtcatctctgtcaccaggctgacctttaccggctctctgtgtggactgtgaagcgagctgggcttccatattattaaggtgctgtttcagtgtagcaatgtccttctgagcattttttaacagttcttttgtgttaagatggagatttatttctggtcgacgc

SEQ ID NO: 657686 - DNA, 1865 bp, Homo sapiens
caagcccctgcctctgcctcgtcactgcctgggacctggggcccagattacccccccaagcccacgataccttggtcagtacccaccatcaccaacactcaccaaacaaacacaccgaagagcatgataggatgtagacgccataggtagggacaggacacatgcatagactgacatccacaacacacatcaaccacaagcagacacatgaccaccacacagaacaacacacgtgcatgccatctagacccatccggcaacatcgagaactgacctaggcagagctcagtaccaaacacacaataacacaccgcaacatccatggacatgcacacacatgacacaacatacatgcgaagagaccatcaaacacataggagcgaccatacacgaatggcgatagatcaccacacacaagaacgagaacaaccagagacaaggaacgcaaagacgttacagtgtagcacccagcaatggcacgcaacacctaaacacctgagagagacccacacctacacatgcaaaaagacacataaaacacatacacacacacaatacgttgaggcggcagcaccacctaagccgcgcattccacacaaatacccacccaaatacataccatccatacacgtatagcaaactaggcgacaatcacgaaataaacataaaacacccacaccacatcgaccgacgctccagacagctaaccaccgcgcccccctaagccccacactcaggaccacgcccgccgacccgcacccacacaccaccgccacccaaccaaaccccgacacacaaccaacaccacgccacacgaacgcgccgactcaaacacctggcgccacacgcacatacaccaccacatcccacgccccacccgataaccaccgcaagacccgatagacgcaaacacacccgataatgccgcgccacaccacacataccgataaccaccacaccacttagtagccaacaccaccatcaactaacgcaaatatagcacaccacacgacccagccgacaacaaagacacagaccgcgacgaataccacgacaacagcgcgcaaaggagccacacagaaaacacgaacccacccattacacacccacaacacacggcaacccacgcctccggcaacaggcgacgactcccagcacccgaccacagcacgcacacgcgacaccgcgaccgaactcggacacctcgacaccaccccaaccaccaaccaaccgcatgccacacacacccagacacacaacaacaacgaacgcacaacaacgacacccaccaccccacacccagcgacacacccacaaaccaaccgacgacgccacccgacaccaaccacaaccataaatctcaccaccctacaccagaaaacacccccacacaccacctatccacacaccatcacacacacaacactcacactccaacactcacaccccactcatcaccacacactacaagaacacactcaactacaaccactccacccacacaccacacacccaccccacaccaaccccacacccacacaccacatcgccaacacacaacaccaaccaccacaacaacacttcccaactcacagacctcatcacacaatcaccgcacaaacccccatcaacacacaacaacagtacaccaatcaccaacctcccccaccccctcaaccaccaccaacaacagaccctaccaccaccccactacccccccccccccacccccccacacaccacacacccacccaccacccacactccacccccaccatcaagacctcacacccacaacaccaactaccaccacactcaactcagcacaccatcctaacaatcccgccatccaccaaccaccccac

SEQ ID NO: 657687 - DNA, 132 bp, Homo sapiens
gtgcactgattttgccacaagcggacgggtacacacttcatgagagacgcgctataaacagtctgtaaacatagttgcagataccagtttcatggaagtgtacagacctattaaatgtaacggtgtctcacc

SEQ ID NO: 657688 - DNA, 351 bp, Homo sapiens
ctgcccaccgttcctgtttgcgtggagggtggggggagctcagtggccgggaatcaccggtccgtggggtcgtggggacgggaacatgtgcccgcccgccccctcccccccccccccttaggaggcatacccccccctgtctttttttttttaaattttccttcccgggagagggctctttggccataaaaacccctgaaaaattatttgtttgatgtttgagaagcccgggtcccccagttttgtttcttgttgtttgcctcccctgggttccccccgaaaccccctcttttttggtctctgtgcccttttaaatgcgtgcccgaagtggcccaataaagtggggaagaa

SEQ ID NO: 657689 - DNA, 202 bp, Homo sapiens
acttcatcaactatggtccaatttggggttgtaggtttaatttagaattggggtaaattgatgttttgcatttggcctcaattgacctttagtggagttaattatttaatttttggatttcgggattttaacatttactgtaatttgtaatataactgctgtgaaatacttgaataaagatgacaagaaaaacaaaaaaaaa

SEQ ID NO: 657690 - DNA, 481 bp, Homo sapiens
gagttcgtgcaggagtttatggaggcggcggtgcgccggttcggccgcaactgtctgatccagttcgaggactttgccaactcgaacgcgttccggtttctggaccagtaccgccacgactactgcacgttcaacgacgacatccagggcacggcgtcggtcgcggtggccgggctgctcgcctcgctgcgcatcacccgcaccaagctggcggacaaccgcgtgctgttccagggggcgggcgaggccgccctcggcatcgcccagctgtgcgtgatggcgatgaagcgggacgggctgacggaggaggaggcccgccagcgcatctggctcgtcgacagcaaggggctgatcgtgaaggaccggccgaccggcggcatcagcggccacaagcatctgtttgcgcacgagcacgccccggtcggtacgctgctggaggcggtgcgggagctgaagccgacgatactgatcggtgcggccg

SEQ ID NO: 657691 - DNA, 158 bp, Homo sapiens
ggcaacgtcgactacaaaaacatctgctacgtcatcacgcacggtgacgtttttttaccaggagtggggggacccgggggcctccggtgcccgaggcttctgttcggcccgggctccaccccggctcccaataaaatttagctgatctttgtttctta

SEQ ID NO: 657692 - DNA, 243 bp, Homo sapiens
  misc_feature (214)..(214): n is a, c, g, or t
ctttccgggattttatctctgcctcttctttacaatctattacacagctttcaggggcatcagaaactgaaacactatcttcttctgtttgaaacggttctaaaactactttaataatgacccaatcattccatactgtaagtgggatgattttaccctccctacttgcttggttttaattctttgccaattttttcccaatcttttagatatnaagttccctgtccctgtggataagtaggg

SEQ ID NO: 657693 - DNA, 373 bp, Homo sapiens
atgtgaaaagggtagctcaaagctaaaagcccaagaaggggaagcccattgcagtcgaaaccctgtcttgtaagaggaattggcaggtattcccgatctagcatgtattccagaacaggccactgtacaagcaggaagtactcagccgcctaaatcccaggttgaaaagacacagaaggagaaggttctcgcaacctgtttcaaaaccagcctggtggctgaccagaactgcggtacccgcggtggttaaacttcgccaaatggctagatattatcctactgaaagttgtgcctcgaaagctgttgaagcccacggcaaaaaaacctttcagtcagcaccctgagaacaactgcgaagccagcaattaatccc

SEQ ID NO: 657694 - DNA, 135 bp, Homo sapiens
gtacccctaccatttattaataatttcccatgtcccaagttttggctggatttgcaaaattaacccaaaatatcacaagtccaattaagctgataccaattaccattaggaaggatgggccctgtttggactctg

SEQ ID NO: 657695 - DNA, 550 bp, Homo sapiens
  misc_feature (20)..(20): n is a, c, g, or t
  misc_feature (44)..(44): n is a, c, g, or t
  misc_feature (66)..(66): n is a, c, g, or t
  misc_feature (83)..(83): n is a, c, g, or t
  misc_feature (138)..(138): n is a, c, g, or t
  misc_feature (189)..(189): n is a, c, g, or t
  misc_feature (542)..(542): n is a, c, g, or t
accaacctccatggccaggntcctaccccgtgacaaaatgtggnccatggtcaaaaaaatggcagnccattgattgaagcctnccgttgttgtcaagacctcccgatggttacttgcctccgtctgtcctgtgttggntttacctaaaaaacgcaacaatcagatacggaagccctcttatgctcagcnccaacaggtcccgccaatccggaagaagatgatggaaatcatgcccgagaggtgcagacaaatgacttgaaagaagtggtcaataaattgattccagacagcattggaaaagacatagaaaaggcttgccaatctatttatcctctccatgatgtctcgttagaaaagtaaaaatgctgaagaagcccaagtttgaattggaaactcatggagcttcatggtaaggcagtagttctgaaaagccactgggacgagacaggtctaagttgacgagctgatggatatgaccaccagtcaagaatctgtttaaagttcagacttcaaatagtggaaataaaaagtgctatttgtgncggtgcta

SEQ ID NO: 657696 - DNA, 89 bp, Homo sapiens
  misc_feature (2)..(2): n is a, c, g, or t
tncccactgtcctcacgccaatgtcctttcttccacgaacagatattatgtcattttatccaatgccgataaaggagaaacaacttgaa

SEQ ID NO: 657697 - DNA, 727 bp, Homo sapiens
  misc_feature (15)..(15): n is a, c, g, or t
  misc_feature (25)..(25): n is a, c, g, or t
  misc_feature (28)..(28): n is a, c, g, or t
  misc_feature (54)..(54): n is a, c, g, or t
  misc_feature (118)..(118): n is a, c, g, or t
  misc_feature (149)..(149): n is a, c, g, or t
  misc_feature (196)..(196): n is a, c, g, or t
  misc_feature (727)..(727): n is a, c, g, or t
cctggtggaagatcngtgaccatgnttnaaatgccaccaaaggactagaatatnacataaactagttgataaaccagcagcagagtttgagaggattgactcaattttgaagaatgtnccactgtgggtaaaaggctatccaacagcancacatgctacagataaatctttcggaaaggaagagtcagttgatgtngcagccttccttgttgtctcatttaaagaaatctctagagccacactaaccttcagcaaccccacaccgatcattcagcagccatcaacagtgaggcaagactgtcttccagcaacaaagactcactgaagacttagattatcgttagcatcttttagcaataaaatatttttaaattaaagtatgtacattgtcagatataatgctattgcaaacttaatagactataatatagattaaacataacttttataggtgctggaaaataaaaataattgtgtgactccctttattgtgttaaacattttattacagttgtctggaagcaaacctgcaatatctccaagatatgcctgtatttttcaaaatgtggtcttttaacattgctatgaagtttatcagtaataatatcttatttcatggttgtccagaagttacataacttgtcttaatctaaaaatcatatcatttaaaaagcctgatgatttaatatttttcataaagaaaacttttgacaatttgtttttaagn

SEQ ID NO: 657698 - DNA, 319 bp, Homo sapiens
  misc_feature (3)..(3): n is a, c, g, or t
  misc_feature (32)..(32): n is a, c, g, or t
  misc_feature (75)..(75): n is a, c, g, or t
  misc_feature (120)..(121): n is a, c, g, or t
  misc_feature (270)..(270): n is a, c, g, or t
ganttcggcacgaggcctcaggcaagcatgtntacaattccagtaaacacactgcgcatactcacctctaaagtnttagcaagctaccatgcatgtgagcagcccaccctaaggggctgnntcatggaaaaaggaacacaagaccctaagagaagaatcgtgggaaaaggaacacaagaccccagaagtataccaacatataaaaccacaagtcaaaggtgtgacactgcacttgatctccaaagtgcccactgtggtctcttccaagtntcttccaaggacttccaataaagtttcttcctttctttcctgctctctt

SEQ ID NO: 657699 - DNA, 695 bp, Homo sapiens
  misc_feature (284)..(284): n is a, c, g, or t
  misc_feature (385)..(385): n is a, c, g, or t
  misc_feature (509)..(510): n is a, c, g, or t
  misc_feature (518)..(518): n is a, c, g, or t
  misc_feature (527)..(527): n is a, c, g, or t
  misc_feature (544)..(544): n is a, c, g, or t
  misc_feature (547)..(548): n is a, c, g, or t
cggagtagacctaagtttttaagggacctattttaccttaaactgtttcttatctaaattcttgcagagtggcaatggtatcattgattctagaagaccaggggataatccctttatctctggcccctcaaatatgcagtgccaggagtgctaaacctagaggcccatactgatgacctggaagggggatccatatgattggcaccacaaagtgcttttacacaaaaacttgaaaatttgaaaaacatgatttttttaagtttctcatctcaccagtcttggtntttatattgcaaatctatcaaagtaagaaataatttgtgctgtatacaaattacatggggaacataaaggagtgagatccttctgtgataaaatgaattcnccactctggttacccaactacagaacctcctttgatcaggccagtaggttgtgatgcaggctggagcccccgaatgccccacacacactgcagcattgaccagaccatccgaaacctgggtccnnggtgatgntctcaagcntcggaagtggcaatggnaannatatggcccgttgcgggtgtggagagttgtgacttaagaggaagcgacctcccaagtatggaacgatttcaaggcaggctggcctgccaaaaaatctgcctgaataaaggggccggcaatcccgcgaaaaaaaaaagcgcgtaacaa

SEQ ID NO: 657700 - DNA, 696 bp, Homo sapiens
  misc_feature (284)..(284): n is a, c, g, or t
  misc_feature (385)..(385): n is a, c, g, or t
  misc_feature (509)..(510): n is a, c, g, or t
  misc_feature (518)..(518): n is a, c, g, or t
  misc_feature (527)..(527): n is a, c, g, or t
  misc_feature (544)..(544): n is a, c, g, or t
  misc_feature (547)..(548): n is a, c, g, or t
cggagtagacctaagtttttaagggacctattttaccttaaactgtttcttatctaaattcttgcagagtggcaatggtatcattgattctagaagaccaggggataatccctttatctctggcccctcaaatatgcagtgccaggagtgctaaacctagaggcccatactgatgacctggaagggggatccatatgattggcaccacaaagtgcttttacacaaaaacttgaaaatttgaaaaacatgatttttttaagtttctcatctcaccagtcttggtntttatattgcaaatctatcaaagtaagaaataatttgtgctgtatacaaattacatggggaacataaaggagtgagatccttctgtgataaaatgaattcnccactctggttacccaactacagaacctcctttgatcaggccagtaggttgtgatgcaggctggagcccccgaatgccccacacacactgcagcattgaccagaccatccgaaacctgggtccnnggtgatgntctcaagcntcggaagtggcaatggnaannatatggggggcttcggttgggggacagttgttatttaggccggagtgggcctcctcaaggaatggaacggtttcaaaggcaggctgccctggcgcgaaaatgtttgccatgaatgaaggtgcctgaaatcctgctatgaaaaaaaaaa

SEQ ID NO: 657701 - DNA, 170 bp, Homo sapiens
ctgtgttacatacacatactttcttgtgcttctgagtagctcaggtgtggcttttggctgcagagtgttaacattttgataccatgtaaaccttacccagtcgttctcagacttggagtcttgttttttgatggggaacaggaaggttgtttaaaagaaaagccttctga

SEQ ID NO: 657702 - DNA, 185 bp, Homo sapiens
cgacagagaatccttactctgtactcatagcgcacgtatagtaggccctccaggccctactgtttgcaggcacattgagttaggccaggttctctcctccagtcgctctgtaaagcattactgctgctgaagcctcttgttgcttcccagtcttactggcaacttctagataacaatttgtaaaa

SEQ ID NO: 657703 - DNA, 344 bp, Homo sapiens
acgaccgtcaactcgtgctctgtggccaccgccaacgtgtgtgtggtcgacggctggcaaccgcacgattgattaggacacatatttatatgagggaccctatttgtgacagctgcaccgcatttggtcacacactcattgaccatgagtagggcatgggagatgactggcagtgacagtgcgacctctattgagacaagtgtactgtggaaactgtgtactgctgcaccaagatgccaggataacaatgcacatgctggactctgaagagaagcacagttcacagacccacttacgactctgatctggacgacatactggtcgttgcctcgatgggcatatcc

SEQ ID NO: 657704 - DNA, 112 bp, Homo sapiens
cgtgctggccgatggcgcacatgtgcctgtcgcctggtcggcctgtcggcggtcacccagctggcggaaccgcgggtgctgagcctgatgatgggcacctggttcctcgcca

SEQ ID NO: 657705 - DNA, 331 bp, Homo sapiens
ttccaaagttgtaccctacaccctcagataactcggtagctctggacatcctgtcttgacctcctcatcctgaaaaccctttgcccacagtttgaccaaccaggccttgggtactacgctttggcatgccaaagcgtagtacccaacagctcattgagaacgggccatgatgacgatggcggttttgtggaatagaacagggggaaaggtgggcgaaaagatagagaaatcagattgttgccgtgtctgtgtagaaccaagtagacatgggagacttcattttgttctgtactaagaaaaattcttctgccttgggtactacgctttggca

SEQ ID NO: 657706 - DNA, 777 bp, Homo sapiens
ggttctccctacactttattggggtattgcgaaagtggtgttagccagatagtgttgatgaggttgcgtgattgttgtggtgaatggacgatagtcagtgtgattcgtgacgacagctagtgtgatgagtggaatagccgggataccgactagtgtagtaagtctttttaggatgattttgaagtttagtcgtgcgtcatgtgttctgatttctcatcattgggagatcgttagaatcgttgaggcaagcagtggagcaatattataagtgcctaagattccgagtgcaaactttgcaagttggagcaattgtctgtgtttgaaaagatgagatatagtgataatatattccagggcaaagctttgagtgcccagaagggaatagctgtaccagttgctaacctgtcttgtgcttcaggagccagccatgttattgtttgtgcagtgttaacaacaatcatgataatttaaagttagatacactagtgttgttcacttgtaggactgcagttctgtattttgggttaaaggttcttggctgctgtaagaatgtgaatttgaatgtattttcgaattgtaagagcaaaagaacgttttcgtacgattttttcttgcatttaacttggaatgatcttcaggtttctacaatctaggggtaattgtaatatttaatagcattacgcactttattggctgcagtaatgtatatatccccattccaagacatataacgtgagtgaagttgaaatagatcttttattaaccatctgccgtgtt

SEQ ID NO: 657707 - DNA, 1174 bp, Homo sapiens
acgtttcttcgatgggtggcttttttttggtgcggtggtgtctgtctttgggcgtgcttaccagggtgtttgccatgctggtgtgtcgcttttctatatgccaggtgttgttggtctcgtgctctctgcggcgtggggcccgttttctcgtatttgctcgttcccctctcggttttcggtttacgcttggcatgttgtagctcttggtcggccagtagtacccggtggctgattgtgatgccggcgtgtatgtttgcattcctgttttctatagtatggtttggtcctccttggtgtttgaaggcctacataaagtgtctaccatggatgttctcctgttcttcttagatatagggtactatctcctcatctctgttatatgtagtaaagggtttcatacgcggctatagtgagaatagtcaatgcgagtcctctcatgtgctctggaggcgggatatgagggagcacatagtgcgtgctgcgccctgctgtccttgaggaaggagagtggaatgcaagtggtgagcaggctgctgggctgctggaaggccgcaaggccacaatggagcccccaggtctgcgtcacactgcacccatagagtacccgctttgctggttggtattgaacttctaaggcgcatcacgttacctcgcaattgaggacacactcctcttgctggcactgccatactttctagggagcacttgtgactaacggtctggctaggtgccactgatggtactctcacgagttatctgtcttgccctgaagaactgcacgtcagacccgttcagtgacgctgcaagtcatcattgcggctggagatggttgccagacgagctggacgcataggctgaggaagaatgccttccgccagtgtcagtcctttatctggaaccaagcaactagcagactcgcagtttcctcggacgtctcgtggtccttccacgaggccatggagctgtgccttctgccgctgagtgccacgagttggcagcgtggacctacgacgtcatacacatgtgcggaaaactggatcctggcaggcgaggagacccagacgctaggttcgagagtacttttcctgggagggggcctatccagcagtgtgggcaaagccttcaatcagggcaagatcttcaagtgaacaataatttccccactcacctagct

SEQ ID NO: 657708 - DNA, 110 bp, Homo sapiens
tttttattgtttgccccgagttttcgtgggcttttttatcctcaccggtgtataaaaaatttttaattttttttaaacaataaattttttcacccatgaaaaggagaata

SEQ ID NO: 657709 - DNA, 577 bp, Homo sapiens
aaaggtgtttgtgcttccgtttggtttctgctcagtaatatagtcaagcaagtttgctccaagtgacccattgagctgtgtatgcattttggtttatttcaataaaatatatttgtattaaaaaaaaaaaaaaaaaaaaaaaaaaaaaaaaaaaaaaaaaaaaaaaaaaaaaaaaaaaaaaaaaaaaaaaaaaaaaaaaaaaaaaaaaaaaaaaaaaaaaaaaagaaaaaaaaaaaaaacaaaaaaaaaaaaaaaaaaaaaaaaaaagaagaaaaaaaaaaaagaaaaaaaaacgagaggaagggggaagaaaggagagagacagaagagcacacaacgaagagaagaggagggagacaacacaaaagatggagcgccaagaccacagcgaccaccgaagcaaagagggagagaaacaaggaggagacgagcgaaacagaacaaaaagagagggaggaaggaagaaaggagacagggcaagagaaaagtgcagagagagaaataagaagaaagacaaaaacaacaaacaaaagacgagaaggaaacaggaaaaaaacagaggcaagggggaggagtt

SEQ ID NO: 657710 - DNA, 899 bp, Homo sapiens
ggcgtacttacctcgactcttagcttgtcggggacggcttaaccgggacccggtgtctgctcctgtcgcgcttgcgacctcctaatccctagccatctatgcgtgagtgcgggtctccgatccatcgttggtccaggctggtgtccgagatgtggcaatgcctgctgggagctgctactgccctgggaacgcggtgatccagcccgagtgggcagatgccaagtgacaagacccatgggggcggagatgactccttcaacgccttctgcagatgggacgggggcgtggcaggcaacgtgcccgggttgtgttgtagagttggagacccgacagtcattgatggaagttcgcactggacatacgtaccggcagtatcgtgaccagcctgatgcgagctcatcacacggcaaggagagatgcgtgcaataactatgccctgagggcaacgtacaccattggcacggacgatcagttgaccttgttgttggaccgaattcgccatgactggttgaccagtgtacccggttctctggggcattcttgtggttccaatagcctggtggttgtggttgaatctgtattcatgggtttcggcctacacctgcttcagtggaaaccgtcgctctcagtgagttatgagcaagtggattctgagctggaggttcctccaatttgacccggtgacccaaggattccacacggctggaagtgggatccctacatgtctattctttagcaacgcgaaagagcgccgggaagccatcggttgtggcctcatggtgaacagagaggctcgatggactcggaggaaaaccacgaattagagggccacacttaaatacatatacgcgttatagacaatatgggtctacataatgatcaggatttgggaccttatt

SEQ ID NO: 657711 - DNA, 223 bp, Homo sapiens
cgcgggtatacagtgcatgacagcacacctggctaacttttgtacttttgtagagatggagtttcaccatgttgctcaggctggtcttgaattcgtgagttcaagcaatcctcctgccttggcctcccaaagtgttggaattataggcatgagccattgcacccagggtttttggtccattttgagttaatttttccaactttattctttttttttttccttt

SEQ ID NO: 657712 - DNA, 1227 bp, Homo sapiens
  misc_feature (426)..(426): n is a, c, g, or t
  misc_feature (994)..(994): n is a, c, g, or t
gggaactgatgcccgacagtcagattgctgctatggagtgagaatcagttaactgtttctccacgcttgatctcctgcgctatgctgttggccgtctgcacttgggtggccccgcgaggagagccattgtgctcgaacgagccgtagtctcacgtgatacagaagcgcgtaaccacaactgcttggatgtagcatcgtttcatccgacagccgctggtgaacggtcgagcaggcagacatatctgtacacttggatatcatcgcgagagtggaccggtactgtgcacgctgtgtcgttctgatgcgtcactatgaagccgcgcgggtctaggcatgtaacacctgtgggccgtacattaatctatctctcgaatgtgcttgcaacataacgcgtgtgtaattctacattaatggcggacaatgagnccgagccaccgtgatgaatggcacttggagcggcgagctgaggcccggtgggggcgatttcctcggcccacaaggcgcagaacctccatggacccgaagtggaacacgcataggcctacttgaataagagaaatagccatatgcaacggcacccaacttgttttagttggcagacatcgcgtgccgaagcagagttgtctcgtaagacgccacgtgtataggagttggggttacctctgccgaaccaacattggacaggaagtgggaatacctttttctcaccgggtaacgtacacattcgtcgcagcacaaagcaacatcttatgaggcaggaccaaccctatgtggaacgtacccagtgaagacctgtgcagataggtcactgtttgtatgaacgccgtgcgggagtgctgcctgagtatggggacatcccgttgtctgtctttcaaacactttaattccgaggggtggcatcccgtttggaagagttccgaaatggaagggctcacacatgaaacgggtccatctccaccccggggatacgaaggttcagcttatgggataaccntgggaaatggacagcacccggatcctttgcttggagggcctggggggttcggtgaacacataagcctcgtgggagttcttggggtaccctaggttgccgcctacttgatttgaggaacggcacgtcaaggacggcagaggacctttcatgacgattccgttgggctcacgtgcccctaggacccattgtaacgagggctattttgttgtgctcccctttataaaaggccccgg

SEQ ID NO: 657713 - DNA, 330 bp, Homo sapiens
cgggtctcttccggacatgtacatcaccgattaggtgcacaacacgtgagctagtcaaggtaaggttgcaaaaaaaggcctgaagacggtccctcagattttccaacctaatgagatagatgaatgagtaaaagagtgacaagtccaaataaggcaactgcttcgctgcagaccaatcaagcattaatctggttggtctccgcacgtaacttataaaagcttacccctaaacgggtaaactgaaaataaaaagatacctcgggcccggcgagatggctcacatcggtaatcccagaacttggggaggctgaggtgggtggatcacttgag

SEQ ID NO: 657714 - DNA, 324 bp, Homo sapiens
taacgtagtgtggtgacaagcactaaaatcctgattaaacagaatagtagtaaaaatagcctcagtgatttaacgttcgaaagcagtacacgggtacatggctctggttacccagtatcaggaagtgtacaaatgttttttatccaaaaatacaaaataaattatctgtaggcttggacaatgacagcagtaaaccattatatatttggtcacctgaaaccagtaactgatggtaatagtgattttcagccagccgttttcttcattttctccaactgacttctctgaagttatgggtgaggaacactgccttgggcttcctgt

SEQ ID NO: 657715 - DNA, 160 bp, Homo sapiens
  misc_feature (115)..(115): n is a, c, g, or t
gagatccctgaatcgacggtttctcagccagctgcttcaagacctcagcttcatgggactgcgtctttcttctgcagcttctaatttcttctgaatttccaccagggaaagatcncttcttcttgggaggggaaaagggggaattctgggaacagcattc

SEQ ID NO: 657716 - DNA, 290 bp, Homo sapiens
  misc_feature (22)..(22): n is a, c, g, or t
  misc_feature (167)..(167): n is a, c, g, or t
  misc_feature (169)..(169): n is a, c, g, or t
  misc_feature (178)..(178): n is a, c, g, or t
  misc_feature (195)..(196): n is a, c, g, or t
  misc_feature (206)..(207): n is a, c, g, or t
  misc_feature (209)..(209): n is a, c, g, or t
  misc_feature (212)..(214): n is a, c, g, or t
  misc_feature (257)..(257): n is a, c, g, or t
  misc_feature (267)..(267): n is a, c, g, or t
gggggacgcgcaagtgcgcgantttttctattttattaaaaatatagtagaaagacaactgtacaggttttttctcccagctcccgggtgtgaaactaagtactagccctagatatgtatatatacacaaacacacacatgcacactgatcttagctctgtaaaacnanttagcaaancccaaatcgactgccgnncgtcttactnnanccnnnacgcccactccccctccccctcccgcagcttacaacttacttnttatagaggnctcaaaaagagatcgggaggttt

SEQ ID NO: 657717 - DNA, 139 bp, Homo sapiens
gcggccgcctactactactactactgctcgaattcaagcttctaacgatgtacggggacatgggggctgtatttaaggacacccgtgccccaagcccacctggggccccattaaagatggagagaggactgcggaaaaa

SEQ ID NO: 657718 - DNA, 467 bp, Homo sapiens
ctcgtttcctgcacttcaaactatactacgaggctacagtaaccaaaacagcatggtactggtaccaaaacagatatatagaccaatggaacagaacagaggcctcagaaataacaccaaacatctacaaccatctgatctttgacaaacctgacaaaaacaagaaatgaggaaaggactccctatttaataaatgatgttgggaaaactggctagccatatgcagaaaactgaaactggaccccttcctcttaacaccttatacaaaaattaagtcaagatggattaaagatttagatgtaagacctaaaaccataaaaaccctagaagaaaacctaggcaatcccagatgttcaggaggctggggcaggaggcacacccgagcccaggaggtcgagtctgcagtgtgtcatgatcacaccactgtactccagtctgggcaacagagacagtgaaaccctgcctat

SEQ ID NO: 657719 - DNA, 236 bp, Homo sapiens
  misc_feature (26)..(26): n is a, c, g, or t
  misc_feature (83)..(83): n is a, c, g, or t
  misc_feature (186)..(186): n is a, c, g, or t
  misc_feature (193)..(193): n is a, c, g, or t
  misc_feature (224)..(224): n is a, c, g, or t
gcctcctgtctccagctctctccagncaggcccagtcctctgaggacggcggctctgttcaagcactttatgtggcaggggantccgcctggctgcagcactagacttgtagcagcctgggctgcaggttccccccgaccattccctgcaccatgcggcagagcttggcatttctcctcagagaancgttgtnttaaggtgatcgaggaccagacattaaagcngtgattttttta

SEQ ID NO: 657720 - DNA, 113 bp, Homo sapiens
tctccccacatatgctttagccctaaacctcaacagttatagtcaacaaagactgctcgcctgaacactacgagccacagcttaaaactcaaaggaccgggcgtccctcgtga

SEQ ID NO: 657721 - DNA, 820 bp, Homo sapiens
ggcacgaggctgcgtgcctggccatataaacccgtgcgccgccaggcgctgtggccgtccgggtctgtgactcctcctttcccccgccccgcctccgttcggagagcctggtgggcgggcgcctctcggccaggaatgctgcctcttggacgctgtgtgaccgatgcccagattgccgaccacttctggagctgctcctgtgcagcacagcagctgaggctgcctgatggcccccacggcgagccagctgcctggggggtggctggccaagtgttggggagatgatcaacagtttccagtgtccgggccctccctgctgggggccatcggtgccccggagcgctgaccccgcgcccaggggccgaaagtgatgagagagagcggccaccgagaccaggaagacccacttacaacaaagaacctgtgaattcatctgactgttgcatgagtgatgactcagtgactcattactcgagattgggggatgggtccatagacacattggatgctcaaacattgctgcagatccagaggagattgacaacatctatttgccccgagggagggtagatcgagcaacaattcttttcctcacgcattggtggagtccaaaccacattgcttgaggggaaccgcaagaatgcgtgtagaagggacatactgtacccccttgtatccggcatgtcaacatctgagagaacccacaaaatgttaacagaagaatgggccagatgacatgcgctagaatacacaaggaaggaggacttaaccaacacaaggagcaatggagtttgcatatgtacagtgtcctgaattagag

SEQ ID NO: 657722 - DNA, 213 bp, Homo sapiens
ctgcttcagtctcctgaatagctgggactacaggcacacaccattatacctcactgcattcatctttaaaattaaaaaaaccccctgaaggggaggacagtaacaaagacagaaattaccacaactccaaagcccaaactacctaacactcaaaatacaatcctgggggaagatagtaaatattttgacccagaggacaaactaggaaaggat

SEQ ID NO: 657723 - DNA, 161 bp, Homo sapiens
attcattgacctcgcttcgggcactttcggatctaccatgaacactactggtttatggaggatgattcctggctagcgagtgtgttcgtgcagaccgatgctgcgcagatgggttcggtacggctgttgcgccagggtggtcaatgaagcgcagagctgta

SEQ ID NO: 657724 - DNA, 310 bp, Homo sapiens
tagcgactacaccgccttactacgttggtccagatcggtctatcctcaggccgggcctggcccagtagcaggcatggaaggtaatggccccgttgctgtccactaccagccggcagccccccgcggacgcctggtttacagcaagctagtactgtgaagaaaatattgggaagctctgtgaatacatcaaaaaccatgaccagtatcctttagaagaatgtgatgctgtcttcatatctaattgagaggaagatgataccaatctggaaacaacaggcgagaccttggagatggacctgagatctgggta

SEQ ID NO: 657725 - DNA, 747 bp, Homo sapiens
atatggactagaatctcagacgttgaaaaacatggcagaatagtacaaggagtttgcctcgggtaaataatttaccaacttgacttaatttaatatatatgtaccatctataatatatgccatagatttgaatatgataccagatatttgcatataatgccatattttttccggaattatgggaaatgtatagacatgaatgttctttatccctggaagacttcgatgtgtactttctggaaaatgcatttgttacataagcactatgttaatcatcaaaagtgggaaattaacattaatacggaatattacctaatctacagactcagttgaatttcaccaatggttccagtttagatgctatatggtaaaagaaaaactggatcacggattgactttattaggtgtctcatctttttaaatctggagcagattttctgtcttttatgacaatgacattttagaaaagtactggtgagatgtgggcagaagtgttcttaatctgagattctccagtatctcctcatggttagattcaggtcatacattttcagctggaatatcatagaagtgatgttatgtcctttgtcattcattatgatcaaggtggcatgatgtcaatttccctcattattagtgaatgtgactttattggtgaagatggtgttgacagttacagtaaaatgctgccgtgaaggggttcaacgttccttggtagatatagtatctaagaagattgattaggta

SEQ ID NO: 657726 - DNA, 407 bp, Homo sapiens
aagacgttctttccttgtataccatgcaagggagcctgctcgcttaggtgaagcaagttacgctagggctgtggccaaatttgttctctaccaaaaccgccaacgggttggcgtgatcgctaaatcgctagggtttgtacgcaggtcatctacatccgtgggctcaactggatggtggtcggttctcccctctctgaccgttaccgggtctatcaagggaccggcctggtcttttcaactagtccccttgaagacaccggggggctctaccaagcagttcacattgccgaccaagacgagaacccctcgccattttagtggccaccatcttaaaccactgggcacaccgtcccgatcacgaactagcggttacctggcacccccgaaggcggattgattcccacccg

SEQ ID NO: 657727 - DNA, 250 bp, Homo sapiens
ggaaaaaaccggtggccccctctccaggggggggttgggggcccctgggcccccccggttccccctggcccccctggggggggtttttttatgttgggggatgggggagggggggcccccccccccctgggggggggccccccgggaaccccgcctttttaaaggggggggggggttttttttccccccccccccccccccggcccccttgggcccctccataaaccgaaaggggggggttttttttcca

SEQ ID NO: 657728 - DNA, 317 bp, Homo sapiens
tagttcttgtatgccaacatgtcaggaaccgttaattataagttgagagacatgcgtggcagaagagttaaactctgtctagatatcagctgtgctcaggccatcactagtttcggaggctatggaatttactgttatctgatgattacaatgttccaggaggcaaaagggaagcaagcaatccaaataaccacttgcttgcccagagacctttccctcaaacagatgctttcaagagctgcgagagagtagggcatcccttgtggtggtacctctatgtttaaagacagaagaaaaaaacccattctatggatagt

SEQ ID NO: 657729 - DNA, 300 bp, Homo sapiens
taaatataggtcacacccccaagagcaatatagtcacgagatatcacaggtcctggttccccattaaaaatcagacctctcaggatgtcgggagcccatggtcaacctgaaggccttagattccaacccctcaataagagacttccttcatttaacaaagagccttgttcttatccctcaagaagaaacccaccataaccagggcaactgtcaaccctaatttacagacagcaaaaaaggcctggaagtgctacttaccggaccccccaagtcatcctcacctactgtcacctcaagaaa

SEQ ID NO: 657730 - DNA, 405 bp, Homo sapiens
atctttgaagtttattctgttacacagaaaaaaacatacatctaaatgactattgcttttttaaattcttttagctaatacttttcagtcgcggacacaccgtgttctcagagttttaaaacttctttgaaattttttttggtggccaattttgcagacacacaaggaaatcagtacctcagctatttattcaggagtggagtctcactctgtcacccaagctagagtacaggggcacaaccatcatagctgactgcaaacttgaactcctgggctcaggccatgctcctgccccagcctccccagcagctgatactacagctgtgcaccgccatgcccagccagtacctcagctttcatatacatactttcttttcttttagagactcagaggcagacatagaa

SEQ ID NO: 657731 - DNA, 137 bp, Homo sapiens
tctaggtgtgaaccactccagtgtcacagagtccgttgtgttggcccgaacttgtgggggcgagggccacaggcgctggtttcctgtgagggctggcagacctgtgtagacacaggttcaggataacacgtggattc

SEQ ID NO: 657732 - DNA, 161 bp, Homo sapiens
  misc_feature (1)..(1): n is a, c, g, or t
ngaggcaggaactgcaaagggacatgcataggataatctggcgtgtaggacaggtgctggttgacgggcccagctgaccctactgagatcggatgtgacatgagcgctgcagactagtcctgggcagtttgttgcccacttttctttggttcttctcacta

SEQ ID NO: 657733 - DNA, 382 bp, Homo sapiens
gaaatagcttgggggtttttaaacaaattttttgttccctacaaggtttaaatattttacttttttccctaaagggttggcccaaaaatgcaaataaattaataaattttggtggtgggtttatctgccggtatatgtttatcatttttttggaattaccttatggaaaaattgaggggaccaaaatttttaccccttgcacttaagtactcctggtttttaacaattttttttatggccccaaggcaacccaaaggttgccaagtaatttaaaattttttcccccttttttaaaattttacctttgtttttccctgccgggtttattttggggttctttaaatttatggccataaatgggttaaaaatttttttcttggga

SEQ ID NO: 657734 - DNA, 141 bp, Homo sapiens
ccatgcttatggagccttacctggtgacagtgcttatgggccagtttggatgatgctctcataagtctccgataatggtggtgaaggtggtgcatgctgggtcttggtgtcagtgactttgaatttggagtagatcccagt

SEQ ID NO: 657735 - DNA, 224 bp, Homo sapiens
  misc_feature (24)..(25): n is a, c, g, or t
  misc_feature (98)..(99): n is a, c, g, or t
  misc_feature (149)..(149): n is a, c, g, or t
ttctgggtgtttcgtgtgggcttnntgccgtgtctgttggtgtgtggcctcggtggtgggggggttgcggggggcggggctccgggcgcgggcctccnngtttttcggcggggcgctctgcgtcgctgggctggggtcggctctgcggnccgtgcgtggccgccccgcgcggcgcgtgctgtggcggtggctgggcggggggtgtgcgctgttcctgggtgttg

SEQ ID NO: 657736 - DNA, 105 bp, Homo sapiens
  misc_feature (10)..(10): n is a, c, g, or t
atagggccgnctactactactatgctgcgaagaagacgacagaatggcgcggcccatttggtcagcttccccgccagggcacctcgttcttccacacctgtcctg

SEQ ID NO: 657737 - DNA, 678 bp, Homo sapiens
tttttttttctagggagaaaggtgcttaattctggggatctgcgtaccaggcgggctggggtggtggattgggaaggggaatccaaggaagcaaaccaaaaagtgtcctagggccagcctaggcctccagcggcccggccgtgtgatgacgcggagtggtggcggatgacgtccgtggagtggcttcagagtgtggtgcccgtggcccccgattgtccggagtgtgcatctgttaggacacaggcaggctcggccacacaccaggcccgtgccacccccgcgtggtggtcctccgtgggaagcgtgtgcaggaacgtgggaattgtgccacgagggagggcaagtgtggtcaccagctataaggggccagaaaacagtgggcgccagaaatccagtatacacatccttccccgtggggtgccgtgggggcgcccacgagtcgacattagacgcgcggggagccaaaaccaggagaagcggctagccaaggggggagaaaactgggggccggggcggaccaagcacaggggtaacagtgtcgccgaaggggagaaccctacaatattctacatagggtcccagggggtatggcccagggaccaagccttaaaccggagatgggcgagggcgggcataaggaagtggcagcctaaagaaggctgggggaacagcacagcc

SEQ ID NO: 657738 - DNA, 365 bp, Homo sapiens
ctcccgggttcacgctattctcctgcctcagcctcctcagtagctgggactacatggcgcccgccaccacgcctgggtaatttttgtatttttagtagagacggggtttcaccgtgttagccaggatggtctcgatctcctgactccatgatccacccgccttggcctcccaaagtgctgggattacaggcgtgagccagcgcacccggccaggggctgacctttaaccgagggtccagaagccacggtcaaaccctgcccgggtgccggtggctcatcatcactatttcagtgggcctccatttttcttcccctctatctcaaacgcttgaaagctagggtaacaagaaccagggaacctttgt

SEQ ID NO: 657739 - DNA, 613 bp, Homo sapiens
taagtagaattatgaataaatagaatactaaaattccaaaatactcaatgggaaatgactagtaagtataggctttcaagagttggtacctttagctatatgcagatctctgggtattaaggaactgagaaaacagcaaagttgactaaatttcatatttcttgtcctctaaatattttgataattatctggcatgtgatgcagtcgatgtctctcgttccttccgtatttataaatgaaacaccttttttagtgtttctaaacctaaaatctacttggtttgaaatcaagtggttggcaacactgtttgactttatttgaagcatgttgtgatcgacaatctcattgacggaagttttcaatcaggtgtgatcagttcgactcctgtaactgagcacaggacctaatattattgacggagctctgttttgaggaaccactgcttaacggtggactatgttccgtaaagcaatatccaatagattcgtctgacttgaggtctgcgtccggcctgttgttagtcaggtccgtcccgacgggttccactacaatgtacgacatggcaacgcggccaacttggcacctcttcatgccacaaccctacaaaaacaag

SEQ ID NO: 657740 - DNA, 1619 bp, Homo sapiens
gggtctttcccttcggtgtgccactgaagatcctggatgtcgccatgggccgacgacacgcccgttgttaccggtattgtaagaacaagacacgatacccaaagatctcgcttcatgccgaggtgatccctgactgccaatgactacgcactatttggacactgtgggacggaaacaacggcaaacacgtggactgacgatattccgctaattgtgagccaccatggatgtcagactgacatactgacgcagatggtcctctgacacaccctggaacgagctggcccgacattaggatgccacaaatacaggtaccaatgagataaccacacagttagtggagacacacagcactaggagtatcccactaaatcccggggaatgcgtgaatacacaagcacccatatacccaccggtcaatcacggacactcaaaaccacagcatgataggtcccatgatagacatgggagcttgactcagagagtccacaacacccagggccaatgcagacacgagatggcacctacggcgacaccagaccccaccaagggaaccaccttgacggagcccacacggaatacacacaaacggagccccaacagcataacaaccacctggtcccacctcaacggacaacacccaagctgtcggcagcaaaccaaaacgggacgagcactaggtgggacatagggaccgcggaccccagatggacgcaccaggggagccccaaagggataaccacaaagtagtcccacatgggggacacgcgacccagacacagacactcccacacacaatacgacacaacaagccaacagacgggagggcacaaaccaacaccaaacacgggatatcaaccaggccatggacaacagcacacactagcatcgtaccacgcacaccattgagatctgggccacagtgaaacaacagacgcggggactcaacacaacaacacacactcgaggccatagcaccgcacgagccaaacaagtaaacaccaataccacaccaaacgtaaataagagaggagaccaccggccaagaggaacaacaccaagcatcggggcaagagaacagaacaagagcaagacaacaaaatagagacaggaggcaaagacaaacaggagacggaaagagccgcagcacacacataaacaaaaaacacgaacacaaataaaacccgatagcaacaaaacacggagacacacaaacaaataacaaaacacaaacccagcaccaagccaaacagtagaacacacaacgtattgacagcacacgcacacgaagaatacaagaaacaagagtaaacaccacaaaataaggaacaagcacacaggaaccacacaagcagccgatagagcaacagcgtgatactagacagacaacacacaaaccaatacaatcaaaccatgggagagacacaagcacaacaaacacgaacgaagcaaagcaagaacagaaaaacataaagccatcacgtgacacggaaaacaaacaagcgacgaccacaacagctagcaccagcaacagacatgaaacaacacagacagccaactagcaacacagagacaaaagagggtgttctacttcggtgttcacacgcagccgtgataaa

SEQ ID NO: 657741 - DNA, 822 bp, Homo sapiens
tgagaggagtctcgctctgtcgcccaggcttgagtgcagtggcgcgatctcggcttcatctgcaagctctgtctcctgggttcatgccattctcctgcttcagcctcccgagtagtcccaggagtagctgggactacaggtgcccaccaccacacccagctaattttttggtatttttagtccgacgatggggtttcaccatgttatccaggatggtttgatctcctgacctcgtgatccgcccgccttggcctcccaaaagtgctgggatcataggcgtgagccaccgcccgggcaaatttcggtatttaagtagagatggggttcaccgtgtggccaggatggtctcaatctgaccttgtgatctgcccacctcggctcccaaagtgctaggatactggcgtgagccaccatcctagccttaatgcatattcttcaatatacaaaggtagatcgtcatgaacactgcttgggggctctaattacctaccttttaacactgacaacctggggcttaacgggcgttccgtatgaatcaggaatgaacccatccgattatggctggacttcctgctatttcataacgggactcttctgaaatacgcgataggcattacagccccagccatctccgtgtcaaccatatatcttgaaccttaccttctgcgggaacttatgccacgtttaacgaccgcggttcggacatgcctcccttgtgcccgcctgactttcattccatgacttccccacgacccccccacgctatcagtttcatccgccctcctctctctccaccctctccgtaaccctcactcacttccc

SEQ ID NO: 657742 - DNA, 329 bp, Homo sapiens
gagctcggtacctgtgtatagcacaataaggaagggtcccaggtggggagaccccaagtagagaacaataatgaacaattattgtatgaacaatgttagagacagctaatcacaaacaacctgcgggcacaatgacctcattccacacgtaacacccttcagcaggaccctataaaactttcctccagcccttgcctctttgcaggtagccccttctctgctgagctgcccactgcaacatattttcacaatttctctaataaatctgcccttctttacctacaactatcttggtaaatggctttaccacctgcaaaactgaccctagg

SEQ ID NO: 657743 - DNA, 488 bp, Homo sapiens
ggtggagaatacaggtcacagtggtgctctggatcccaagtgactggttgtctaaagcgtgtgcattagaatcgagccactcgcttggtgaagtcacaacagagtgcaggctacagagtatgtaggggatcgtccggctagcgcaatgctatagaaggggggagccagcttactagggccctagaaactctgacaggtgccttagtcgagcgacccccactgtatatgctgcaggacaagaggcagctccgagtgaggactagctacgacagcaaagtgattgaagtaggatcctgaaagtaagattaggagtctttagggtgagtagtgagggtggcacctagattcggacattatgtgtgcaccttggttcgttatgagggaggtggtggtcagatgcaggagcttcggagggtccgtgctggagtcatgagtgacaaggaccacatggtgacaatgcatgatgtgctagatgctcagtggctgta

SEQ ID NO: 657744 - DNA, 249 bp, Homo sapiens
gaggatccccctgtcctttggacgctctgagctgtctttgtctacctatgtatctccatccagtctgggtgtctctctgactctggtttgccacaattctccttgccattttaatagttttagcttccctcacctccaggacacgttacctgctcctagagattcgtttctgctgcccgttgggtgacatgcctgagcttccctctgtctcgttaccgctgtgccttccgtcctcactcctccgtgttt

SEQ ID NO: 657745 - DNA, 116 bp, Homo sapiens
ccttaacatctgtctatcttacctggatctattagagatttcagagggactgtgaacctagaagggaagaaaactgatctgtagctcaaattggtatttccttcaataatggatgt

SEQ ID NO: 657746 - DNA, 153 bp, Homo sapiens
tgaccgtgaccaaaaaacaaaaacaaaaaaccatacacacacacacacacacagcaactcagcatcataagggaatgtagccttccaacaggagatgatgctgttcggtatgttcagtctcagagacagatatttcaactagatgttggcagg

SEQ ID NO: 657747 - DNA, 784 bp, Homo sapiens
ccgaggactgtgcgtgggggtgagtcgcggggagctcggggcgcgcccgacgggtgtctgcggacgacgccccgggggtgcttggcgccatctagccctagggagtccctggtcgacccccgtgtcgcctcttgtcccgttgacccttgtaggacgacggtcatgcctgggccgggcggaggcgtgggtgaggccgaggagtgagtgcctggggccggctcggggtcgtgagtgcggaggaggacgcgctgtgggatgcgaatcgtagggcgttccggcattcggtctggctctgcgccctgatagcccggtccaagtctcacgccgtatctgcgccattgccgggtcatcgaggagcaggagcgaggatggaggtgctgagcacctaccgtttcccgtggcgcgtcaaccgggatcgcgggcgcctgatggacatcttgcgctgccggtggcaagaggggctagtgaggccttcctggaaggccctggagttcgtactagccccgaacacttcacgctgctcactgggccgaggaactcgcgcgctagcgctgcgtccaatgatcctcgatgaggagtgggccgtgagggcctgaccctaattcgttgatgacgagaggtgcgactggcttgctgggaagctctgcaagagccagctgcagcggtgagcagcaactgcagtgcccggggccgggtgctcgaggaggagcgggcagggctggagcagcggctgcagggaccagcagcaggctcaggagcgctgacaaaggctgcgggaggactg

SEQ ID NO: 657748 - DNA, 121 bp, Homo sapiens
actaggtgcatgcatgtaggaagactctcactcttcttcgtcgcgctcccggggtggcagtcagcatgtgttgcatgtgtacctgaagtcgcaccacggaggagcacgaggagaccccgag

SEQ ID NO: 657749 - DNA, 856 bp, Homo sapiens
gcccagatcatgcggtcttagaaatgaaagccaacttcacgttgccagatgttgggagacttcctggatgaggttctgttcatttgagctgcaagcgggaggaagcggacaagctagtgaggcagtacacacgaggaaaggccgcaaggctgggccaccacccatgaaaagcgcatttgacaacacgatggtggatgggtgcgctatacccggggaccagcgagagggctggttgcgtcgcgcttcccaggagcctaatgaaaaagcgaggacccccatggaaagggcgaaacacgatgagacgggcatccccatcccagcacacaaagtgacactaccccctcatgaaggtgggcctatcaccttcacacacttcccataagcggaccaagcgaaacattcattataatacgtgcggattcaaaaactagagcaaagcaaactgaggcaattaatattattatcgttgatttatgatcaccccctaaccagttaccccccagagacacatatccacaaacattcacgatggatgccgtttcccttacacatttcgttttacccgtaatatttaagaccctagaatattaaaagttccaacaatagcacagtcggccagttagtggacttcgatttaacaagggtggaagggggcattagcaaaaggataggaaaccggttggacagagggtggaatagaaaaagttacaccaccggtaagcgcattggatatatccaactccatctcagtttacacgccaaaagaagccccgtatgagagaatgaccgagaatggagcagagacacatattacaatggggacatatattaaccagccaaaaggtaacaggagcca

SEQ ID NO: 657750 - DNA, 257 bp, Homo sapiens
  misc_feature (38)..(38): n is a, c, g, or t
  misc_feature (230)..(230): n is a, c, g, or t
ggtggaacctggtaggaggtgattggattaaggttggnagtttcccccatgctgtttctcatgaatagtgagtgagttctcatgagatctgatggcttcaaagtgtttggcagttccccatttgcttgctctctctcttgccaccacgtaagctgtgcattgcttctcctttgccttccaccataattgtaagtttcttgtggcctccccagtcatgtgaaattgtgagncaattaaacctcttttgtttgtaaatt

SEQ ID NO: 657751 - DNA, 216 bp, Homo sapiens
ggggtgttgaattgctgccagtagaggtcgtgctgtgcggctggagcggtggagtgtgcccctgctgtagtgctctgctgttgcccctgcagcacacccaggagcacctgtcaggtccaaggtcagcttctcatgtttgcaggtcctgaagagaacgttgagcagctccagtggaggacagtgcctgctgatgctgcgccttggtctgcgcctccg

SEQ ID NO: 657752 - DNA, 511 bp, Homo sapiens
gggcagggcccactgagcccatggacacgagtgaggccactgtttgccactcagacttggagacggacaccaccccatgacatgcacaggtcgccccgacaagggaccggtggccccgtagaagccggcccactgagcatgtcccatggaggagctgagcatcagtgcccggggacatgcacgggccgaggcggtcatgcaccgaaagggacgggagtcggatgacagacgaagtgcgcaacatctgcagcaagtcgaaacaggacgagcaaagcagagcgagcaacgcgccggcctggcaggcacaagccgcaggacaagacaacgcgacagcaacgccaagaccgcccaggaacaccacaaacccaccaccaatcacccagcaaccccagcagcgagaccccctccagcccagcaagtccaacatcccctacatgccacgcaggcgaccgacaaccacaacacacgcacacgcgaccgcccatccacggacccgcccggacaccacaac

SEQ ID NO: 657753 - DNA, 923 bp, Homo sapiens
  misc_feature (574)..(574): n is a, c, g, or t
gattgacgctccggttgcacgcggcgtgggtgccctgcgtggcgcccctcgttggctccttgcgtgcattggaggaatccagtcgagtggtcgttccgccgcgagggttttctgggcacggtggtcagtcgcggtagaccgggcgggtacgacggcgctgttggggatctgaagggcccagtggggtcagcgtaagggaccagtcggtgatagcgtacgccagggaaggggaccataaaggtcaccgaaagcgcaataaaaagtggaatgttagtggagatagccccccgaatctgagccacaagaccgctatagtgagctcccgctgtatgcggtcagaagagagacgactccgcaacagaggattcgaaagctccccatgaagtgagagcacgcactcatagatcatcaattgtccatcgctcgtgtcaccataactgtcacagtcgcacaactcgatagctagcaatcttgatctgcatttctactttctctccgtcgcgttggcgacccacttcatatcctcgcaagagcgttgaatgccagtcgatctttctgcaaagtcaatttaaantgccccagcttgtccacagaaagacccagtaaacccctgctgcccctggtcacgaagctggcgcacccagaggcgttctcaaagagccacattatagtttgcgtgcatcacggtgggcacgtcacgcaattggcgcctcgcactggtccggggctcctcggaggtggtttaccttttttgcttccccacatgcgtaatgcgtttcgcccactcatgcccagatccccgatgggagcggcccccatcgcattccctttcgggccgtaaagctgtcttgcccgatccgggtcccccctgttggctcgcaaggtgcataccttggggcggaggagacgatagcatccgtgca

SEQ ID NO: 657754 - DNA, 250 bp, Homo sapiens
cgagtttaagcgtgcagaagaactatgagtgcgtggtggggtgaaggggcggcagaacgggggtgcctgcggtgcggttacaacagcagcagtgtgcagtgccaagaaggcctcgtactcctatgaaggtgatgagcatggtgacaccgagctggacttttccgtggtctgggatggagacttccccatagacaagcctcccagcttccgagccctcctgtacaagtgctgggcgcagtgcgccagtttg

SEQ ID NO: 657755 - DNA, 438 bp, Homo sapiens
  misc_feature (51)..(51): n is a, c, g, or t
  misc_feature (98)..(98): n is a, c, g, or t
  misc_feature (100)..(101): n is a, c, g, or t
  misc_feature (210)..(210): n is a, c, g, or t
  misc_feature (295)..(295): n is a, c, g, or t
  misc_feature (304)..(304): n is a, c, g, or t
  misc_feature (307)..(307): n is a, c, g, or t
  misc_feature (314)..(314): n is a, c, g, or t
  misc_feature (316)..(316): n is a, c, g, or t
  misc_feature (418)..(418): n is a, c, g, or t
tttctggagctccctccattctattcctgtggggcaggaacatgccagggntgctggtaaatggcaggggtcacctttaccagggcgcaggcatagtntnncccctgcctgccctggggccaccctggaacagtaagaccctctgggaagggaagaaaccagacccagccataagctttctccccttctccctcaaatcgccccttcctnctccccaaaatcaggctatggcaaaagggctggcaacaagggaatggaggttttggaggggaaggccagccattctatagtcaanttagaaaantangatggananagccccatccatccccattttccttcctctgcctccgaggggctgcttctggatttcactttttttttgtgacccttttatgtttgcaggaggcgggcaaangggcaccagacagggaacat

SEQ ID NO: 657756 - DNA, 303 bp, Homo sapiens
  misc_feature (52)..(52): n is a, c, g, or t
  misc_feature (95)..(95): n is a, c, g, or t
  misc_feature (131)..(131): n is a, c, g, or t
  misc_feature (160)..(160): n is a, c, g, or t
  misc_feature (163)..(163): n is a, c, g, or t
  misc_feature (212)..(212): n is a, c, g, or t
  misc_feature (215)..(215): n is a, c, g, or t
actaaagaggatgactaaacttgtcagttgaacaaacgggaagattccgagncagaccaactcagcccccacagccactcccacagcaccttcgnccctacaggccacagctggaccatcttatccccggnctgtgatcccaccagtatcaactcctggncancccaatgcagtgggcacattcactgaaattcctgccagcaataattcgnagngtcattgccatgagattaactgaatctaaaaagtacttgtacctgatgcatatgctacttgctgttctgtgaccttggtgctgttttt

SEQ ID NO: 657757 - DNA, 387 bp, Homo sapiens
gttagacggtggaatatcatgaggttgatctggacactatacagagaaatatgatggcactacagataaaggcaggagaaaagtcaaaattcattcagttcctcacagatccctgtgtccaccatatatatgaaacacaagaattcaaagcaataataccaacgggtttggaaagctttatcctacaacacatggttgcatgacttcacctgaaaaataacaagaattaatatctgtggagcattaagcacatgcccagatactgcactgaacactttacacaagtgattacatgtacacaactctactgcattaaagcacttcaatctcatctccattagtaaaactgaggtacagagaatgtataaaagttggttaagttgcagc

SEQ ID NO: 657758 - DNA, 721 bp, Homo sapiens
tacgaccacagtgacatggagctttacatcttaactttctttgtcactttaaatgcgaatgtataaaaggtttagttgccgctattgtgaaaaactagatgtcaaggaaatcacctacttgcatgcagggtgatataatcttgaaaagggaaaagatggcttccattgttgaagcccagattttctgtagtaggaagctttcaaattatgtaatgtttaaaacgaaatatgtatataaatcatctctatacttctgtgggaatgagtactaaagttctctggggtctaggaccagtacctttatataaagggtataagagaccatgacgatgtctgaaatgtggaatagataatgatgccttgtatattgaaagtgggccacataatagtacgatgggtacctccagtcgtctgccgaaatgtatttccataatgtgttgaaattacactgctaagcattgtatgattttaatacttctgccgaatagagtagaatcagatgaatgtctgtgtgtctgtgcaaaagagtggggacaagttgggcaggcctatgaagtgcatagggagtgtatgtctgctgaaatggtttgatgtgttctagtaattctagctttaagaaatgttaactgggagggtgcttggggacaatcacctgcattaatttgcgagtggttaagagttcttgttgtcaaaaagaaaacttatgaataaattattgtgc

SEQ ID NO: 657759 - DNA, 397 bp, Homo sapiens
  misc_feature (292)..(292): n is a, c, g, or t
  misc_feature (345)..(345): n is a, c, g, or t
  misc_feature (363)..(363): n is a, c, g, or t
cccaccctctccccatctgctcggggaatttttgtttttgtttagttttaggtttacaacaaagaggaattaatttatcaccagcctaaaactgttgtgttttttttatggtttaaaaaacgccatgtcattgataaccccctttctcccttcccttttcccggtttgctgatccctttttcaagcctgtgtatccagggtgctttgtttcccccccgttcccaggtgtacaaggcaaagggccgggacagctttcctttcagtcattgttccccccccttgaaaattcagncaaaaaaactttgcttaaaaaatttcatgtgtgggaaccccagttcctggctncctttttcctgggtatgngtaaattccttaataaatattgcagggaaggcca

SEQ ID NO: 657760 - DNA, 205 bp, Homo sapiens
ctgcccagatcaaggctgcccacagatgggtcactatgctgataagtttgccaacaatacaagtgtggagccacagaagttcttcctgaacacaggagaagccaagaactttgcacgctggaggtaccgtgtttccttgacattctctggaaggacggtcacaggccaagtcaaagtgtctctgtttggaagtaacggcaatact

SEQ ID NO: 657761 - DNA, 403 bp, Homo sapiens
  misc_feature (22)..(22): n is a, c, g, or t
  misc_feature (34)..(34): n is a, c, g, or t
  misc_feature (83)..(83): n is a, c, g, or t
  misc_feature (100)..(100): n is a, c, g, or t
  misc_feature (112)..(112): n is a, c, g, or t
  misc_feature (367)..(367): n is a, c, g, or t
atttgggatttaatcacctcantcctgaagcaantgcctgatttgggttggccttggtggttcctcaaactgactgaaggttnggacctcactctgggancttttaaaaaanattcccatggccgggcttggtggctcatgcctgtaatcccagcactttgggtggcagaggctggcggatcacttgaggtcaggagttcaagaccagcctggccaacatggtgaaaccccatctctactaaaaatacaaaaaaattagccaggcactgtggcacatgcctgtaatcccagctactctggaggctgagacaggagaatcacccgaactcagaaggcggaggttgtagtgagcccagatcacaccacntgcactccacctggacggcggagtgagactcagtat

SEQ ID NO: 657762 - DNA, 246 bp, Homo sapiens
  misc_feature (14)..(14): n is a, c, g, or t
  misc_feature (111)..(111): n is a, c, g, or t
tggcatctgaatcngccaatcttcattcacaccaaagtcctcagatcggtcacccttagcaagagaaagcaaagcgttccgaaaatctccagatgtgtctgaggttatgtncttgggccagatctctcttcagttcctctctgtagacccggttaatgtctctgattgcttggttagttctggatgccaaaatctcaattagagtatcttcatcagttccacgcccctgaagggagcccaaagggt

SEQ ID NO: 657763 - DNA, 148 bp, Homo sapiens
tcccttacttgaaaagtgggggaagggggtgctctatccattaccgtggtaaggaaagcaggtactcaggatcccgcctctacccgtgctccccactttccctgccttaatacttatacagcagttccctgtaactccccactactgg

SEQ ID NO: 657764 - DNA, 265 bp, Homo sapiens
ctctagatatcccccccgtacgcccaatgtgacttcttaaaagttttattaaaggggaggggcatatattggcaattagttggcagtggcctgttagcggggttatttttgaagtgggtccagccaattgtttagtttatgattgcagataaactcatgccagagaacttaaagtcttagaatggaaaaagtaaagaaatatcaacttccaagtttgcaagtaactcccaatgatttagtttttttccccccagattgaattgtt

SEQ ID NO: 657765 - DNA, 359 bp, Homo sapiens
tctgcaggatccccctcttactttgctgtttagccaggcacggtgacacatgcttatgtcccagctactgggtgcagcctcgaactcctgtgtctcaagccatcttcccacctcagtcctcattgcttgtagtgaactttgttatgcagtgtctcctattctacttctgcaggagtatttttccatgtatgtaccttgagtggaattgcttggtcattgggcatgtgtgtgttcagctctattgagtggcatcatactgttctccaaggcagttgtaccaatctacaccctcaccagcagtgaatagtcttcccattgttcttcctcaatgaaactagatattcacagccatttaggta

SEQ ID NO: 657766 - DNA, 409 bp, Homo sapiens
  misc_feature (42)..(42): n is a, c, g, or t
  misc_feature (400)..(400): n is a, c, g, or t
  misc_feature (406)..(406): n is a, c, g, or t
aaagttgttgacttcgtctgtatactcctttgatgaaaaatngacttttccatcaaactaccaagccaatatgctgtattgttttatttctttgttctttttttcttgttgtgttagtcaattttgtgctgctataacagaatacctgatgctggataatttataatcaacagaaatgtatttggttcatggttctggaggctgagaagtccaaaatcaaagagcagcatctagtgagtgccttctcgctatgtcatctcatggcagaaaggcagaaggtcaaaagagcatgcatgcagggagaggaaagggggcccaactcatcctcttctcagggagttcacttcctcaaaaactaacccactcctgaggatgggtagccattcatgagggacagttntcatgnacc

SEQ ID NO: 657767 - DNA, 230 bp, Homo sapiens
cctttgaagttttccattttcaaaagttttgaggcagacccaactcctgactttgaaaatgtcaaagggtttttgaggtagtcgaaaaattattttataagctttattattgaataaatattaaattaggagccccaagccaaagttatgtaattaaaacccatcaccaactttgggcaagtttttaaatttttttttcaatttccttgttgttgggaaaaggcccccca

SEQ ID NO: 657768 - DNA, 250 bp, Homo sapiens
aagacgggcattacagggaccaaaagtctgaaaggtgacttttattaccaacacactggctggaaaagggacaaaccaccatcacgggggagtaatacttttcagtttttcccacccacccaaaaaaggaaatgggggcgggggcatattttttttttcatttaaaactggaaaaatattgaagagcatccatgttcacttatggctggttttgctatagaaattggaaaataaaggccacttttttgaa

SEQ ID NO: 657769 - DNA, 214 bp, Homo sapiens
ggagggtcctgggaagtctgagggctgagtggggaggcagaggtccagcaacattgtcaatggcaggcagcgcaggaggggcgatgcgtgggcgagtccatgagtccagtgaggcggcgcgactcaacttgagggcggtagacgaaccttgcgctgcaattgcgatgcttggatctcgctttcgcggaagaatgaggctgaagccaccttgtgg

SEQ ID NO: 657770 - DNA, 152 bp, Homo sapiens
gtgacagtcctttctagagctctgtacactgggggtgtgacctactttggacagagtctccacgggagaggtccttgatgcaggtcagccctcagtgacagaacagctccactgctgtcaacatgcacgcgacatcgcatggtacgagctcg

SEQ ID NO: 657771 - DNA, 247 bp, Homo sapiens
  misc_feature (2)..(2): n is a, c, g, or t
ancccacacctgcacgtagtccacacctgcaccgggtcaaagtatttagctagactcgcacactccacggaagcgatatgaaatgatctgctgcagtgtctagagccctaggattcatctttcttttcaccgtagtcggctgactggcattgtattagcaaactcatacatgagacatcgtaactacacgacacgtactatgtagtagctcacttccactatgtcctatcaagtaggagctgtattt

SEQ ID NO: 657772 - DNA, 1664 bp, Homo sapiens
  misc_feature (76)..(76): n is a, c, g, or t
  misc_feature (1139)..(1139): n is a, c, g, or t
ttgcgcctccgcgcgatgtggttgtgtgtcgcgctgatgttgctcgttgctttgtggttgtctgtctcttgggcgnggggtgtttagtatacaaccgcgtgcgctggtgcatcacatgtttgtgtgccccgccacttaaataaatggcccgtgctgttgtagtagaatgttcttcgtcccgtgttccttgtggcaccctcgttgggggaggaaacaccgtatgggggttttgtgcaccgcatctttgcggtggggggtgccgccccctggtgtatgtttggcgttgttgtggggcgtgcccccgcggacagtccgccccaagggtgtggggcgcgcagcgttgtagatgtatggcgtgtcggcgctatccttgtttgagagattggtgtctccgcccacggtaaagtcctttggggtttccttcccccagggagttcgccccctttgtgtaggagcccctatgccccaccggggttctctgtgtgaagaaaacccacccgccatgtggtgtatgtatttatatgtgggcgcccactatccagctcgcgcctaaagtgtcgccccccaaagactgtttattgaatataattttggtgttaatggaaaagagggttaatcgtctcgggggtttaatagatatggttgctacccctcatataatataataacgggagtacagcgggggaaaatgtggtgagtatttgttgccgcacatgttgctgagaaaacagagtgttcttttggggagaagagaggggcgggaaattatcccacagggcctgatttttagaaagggtttcaccgtattaaagttgtttttcctaaagacagataatagggtgccgcacctcatgtgccccgcactgtctcgcacaggcttcatcaacagggggagaggtggtgtttcaccggccacagtgatatgtagtgtgctccccgcggtctgtgcacagttctcgcgcgctctgcccccagagtctctcttagactctctgtgtgagaggaagagtttctgtgtgtcccgacactggtgctggtctgcacagagtgtgggaataccccctctgccgccgcgcctttggccccgacaggactgcgtgctgaaacgctcgtcgctgctcgtcgacagctctcacgangcgtgtcgctctgtttccgcccctgcggagtgctcacagagagagaaatagggcgagtctcacaaagaggggtctctttgtggtagaggggcggggagataaagagagagaccacacggcctctcggtgcgcctcatagagacctctccacgagataacgctgtctgtgtcctatattgtcccgcaccctgcttttctgtatacttcccacacaaaaaggagaatgagaccacacccccctcgagactctctgtgagagtggtgtgtaatatctgcgcaccacatccacgtggtttgagagtcacgttccccacagagaggaagaaggggggaaccctccctcccactcttttttgcacacactctcactttcttccctttgctgttgcttcccccctcaccaccacacttggttttgttctatcctcacactttgagagtttctattttatgttgaaacttgctgctttttttcatattgaaaagatgaccttgcccccagagcccaaaataaatgggaattga

SEQ ID NO: 657773 - DNA, 554 bp, Homo sapiens
acacattggagcccaacactgttgctgatgaaaggcgccccagaaaggatcctagcacgttgcagatctatcctcctccacggacaaggagcagacccctggttagaggagctgaaagacgcctttcagcaacgcctcattttgagctaggggggactcgagagaacgagtcctaggtttctgccacctctttctgccagatgaacagtttcctgaagggttccagtttgacactgacgatgtgaatttccctatcgctaatctgtgcttatgttgggctcatctccatgattgaacctccacgggcggacgtacctgatgccgtgagcaaatgtcgaagtgctggaattaagtgtcatcatggtcacaggagaccatccaatcacagctaaagctattgccaaaggtgttgggagataacatccccaacaccactcagaaatagcttcctcttgggtcatataatcaaagagatacggggaagaaccatccaattacaaaatatcttctcactcattgtaaccttgtggagacatctatcctcacaccctaca

SEQ ID NO: 657774 - DNA, 359 bp, Homo sapiens
tctttttgtctttttgttaatgttttgcgcttgcctaccatagacacactccaatcattctaatcttataacaagtatagcacagacgcacggataaaacaaaagacaccttaacagcgccttaatactttcttaactattcaatttcataggttgctagaagtttctcgttgtcaaactccacatttgtagtgtttccttgctactgtatacccattggcgtgttcgtatggatcattaggcttactgttccaattggtgcatacagcggcgtcagtgtctgccagcttttctgtatgatactggcactggcggcatcggtatttaggcggtggcaatatcactaactcattggcaac

SEQ ID NO: 657775 - DNA, 1323 bp, Homo sapiens
  misc_feature (393)..(393): n is a, c, g, or t
aaagatcagagcctcctaagaaatatccaagaaggtcaagccatggatccacctgcacataaaaaaaaaaaaaaaaaaaaaaaaaaaattttttggcgcgcgcgccttcgggcccttgaaaaagttttttaaaccatttcggtttgggcgcgcgcgcgggcgcccattgggtaaggtgagaaattggggcaataggtggctgcctagagggacaactcggggggcgatgacaaaaggtgggtgggaacttctcccaccaaattaaaaaaagcccgggggcggacaaaccggaagaggttttgtgaactataatctccgacaagggcgattctcgcgaagggctccaatacagggaggactcctacacaacacacaggggggagctccaagagngagagcgcgcccgagaaatattcaaaatatattagagcgcccccgggctcgggggggtagacaagacaagaaagaaaggaaacaagataagacgagcagaagaacgatacgtagaaggaggagaaagaagaaacaggaagcacgaaaggacgaagtcacgaacaacaaaagaacaacaagaagaacaggagcagcaacagcatacagacgaagacgaccagccaagaacaagcagaagaagaaacaacgaaccagagagaagagagaggagaggcgaagggcaagaagaagggagagaaagaagaacaaggagagaagacaagagggagagagagaacgcgggcagagaaaggagaggagcaagaaggaggaggaaagcgagagaaggaggagggacgcagggaggaggagcagagggaggaaagagaggagacagaagacagagcagacagaggagatgagggaagacgcgagaggagaagaagagaagaaaagggagaaaagagagcggcggagacgaggggagaggagaaaagaggagcgaaagaacgcgagaagacacggacagacgaaagaggagagagaaggagagaggagaagaaagagacagaaagaagcaaagagacagagaggaagagagagaggcaaagaggaagagggaggagacaaggaagagagcgaaagagaagcgagaagcgaagcgagagaacgagagtgagaaaggagaagaagggagggaagaacagagagaaagagcagaaggagaaggagaagagacgagaaggaggggagggagagaagaatgggagagagaaggaaaggagaggaggcggagaacgaagcgaggaaggcggaagaagaacgagagaaggagaaaaggggagcgagaggaaagaggcaaggagaagggcaggagaaggaggaagagaa

SEQ ID NO: 657776 - DNA, 180 bp, Homo sapiens
  misc_feature (68)..(68): n is a, c, g, or t
gtggagaactctaatacaaagacatttgaagattgagagaatgcacaagatggcccccgcagccattngtactagccatctcattttatatcacatctaagtatgccttgaatttttttagttttatgtacctggccttattgtgctcttatcagtatgacttctgggtttttggaaatg

SEQ ID NO: 657777 - DNA, 1566 bp, Homo sapiens
agcggacttccagtcacgtgactacgcaggagctggctggcctgctggctcaaactggatcctgctgcctgctccagaagataaatgcctggcaaacgtaagcaacggggcaggatacatataaagcctgtgacaatgtccgacctatcctgcgatcccgatgtgagcttggaagacaataatggtaggagcagaagagcacgggcagagacgaagcgaccgagagaagaggagccaggcagaaccccatccacacaatccaaatcgacgcccaaaacccggaccgggacggagtgaaccgagtaagatcgccaccggaagaccacgcggaagacccgaaggacacccccacagacaaaggaaaaacgtaaggaaggactcatcaccgggcccaatacaaagaacaaacgagcgagcccataagggagccaagtaggaggaagctatccagtccaaccggcaaagaagcaaccaaccagtagaaagacgcaatgggcggaccaaccgagccgaacaaaaacagaccaaaaacgggaagaaaaccgagaaaccaccggaaaacaagacccaaaacgcaggaaagagagcacacacagcacccaaaacgccgggccccaaaatacaggcacgcactaccacccaaaaaccataccccggcacagggaacacccccaaggacgaaacagagaacacagaaaggcgaacgcgactccgaaaacagaggagacaacccacgggcaaaggcccgcataaaaaagaacacacaaagaaaacacccaaaacggaggacaccacaagaaaaccaaagacacagaatcccaagagagcggcatacgagaacacaagaaggaaagcaagagcaacagcgcccaaaccagagaaaaaaacaatccacaaggacacacaaaaccgggaaaagcaccgcgcggacagacgaacagggcaacgggaagagaaacaacaaagagaacaataccgcaccccgatggcagcccggaaagagcgaaaagaacacaggagacaaaagagcagacgacacacacaaacagaatcgacgcgccaaaacacagccacgagatgaggcacacgagaccaccaagaggcacaaagaaaacgaaaggaacacaaaccagaaaaacacacagaaacaagcagagggcaaacaaggaaaaaagtcgaagcaggcacagcatagaacagaaacaccccaggacacacaagaaacgcagaagaggagcacccgccgagtggcgagaataccaacgcacaaataagacacaccccggggaaacgcaaacaaaccaagggggccccagacaggaagaccaccgcgcgcgacacaagtacacacggaggagaccgaacaaccaagcaacacgcgccacacacaagacgaacaagagacaccatagtaaacaaagaccacacaagggacaccccccaccaacaagtggagacacccaaccagacaaaagaggaaacaagcgagccaaacaacgacacggcaccacatgggagacacagacccaatgggcgagcgcgcaaccacaaccgacaaacacgccc

SEQ ID NO: 657778 - DNA, 112 bp, Homo sapiens
tagccaaagcgtagtacccaaatatatgtataggcagatagaaattgaaaactggctgcaatagatatatgtacctgcaaggtgaaagatgaaaaattataacgcaagcata

SEQ ID NO: 657779 - DNA, 1026 bp, Homo sapiens
  misc_feature (523)..(523): n is a, c, g, or t
taattttggggggggactatttccaaaccctaaataaaaaatttccccccaaaaaagcgggaaaaaaaaaaacaaaattttcggaatttaattttttatttgttgttggtccttcatttgggggacaattatttgtaggagaatgtacaatattattatattaatatatataacactcattagtggttatatgataatgtgttgtcatgtgtcataaaaagtattatgtgtgcgcacttattattttatatggctatatatattttctctaaagtgttaaatatattgcggtccatgtcgtggataaaaaatatttagtaaaaaagaaaatatatattattcttataaatttatatttcaacacatttatgatgcgtcgccatcccccatatgtggtgaaatgtgtgttccctaacacaactgtgggtgggagaaattacatccgtcggtctataattcacccttcttatgtgggggcgctgttccaacaaacgcgccgtcttatatgtgtttgtgcgtctanaaatatttccctctaatacaacgtggtggcgagcaaaggagaagatatgtgtcctcgtgtgttataatgacgactctctgcggcgtgagttgttcctccccagacaaaagaagggcggacaacaaacacatgctgtgctctccacacctatgtatgatcatccataccaaatgtaggctgctccactttctaccacctactctattcgtgatgtcttgtatatacaaacctctttgatagcgggtgtctttttcaaccgacaagagttggccacgggctcctagcgtccgacagacagttctttttgcggtccggaaaaacagattattctcagcaccattggtgcgcgccacacaatcatagcgggcgggggcgaaacacaatcctcctccgtggcgtaggaagcaacaccgcgggctacgaagaaaaaatcaagggtcctattcttttctttgttggcccccccccaaatataaattctttttgtttggctgttctgctac

SEQ ID NO: 657780 - DNA, 171 bp, Homo sapiens
aagacacaccattacacaccacactccacatagcgcacaccacactccccgatgacacacctcacacccaccacatccataccatacacacacacctcacacacacacacacacacacacacacacacacacacacacacaaagggcgtggatcatttctcccactcgagc

SEQ ID NO: 657781 - DNA, 704 bp, Homo sapiens
  misc_feature (205)..(205): n is a, c, g, or t
  misc_feature (254)..(256): n is a, c, g, or t
  misc_feature (293)..(296): n is a, c, g, or t
  misc_feature (298)..(298): n is a, c, g, or t
  misc_feature (349)..(349): n is a, c, g, or t
  misc_feature (362)..(362): n is a, c, g, or t
  misc_feature (364)..(365): n is a, c, g, or t
  misc_feature (370)..(370): n is a, c, g, or t
  misc_feature (373)..(373): n is a, c, g, or t
  misc_feature (381)..(381): n is a, c, g, or t
  misc_feature (423)..(425): n is a, c, g, or t
  misc_feature (458)..(458): n is a, c, g, or t
  misc_feature (475)..(475): n is a, c, g, or t
  misc_feature (500)..(500): n is a, c, g, or t
  misc_feature (677)..(677): n is a, c, g, or t
gatattcacatcaagtacatagaactttttttgccttttatataatacagtttttaaataactttacacagaaataaatttcttcaatctgaatttcagctatctttttttattctccatgctttctatccaaactgaacaatattttctgttatacaaatttacatgagaaaaactccaaagtacaaatgaagggccctgagcnggaaagagaacccaagtatcaggaagtgggtatgggggagaattaaaannnataataaaagattcaagcgaacattgagaataggggnnnngngggggccctcctccctttggctggcaataaatgtcttttttatgaattganaaataagctttancnntagtnacnccattgtnatttttgcgaagcggggatggggggggcggggggcaattacnnngtccccatcttttcactgggcgcgccccaggcnccacggggcccttttcnatgcgtgagtgggctggagtgtacnaaacccgcgacctttggcggtggccggcgagagggatgtgggtgtgggtgcgccagaagggttggggtggtgaaacaggaaccgtgaattcactgcagttcaaacaggaagcatctccctttcctctcccttacaggagtcatgtcctcaaaccaaggaatacatgaaaaggggggntttcctttttcttggtctaaaccaaag

SEQ ID NO: 657782 - DNA, 239 bp, Homo sapiens
ctgagcagctaaggaaaagcaacactgggaaatctatcttacctagagcttaaagcaattgtatgttttcacatttctcatttcagctgtccagtaccttgccgggtatccaatgaagctccttttactacggatagagctagtttcctttctctgtttcagcagtcgtgaaagatacagagaagtaacatatcgtgggagatgtatttgcagaaaagcttcagttggcccttatcgag

SEQ ID NO: 657783 - DNA, 169 bp, Homo sapiens
aaccactactgccatctgatctataaagtgcggtggcatcgacaaagaaccattgaaaaatttgagaaggagggcgctgagatgggaaagggctccttccagtatgcctgggtcctggttaacttgaaagctgagcgtgaacgtggtatcaccattgattattttcttg

SEQ ID NO: 657784 - DNA, 105 bp, Homo sapiens
agcccgcatgctggtggttgagcccatctgtcccagctcctttcccacccaccttcgtatgcacccagcatttttctgttcccatctgtcctatttgttcttcat

SEQ ID NO: 657785 - DNA, 276 bp, Homo sapiens
tgttgtaccgttgttgccatttggactctcatagtcacttgcagcaagtagaggggcatcagctcgcattcaggatgccctgcattacagtgttgcaattatgcagaggatgtactgtctggaaaggtgtcagctcacaatactgtgggccgcttcctgtatcagcctggttaaccaagtacctgataatagttcccgatcactttcataccattctcaacagcaacactcatcaccttttgatggttacctacatagtcactacgtacaacacgt

SEQ ID NO: 657786 - DNA, 349 bp, Homo sapiens
caccttcatgaacaatggatggggtgacgggagattgaggctcctgtgtccagtggggatagatccaagcactgcggagtgattgccttggactgggaagaagggaagcctttgaaagaggattagaataggacagcttgggcctgggaggggctgcacattccaggactttccatcaagagtttctgttttttcaagaaagtggaaggtgaggtcatcttctgagtgtgtgggggagggaggagtactattttccttgctaagtgctagaaactgggctaagcactttacctgataaacctcatttgataccttgagaatctcacgaggcatgtgcttcatgttggtt

SEQ ID NO: 657787 - DNA, 297 bp, Homo sapiens
ggtaagaggatatggtgagtagtgtcaggtgggtcaggtggaggctgtaggaggagatgttatcagagggtaaatggaaagggaaaacaatttcaaatgtggtcatggtgagcagtaacatcttgggcaacagatcttgaccagggatcattttgcacccgatgggatatttgacaatatctggagacacgctggtggggaataggtgctagtggtactactgggtagaggccaggaatattagtaaatctcctacagtgcaaaggacagctctgcagaacaaagaattacccagtc

SEQ ID NO: 657788 - DNA, 126 bp, Homo sapiens
tgcagacggcggagtcggagaccaaaaggatccacaaagcaagactccagtctcctgttagaattccattcctccaacccccactgtccttgttattcctaccatccccagtattcctatttccaa

SEQ ID NO: 657789 - DNA, 670 bp, Homo sapiens
atgtgagggcgatctgctgcgattctgtcaccccattgatcgccaggttgatcggctgatctgctggctaggcggttgtccccttcctccctcaccgtccatgtgcgtccctccctgaagcttgcgctgctctgtccgaagatggactgaccatcccgggatagaggacggacccgctcttcggccagggggtatacgatgtagctggtgctccctttgtaagaactccaaaaaaaggctctcaagtgtccatttgtgtacggaagacccgtaggggtagtcaaagcttccaaagattccagaacttccaaatttgagggggcttgatttgttgccagttcttggccttttctcctaactacgaacagaacacgaacatgtagaccacacaacaaaacgtgttgtgggcggccagccgacccagggaaaaaagttttagaagaccacacattggctgtgtggcgcgcgagcggcccgccagatagtgtaaggatgacacacttgtggcccaaaccgtgtgcgccccagaagaacaaccccgtgggtcgtgcgcagttgttggctgtgtcttcctcccaccaaaaagagacgccgcgggcggcgacagcggacgtgttttgggaaccaacccccaagggcgttgggggcagcagcggctcccaaacagagg

SEQ ID NO: 657790 - DNA, 442 bp, Homo sapiens
  misc_feature (419)..(419): n is a, c, g, or t
  misc_feature (427)..(427): n is a, c, g, or t
tgctaaagcaacatgcattacatgatgtatttttcgagtcacaaagcaaaacctgcctgtgataaatagagtgtatggaccaaatatgcgcttagcggcggccggcacctgggacgtgacggcccttacgctcaggcatttgctgcgacgtcacaggagctgtaacagtcactggaaggttgtcaaagccaagactgtgaatcatctcctccgtgtcggggtcaatctcaagaggagcaaccgacgggtcaagagccgacacctctggaacatattggtccttgcgctcgcgctcttcttcttgaagcttgaacgagatgccacgaacagggccacgctggatacgcctcatcaagtgtgtcgtgaaaccagcgatcttgttgcgcagacgctttgaagggacaatggccacctcatcnatcacctncttgttggtgtggaa

SEQ ID NO: 657791 - DNA, 591 bp, Homo sapiens
  misc_feature (105)..(105): n is a, c, g, or t
caattaaatactggcgtgggggcgaccataattacccccatactccttacactagtgcttatcacccaactaaaaatgttaatcacacactaccacctaccttcntcgacaaagggcataaaaataaaaaattgcaacaaaccctgagaaccaaaatgaacggtttttttggtgtggtgaatcattgcccccacaatcctaggacgtacccgcggagttctaatcattctattcccccttatattgatccccacctgcaaatatcttattaacaatcgactaatcaccaccgaacaatgcttaatcaatactcctttatcatccctaaacattccaatgggcacaacctacctccttgcacctgagcctaagacagttacaccctctcccatctttgtactattcttacccaggcttcatcagatattattgagttgcagaggtcttatgtcccccacttctagtctagatggacctaatacacttcactccactcgtctcttcctcgctccttaaactcgactagtataatggatttctttgtgtctacctttaatataattgtcttgacgctagtccattcaaatataa

SEQ ID NO: 657792 - DNA, 379 bp, Homo sapiens
  misc_feature (4)..(4): n is a, c, g, or t
  misc_feature (17)..(17): n is a, c, g, or t
  misc_feature (74)..(74): n is a, c, g, or t
  misc_feature (134)..(134): n is a, c, g, or t
taanaacgtggtggttnaaagcatctccttatgtgaaaactccgtcctaagcatgacatactcccttgcagttncctagtgatagaaaactcactataccggctgggcatggtggctcatgcctgtaatcccancgctttgggaggccgaggcaggtggatcacatgaggtcggcagttcgagaccagcctggccagcatggtgaagccctgtctttactaaaaatacaaaaagttggctgggcgtggtggcaggtgcctgtggtcccagctgctcgggaggctgaggccggagagtcgtttgagcccacgagtcggaggttgtagtgagccgggatcgtgccattgcgctctagcctggggaacaagagtgaaacaac

SEQ ID NO: 657793 - DNA, 132 bp, Homo sapiens
cccctcaagggggcttggaacccggggttggggtcatgctgcctccgtggctccaaggtgagggtctttttcacgagcaaagagaaccaataaagtgacaaggaaggtttggggtttccagccctcccccca

SEQ ID NO: 657794 - DNA, 1170 bp, Homo sapiens
  misc_feature (46)..(46): n is a, c, g, or t
gttcctcggcgcccctttgcctacacttgtcctcttctcgcaccgnatcggaggagccagctctttccgcgcggagcattctggggcccgaggtcgagcccgccgctgccgccggtcgcctgagggaaggcgagaagaggccgggaccggagagaaaaagcggagtcgccaccggagagaagtcgagtccctagcagcagccgccgccagagaggtcgcgcccacacagttcgcgccgtctccgctctgccccgttcacaatggctagccgtgcttctgctgatagtggtacgatcgaaggggagtatgtcttcatggaattaagtgtgaagacagtaaggatgtggaatgtacacattttgaatacatgccagaattacattcagtggtctcgagaggagagtgatcatttgaagcatttaaatgagattgatctttttcactgtatgggatccaaatgattccaagcataatggaatggacagatcaattttacatggttgttaacgagataaggagaagtcttggccagatcagtgtgcagaggtttaagatagacgaaagggtaaaggttaagtggcttagtgtcgacttccataattggaaagactgggaagatgattcagatgaagacatgtctaatttggatcgtttctctgagatgatgaaacacatgggtggtgatgcggatggtagactttacgcagacagtagatgggagcagactgatgattccacaagacacgggatcgctgacaacaatggcagatctcggacacagggaccactgggcacacaccgggctcgtggggaaaacacacagagccgctggagaatcacaactgagagaatgcggacgtggatcgcctaagcgcgacattgtcggaattaggccacataaacgcgagtgttaaaccagagtgtgggttaaaaaagggatacaacaagggagttattgtacaaggaatgtggaaaaaataaatgagataagcggacacaactgtagaagatatcagaagttagacagtgggatagagaataataagaagtgagatacaagaaaatacttctttagtaagtagagaagatgcagcaaatactcatagattagagagaggaaatggagcaggaataataggatattgattgtttttttatattttcagctag

SEQ ID NO: 657795 - DNA, 1099 bp, Homo sapiens
gctcatcgcactgtctctatcggtgttcttggacattgtccttccacctgtgcacaagcattggtgaacttatttcggcatactacttcaggggcctatatggcgaacaatacaacatgtcctttctcagtggtgggtctggatcgctgacccagtagacaaccgctcatcctctagcaagcttaaacagtgtcgagatggtgaatcaacagaatacccaaaacatcagggcatatcgatgcgattggaatatacccgtagtgagctaacacatgtaaaccacttcagacttatcacctggtgtcgcgagacctggtagcgagttttgggatcatagtacaccaggaattcctctggtccacacctggaaggggcgccccatcttgagctttacgcatggaactacgacaaagggtcgtgaatcgttcggtctgtaagaacgagtcaatgacatatgagtcgatggtgaaacggagggcccgtgcatgggatgctcatgactgatagctggccgaggacgcaggctctcggtgatgctgtacctcctggtgtatcgggcaataagtcaggacctccctcaagcgccatgaatgcggccgagtatcacagacaatctgggggctgcatctcactacgactcacaggaactggtgacattcgggtcagctgcaccaccagcggagacgggctctatgaaggactggagtggctgtccaatcagctccggaaccagaagtgaacgtagaccccctcccatctcactactctagacctctgattattctcatgttggcaacacgtgcggctcgtaggtttgagtgtcagaaagctggctcagtggttaggtcgaccttgtgcatccgcacggtcctgtaattggtggagacgcacctgggccagggttaatttcatggcaataagtttcggttcgcaagaggcacttctcgggactccatgccaatacacacggtttatcgtaaagcaaaaccctcgggtcgcgcgacgggtttcggcctggccgcccgatcttttttgagaacaacctcgacactttcacactggggttcccaccgttcacaccacccaaaaccacacccct

SEQ ID NO: 657796 - DNA, 203 bp, Homo sapiens
caattccattccagcgtagggggggaatgacaacggcccaagcgggaacactatagacccagaggagagggaaaggcgaccagacggcatgaagatggagaattcgggatgtctttcagtgacttccggaggcactattcccgccgggagatctgtaacctgaccccagacactctcaccagcgatacgctggaatggaatgg

SEQ ID NO: 657797 - DNA, 100 bp, Homo sapiens
gggggcccttttgggggggtttccccccctttttttttttaaccgccggggttcccccctgggttttttgtaggggaaaacttaaattgccccccctcca

SEQ ID NO: 657798 - DNA, 116 bp, Homo sapiens
ctaagggggagggatcattagcattgagacaatatttcctgtacttgtcagtatgtcaaacacactccatccaaaaaatcagcttaactcgtaccactatattccccttcctccca

SEQ ID NO: 657799 - DNA, 566 bp, Homo sapiens
  misc_feature (54)..(54): n is a, c, g, or t
  misc_feature (493)..(493): n is a, c, g, or t
aggcacaacatcgagcgcatgaaggaggagaaggacttcaccagtactttcagnacacgaaacagccggtacaacaggagaaggagtgctcatgtccaagctggtggaggcggaaatggatgggctgcggtgcagcagtcatggcttgaaggatacatcggagctgaaacggagaacaatgactgcacgacatcacacctgacagcaaaggacttctcctgcagaagctgagcacatttgaggagaccaaccgcaccctccgagaactcctgagggaacagcactgcaaagaggattctgaaagactaatggagcaacaaggagcactgctgaaacggctggcggaggccgactcaagaaagcgcgcctgctgttactgctgcagacaaggacaaggaggtggaagagctccttcaggaaatacaatgtgagaaggctcaagcaaagacagcctctgagctttctaaatccatggagtccatgcgtgggcatntgcaggcacagcttcggtccaaagaggctgagaacagtcgcctgtgcatgcgattagaatctggacgcacggg

SEQ ID NO: 657800 - DNA, 211 bp, Homo sapiens
gtcttgaatattttacttctagaaatgactgttagtcttgttgggaggtgagcagtagggaatgttgactgtgctggagaacatagtaactatcatcagttctcacccctcataatcagaaagcccattgtctgtgccgtgaaaagaggactaccttgtcaggaacgattttacttactctctacaacgatcaaaggatctcgttacttca

SEQ ID NO: 657801 - DNA, 286 bp, Homo sapiens
  misc_feature (227)..(227): n is a, c, g, or t
  misc_feature (244)..(244): n is a, c, g, or t
tagaggatccccgaggggtgctgatgcgggtgtgcgggtacatcggggtgggtagagtgagaggaagatattgaccttagtattcctagcctgggaggagccatccttcttccactatataataatcctgcttagttcatgtggtgctgacccatacttctatccgcgctctggagcatcagcgaggcaatcgaaagcgtacaagacaaaatacttcagtttccggngccacttgtgttcatgngatgggcagactcgtaactcacggccaagtcagagttctccc

SEQ ID NO: 657802 - DNA, 804 bp, Homo sapiens
ggttgttctcttcagagaaatttgtggtacagaataattgctgtcgggactgaagctttgcagccttgcggtccttgtacccagttgttctcttctgtgagcagcatgtcttcgcgtttcaagagtggccaacgttctagactgctcttcctagaacctctaggcaagttcaaggttctacatgaatcttactacaacatatgagattgttctctggcagccggtaacagctgaccttattgtgacgaaggagacaagtccatttttctgtagatgcatcgtgagtgtcgacaatgtgaaagcccatttacatgtgagcggaattccatgcagtgtcttgctgggcgagatggtggacgatcttattcaagcagcagatttccagaggacgacagtcgagtcgcccgagcctccgcatcgtacgtagtgaacagtatcactcactaaattgaaatcgtagttctgtggactcgaatttatagactgagaggcatcctgatatgcttacaaaaagtccacattggatccgtcattgtgagaagtacccactctactgttttacaaggtttctggaaaagaacaagcagccgaaaatgccatatggattgactgtggaatccatgccagagaatggatctctcctgcttgtctgcttgtgggatccataggccatataacctcaattctatgggataatagggcaatataacaaatctcctgaggcttgttggattctatgttatgccagtggttaatgtcggatggttatgactactctggacacaagatcgaatgtggagaaaa

SEQ ID NO: 657803 - DNA, 109 bp, Homo sapiens
gctgctctagaggaccccgtttcgttcacaaaaatcggaaaacagttagccagaagaagagtataaaatggccggccttctcatggggtagtggcagtttcttggccaa

SEQ ID NO: 657804 - DNA, 796 bp, Homo sapiens
  misc_feature (22)..(22): n is a, c, g, or t
  misc_feature (64)..(64): n is a, c, g, or t
  misc_feature (538)..(538): n is a, c, g, or t
gctcaacccaccttctgcttcntgggatcaagaattttcctgcccagcctcccaagtagctggnatacaggcatgggcacatacccagctaatttatgttttagtaagagcggggtttctccatgttggtcaggctggtctcgaactctgacttcaggtgatccacccgcctcagcctcccaaaagtgctgggataacaggtgtgtgccactgtaccggctaatttctgtactttttagtagagatgagctttcaccatgttggccagcggggtctcgaactcctgacctcaggtgatccacccacctcggcctcccaaagtgctgggattacaggcatgagccaccatgcccagcccactctgcagtctttacagcctttttatgtttcttgagttaccctattgcctagatccttttttttttgtttgtttgtttttttttgggttggggttgggtttttttttttgagacaggatttctgtcacccaagctggaatgcagtggtgccatcacagctcactgtagcttcaaccttncagggttcaggtgatcctcccacctcagcctcccaagtagctgggacaacaggcgtgtgccaccacccctgctaatttttgtcttttttgtagaaatggggttttgccatgttgcccaggccagggttcttaatatttttttaatgtatctgataaagccttaggatcatttctcaggctaatgtatttttcatttgttttctttttatatataacagctttattgagatataaagtgtgtaatacagtgaaaaaaaa

SEQ ID NO: 657805 - DNA, 325 bp, Homo sapiens
gagaggagagagagggagagagaaacggacagatcgaaccggaggacacagagcggagcgagaagaagaaggtaatatatagtacggattaagagaagaggaagaaggggaacaatgtagaggaggagaaagcatgtaaccgaggacagagcggtgcggcaagagcgacaggacagagacaactagagaacaagatgagcaagagagagatcagtgtggctcagtctctctgtctctatctctctatctctctatatctctctctctctctctctctatctctatatctctctatatatactatcgcgtgccgaagtccagcagc

SEQ ID NO: 657806 - DNA, 402 bp, Homo sapiens
ctgttcagagtattccgcttctacgtatatgactgggtaaacttggtggtgcgctggaggaacccgtccgctctgaggacgggagacagaccacaggacagagttggagctctagctcctggtgctgttcctgcattcacccactggactttcccacctctgctcaccttactgttcacctcatcaaatcagttctgacctgtgaaaagatccagccttccctgccgtaaaggatggcgtcttactcgggattcctgatgttgttgtggccttgggtaaagagctcccctgagaacacaggacaggcctgatgacaaaggctgagtctaactatggaaaagaccaagatataacttcctgggcacactgggaaatctgagcagtgatgaagacgtaaaaggg

SEQ ID NO: 657807 - DNA, 495 bp, Homo sapiens
agatctctacagcagctatccaagctttatgatttccttgaggttacacgtttgtggctgctcttagtgtatattcagaaaaaaacagattgcgaagatcggcttacagacgtggatttctacactgagcgccagggttgactacgctgaatttaaaaaccgagccctagcgccagctcagcaccctacgctcaggaagcggattttgcacacacactactgcattcatacagagttcactgaagtctattaccaagtgtcttttatgaataaacaatacaaagtccaattttgatggctgctataaaatgcttaggaatctctgcaatactttactacaaatacaaatgccccagaggtcagggaaatcagcctgaagaactgggtacaggttctatatcttttgtggaaatatcagcctaggaatgttattcccggtacagatgtacacagtcaaaaaggcttatcgagctgtttgacgagttctttgagtgt

SEQ ID NO: 657808 - DNA, 269 bp, Homo sapiens
tgaactctagcgcgactagatgctggtaggcgcgcagaggaagtgttcattattggtagcttggtcgctactcttttttgagcatcaccgccagctcctggggaagtggcgcaccttcaaatacctttacctggcccttgtcccggtcccggtaaagaatcatcggagttcttcgaaaccccgcctggcggaatagagccaggttgtccgcaaggttttggcgaatgtcttcggtgactgtcgccggctgcagctgacgcttcgccatc

SEQ ID NO: 657809 - DNA, 108 bp, Homo sapiens
ccgtcgtcggtcattccgctccatatctgctacagtgtaggacggcattcacagcaagtctcagccatctgtcggtaatgagctagttgacctagtgtggagcccagc

SEQ ID NO: 657810 - DNA, 110 bp, Homo sapiens
tattgcggatattcagactgagcgtgcctaccataagcagccgaccatctttcaaaacaagaagagggtcctgctgtgagaaactggcaagggagaatgctcccgcggta

SEQ ID NO: 657811 - DNA, 185 bp, Homo sapiens
  misc_feature (22)..(22): n is a, c, g, or t
  misc_feature (45)..(45): n is a, c, g, or t
  misc_feature (56)..(56): n is a, c, g, or t
  misc_feature (154)..(154): n is a, c, g, or t
  misc_feature (170)..(170): n is a, c, g, or t
  misc_feature (181)..(181): n is a, c, g, or t
ctcagtgcagggacgtcacccntgccaggcaagcccagggacagntgccaggatgntttctccctctcagtgcgaggcttcacccctgccaggcaagcccagggcatagatgctgagacagcctctccctctcagtgcagggacgtcacccctnccaggcaagcccaggncacacaggccnggat

SEQ ID NO: 657812 - DNA, 111 bp, Homo sapiens
tctgacaggggcggagccacacagtatgctctggcaggaggcggagctcacacagtaatgctctggcaggaggcggagctcacacagtaatgctctggcagtgaggcggag

SEQ ID NO: 657813 - DNA, 171 bp, Homo sapiens
gtctgtgggcacagtggtctgtctggctgtcagtgctcctgagtctgctaggaagtgacgcgtctgttcccacaggggtcatggaggacctcccgccatcactgctgactcacccctgctggcgtgcgggggaggaagccctagcgggtacctccggtgagctcgtgccag

SEQ ID NO: 657814 - DNA, 330 bp, Homo sapiens
  misc_feature (50)..(50): n is a, c, g, or t
  misc_feature (176)..(176): n is a, c, g, or t
tcttgttacagtgaaaaagcagtctggatcccgaggtcacccttattgcncaagtccagattgcgcgcaacgtgggtgatcaacgtagcacagattggtcttctcagtacagcattgtggctggggcaggccgagagaatggcatggagacgccgatacacgagaagccggagtgngagaagtgccgtcaggccctgtgcagcatcagcaagtcaggagctgccggcggctctgccaagtccagcagcaatggtgctgtggccagtgcacagtacgtgtcccaggcagaagcctcagctttgcagccgcagcagtactagccatggtacg

SEQ ID NO: 657815 - DNA, 1417 bp, Homo sapiens
gcccgcgggaaaaccgggcgcgttgcatccgactgggtgtagcccgtggggatggcaggttctggggagggctggtcctagcgtgcccctggatttcgtggagctgattctggggtcaggagacaccctccgagtccacgaagaccgggcagctgctatgagagttactatcattggacgccgatggccgtggatcgcggcgccgcatcccaagcccctggatacgtcctgactgtcaggggtccacgcttgacttgtgtctgacgggacccgatcagtgatcctgagtgcgctggctgaccgtcgggagggccctgagaactactcgtcgagaacttgggacggacgaagtgagttcgggcgttacctggagggaacaggagggggccggattgcttgcttgccttgcaagtgatctggcgcggcgttctcattggtccaagagtacttgcatgaagcgtgctggacgactgccccgcataagtcttgtaattcgtccgaaggctgggaccctgggattcatgctcgtgccttgccacaaacggggaggccaagcccccgggggtaaacagtggattgccttgggtattgcacatccgaggggaatgtgtaaggactagggtctccaggacaataaaggcttcttactgaacgtgggcccgttgaaggggagggctacacctttattcatgaagttaccgacaccttcacttccacaaagttgtgcaggctgcgccattacttcattctgggaattcccacatggcctttgcctgggaattgaacaaattgtcggcgaggcatgggtaaccccaggagaagtaccatccttagtgggggaggtcaacatacgtgctgattgccgccgttggtgcttgggaacacaatcgctttgtcccttgaacccattcttggcgaagggggacaccctttatggtgacaagtagaaacacccacactggtttcacggccagagcgtgggagcctgggtccttcaagagggagatggctagcatggtccaggacgggggaaggaaatggcttgggtgttagcaacttggtatcgcacagagtcatctagggggtcatggtagctagtactccgtgaggaacattggacccagaggtaaaattccttgaagcctcatctatagggcccccttggttcatgcacgggacgaccaatgggggccccctagaggtctgtgcacccccaacacaaggaaagccagggggtctggcagggaaccctaattcttctggaccccttcattaggcctgcattccttccgttatcgttaacccaggttcctccatggaagccccccgggctatacaccggggcacacgttggttcatccgaaggacaagtgggcaccaggcattcaggcctttcttgcccttgccctggtccctg

SEQ ID NO: 657816 - DNA, 282 bp, Homo sapiens
  misc_feature (162)..(162): n is a, c, g, or t
attgttgaccttcggggactcgtgagtgccggcgggcatcggtggctggattgggagtgacctcctcagggggttggagctggagttggggcctccccgttccccatcccttgccaagactcccggtgctgggggttgctctatgaagagggaacgcgtagncttgcagatcgtgacacccgctcccagcttgagagtggctgcgaatcggtgcgccggtgctgactgcaatgacggtctattagggtcgcttgccgtccgtctgcttgccatctgtatcgc

SEQ ID NO: 657817 - DNA, 106 bp, Homo sapiens
actaatacaggaaggcgcagtgtcctgtctcgactcaggacgaagatctgattggtgtcagagatgcctccaacctgaccagtgtcgtatccgaggatgcctgtca

SEQ ID NO: 657818 - DNA, 374 bp, Homo sapiens
ttgagggtaaaacgctgagcgcagcgagctgctgatgttgaccatggctctttcctggatctaaaagtcggcaaacacacacctgtattaacggcggggcgtcctgctggagctaaggtcagcgttgaatccaaaggactcgttgacgggcagataggccttgaccacaaacatgggtgtgccgccacctgttactcctcgaacacgtggccccgtttactgttcaaaaccccgtagatgccaccgtccacctgctttggacactgtatctccacaaggtagatggtcttcatgaggcgtggctgggcgttcagcacactggcatagaggcagcgccgtgctgtggggatgatctggccccctccgcggtgtat

SEQ ID NO: 657819 - DNA, 127 bp, Homo sapiens
gctgaggtgatctgtgaaatggttcgctattcacttgaccggagaaccccacgaatcatgcaatcacgaggttccatcttcgtgttcactttaaggacaatcgtgaaactgctcaggccatcaaggg

SEQ ID NO: 657820 - DNA, 261 bp, Homo sapiens
  misc_feature (99)..(99): n is a, c, g, or t
  misc_feature (174)..(174): n is a, c, g, or t
  misc_feature (203)..(203): n is a, c, g, or t
  misc_feature (211)..(211): n is a, c, g, or t
  misc_feature (249)..(249): n is a, c, g, or t
atgagttattcctcagtgtgattgagtccaccaaaatcttaagctaaatttatgttgtttcatggtagctgttatgaaaatgggacccatctaaggagnaaaatcccattgttttctcaaattcaaatgccattctgtgttgacctagggtttgtttccccgttggattaaatngcttatggtggaccattggcctggtttcntcctttcntaatttcaaccccaggtttttgcccctttcccctaaantaaaccccttct

SEQ ID NO: 657821 - DNA, 182 bp, Homo sapiens
cgccattattttcaccatcattttctttaacctatacttatacctacgcctaatatactccatcttaatcacactactccccatatctaacaacggacaaataaaacgaccgtttgaacatacaaaacccaccccattcctccccacactcggcgagggtcaacgcagctgggtaccgagct

SEQ ID NO: 657822 - DNA, 910 bp, Homo sapiens
  misc_feature (18)..(18): n is a, c, g, or t
  misc_feature (23)..(23): n is a, c, g, or t
  misc_feature (25)..(25): n is a, c, g, or t
gggcagtcgagagctcancggangngccttcgcgctcttcctttccaacttggacgctgcagaatggctcccgcaaagaagggtggcgagaagaaaaagggccgttctgccatcaacgaagtggtaacccgagaatacaccatcaacattcacaagcgcatccatggagtgggcttcaagaagcgtgcacctcgggcactcaaagagattcggaaatttgccatgaaggagatgggaactccagatgtgcgcattgacaccaggctcaacaaagctgtctgggccaaaggaataaggaatgtgccataccgaatccgtgtgcggctgtccagaaaacgtaatgaggatgaagattcaccaaataagctatatactttggttacctatgtacctgttaccactttcaaaaatctacagacagtcaatgtggatgagaactaatcgctgatcgtcagagtcccttaaggttataaaattgccttcatgttggtcttttagttgcaacataatgtacttgtataccctatcctaattatgggatcatttgaagagcttttcccaaattgatggctgtgctgcgttctccccatccccgggggtttccaaaggtgatttcaaactggaacctagttttagaaccactgtctgggtagtgcgatactgaaggctatggtacttattctacttgtatgtgggtacttctaagatagcattttcccgaccaggctgtcacatccgtgcccttgcatctttacctttcggacaccgttaatgttctacacaatacctgggcctcaaggaggcagaagggggaggcttagccggcacaacaatgatattgggccacaaaaggctgggaccacaaattactttggccgcggggaaaaactgttgacatttttcccacaag

SEQ ID NO: 657823 - DNA, 401 bp, Homo sapiens
tgggccagaaattcctcagtgctctattactacagggcgggtatatgaaaataagacacacatagccaatttgccattctgcattcaggcgaacattacataatcaaccacggtgctaccgtttaccccttccttattcaggggaggcattgtacatcaatcacaacactggttccactagactctcccctcctgcatccataatacaggtagacgtatttcttatctaaaatgcttgggaccagaagtgtataggacttcacatatcatcagatttcggacctttgccttacttaccagttaagaatccctaatttgaagatccaaaatgctcctataagcattttccttgagcatattttttggtggtcaaaaagcttcaatttctgtgcccatttcaa

SEQ ID NO: 657824 - DNA, 310 bp, Homo sapiens
atggatttcaggatcagagatgtcctgtgaatttccaaaaatagagtgggctgcttttggagctttttgtccctagaggtctccaagcatagactcaattacttcccagggttgaaaggaagatcaaggtataagtcctttataaatgctgaagttagcacagtaccagtcccaagctagtcacgcagtccatcgctttttggagtgaaatatccagtaccttcttgtattttcctctatcaaggaggggccctatctcccatatccaatcctagagtgtgaaagtgaaaattatatgggggtaaggggt

SEQ ID NO: 657825 - DNA, 331 bp, Homo sapiens
  misc_feature (25)..(25): n is a, c, g, or t
  misc_feature (31)..(31): n is a, c, g, or t
  misc_feature (46)..(46): n is a, c, g, or t
  misc_feature (50)..(50): n is a, c, g, or t
ggggctttccaactgggacgctgcnaatggntcccgcaaagaaggntggngagaagaaaaagggccgttctgccatcaacgaagtggtaacccgagaatacaccatcaacattcacaagcgcatccatggagtgggcttcaagaagcgtgcacctcgggcactcaaagagattcggaaatttgccatgaaggagatgggactccagatgtccgcattgcaaccaggtctcacaaagcttgtctggccaaggataaggatgtcccatcccgatccgttccgctgtccagaaccgataggtggagtccccataagctatacttgtaccttgac

SEQ ID NO: 657826 - DNA, 112 bp, Homo sapiens
  misc_feature (89)..(89): n is a, c, g, or t
agctgttcatgctgggactgtacagcctgcagggttttccttgggcgtcggcccaaaattgccttcaaaacaaacccgggacggttganagccttcgaaccgtgcaggggat

SEQ ID NO: 657827 - DNA, 397 bp, Homo sapiens
aggaaaaacatttttttttgccctttcattcatttttttaaaagttcacaagcctttccccttttttttagggcctccgggcaagttttatcattaaaaacaattttttttaaagaccggcatttccatttaaaacgatttggggggctggtttatttgcttagttttaaggggatgtccctgcaacaggccccatggatttaaggaaaaaaaaatccctagggatcctttttttttttgagaagcaaaaaaacatggtccccttagatgttaaaatgttaaaattaaaaattaaatgttaaaaaatggggaaaatgcagattttagaacgagggaaatttttgttgggaatttttatcctcccaaaaaacttcagaaaaaaattggttttccctga

SEQ ID NO: 657828 - DNA, 309 bp, Homo sapiens
cgggaaggaattataaccgaaagcaccacacatcagaccgggtagaattttttgctattttttccgccgaatacaagaagactaataatggataggatttttacaaacacagagagaaatgcttctcttctgctgcggcttctgctcgattatttgcgagcagaggatacacacacaacaacaacccacacagcagagaagtatcagaaaacatagaaacatgtgaaaatgcgcatttttgagaggagtgagggaaaggagtagaggatgcgaaaaaaaaataaaaggaaaccataagaatatccttga

SEQ ID NO: 657829 - DNA, 441 bp, Homo sapiens
cgagcggccgcccgggcaggtgcagaatggctcccgcaaagaagggtggcgagaagaaaaagggccgttctgccatcaacgaagtggtaacccgagaatacaccatcaacattcacaagcgcatccatggagtgggcttcaagaagcgtgcacctcgggcactcaaagagattcggaaatttgccatgaaggagatgggaactccagatgtgcgcattgacaccaggctcaacaaagctgtctgggccaaaggaataaggaatgtgccataccgaatccgtgtgcggctgtccagaaaacgtaatgaggatgaagattcaccaaataagctatatactttggttacctatgtacctgttaccactttcaaaaatctacagacagtcaatgtggatgagaactaatcgctgatcgtcagatcaaataaagttataaaattgc

SEQ ID NO: 657830 - DNA, 332 bp, Homo sapiens
gattgggggccctggggtccccaatccctgtccatccccagttgggggtgggaccgccagattttcccttaaggaattgacttcagcaggggtgggagggtcccagacccagggcagtgtggtgggaggggtgttccaaaaaaaagggctggtcagcaaagccgccccgtgtccccccagggggtgggggcagacttgagggccgaattgtttttagttaggccccggtcctttgttcagttgcaaaggggaacactcatgggggccagccatgggccctttgagcaactggggaggccccttttcccccccatttaacccagaacccctga

SEQ ID NO: 657831 - DNA, 612 bp, Homo sapiens
  misc_feature (54)..(54): n is a, c, g, or t
  misc_feature (69)..(69): n is a, c, g, or t
  misc_feature (204)..(204): n is a, c, g, or t
gggctcataatggagcaggtgaaagttcagatccccgtggccaacgccagagancttcttcaaaggatnacggcaaagtgtttccggaagtgtataaggaaacctgggggctccctggcaactccgaacaaaagtgcatccccatgtgcatggaccgctacatggacgcctggaacaccgtgttttgcgcctacaacttgcggntgcaacgggaacgaaccaacatgttcccggcgagggcgggccaccccccccttttattttccataacggtttttaaaaggggggggccgcatgtacgtactgcctgcccggggcttaagagggtggccccggtgctgggacacacgggaatgtgtccttgcccccccccgccctgccccctgccaaccagtgcagcttggatttcgggggtgtggggccctgtgccttccttaagtgctggcagcccagtggcccctccttcaggcctttggggtattcccctagtgggcccaagtcaacctcatattttgggcggacagcttgtttggactttggagttgggggtggtcaaaccccccaggagctgtcccctccttcggatgggcaaataaattggtggagggcgga

SEQ ID NO: 657832 - DNA, 326 bp, Homo sapiens
ggtcgacttttttttttttgagttttctaaatatcagggtcttaccccttcacttttactataagtttattttcctttgccttgcataggcccagcattccatcctttgttttcctttcctcactatggggctacactttccctgccagactctgattggagttttgtttctctcacttagaagaggctgtttccatacgaggatccataataacaacattgcctcatatttataggattctttggaatgcacaaaatacttgcatatatatttatgaacttctttctgattgaaggcaacatttggtgatataattagagtcgac

SEQ ID NO: 657833 - DNA, 489 bp, Homo sapiens
tagtaaaagaatttcttctttaaagctttaaaaaaaaaaaaaaaaaaaaaaaaaaaaaaaaaaaaaaacgcagaatggctcccgcaaagaagggtggcgagaagaaaaagggccgttctgccatcaacgaagtggtaacccgagaatacaccatcaacattcacaagcgcatccatggagtgggcttcaagaagcgtgcacctcgggcactcaaagagattcggaaatttgccatgaaggagatgggaactccagatgtgcgcattgacaccaggctcaacaaagctgtctgggccaaaggaataaggaatgtgccataccgaatccgtgtgcggctgtccagaaaacgtaatgaggatgaagattcaccaaataagctatatactttggttacctatgtacctgttaccactttcaaaaatctacagacagtcaatgtggatgagaactaatcgctgatcgtcagatcaaataaagttataaaattgc

SEQ ID NO: 657834 - DNA, 140 bp, Homo sapiens
  misc_feature (64)..(64): n is a, c, g, or t
gtgatgcacatatgagtgcgaattgtgtttttactatctacttataatctgttcttatacgcangtatttatttgcgtacatttgactttcatttgtttaaatagaagggagaggaaatttgtagacatcattagacaca

SEQ ID NO: 657835 - DNA, 486 bp, Homo sapiens
tgggaggaaggaacttggcttgagcttgttaaactctgctctgagccctcccttgtcgccctgcatgcagaatggctcccgcaaagaagggtggcgagaagaaaaagggccgttctgccatcaacgaagtggtaacccgagaatacaccatcaacattcacaagcgcatccatggagtgggcttcaagaagcgtgcacctcgggcactcaaagagattcggaaatttgccatgaaggagatgggaactccagatgtgcgcattgacaccaggctcaacaaagctgtctgggccaaaggaataaggaatgtgccataccgaatccgtgtgcggctgtccagaaaacgtaatgaggatgaagattcaccaaataagctatatactttggttacctatgtacctgttaccactttcaaaaatctacagacagtcaatgtggatgagaactaatcgctgatcgtcagatcaaataaagttataaaattgc

SEQ ID NO: 657836 - DNA, 236 bp, Homo sapiens
  misc_feature (31)..(31): n is a, c, g, or t
  misc_feature (49)..(49): n is a, c, g, or t
  misc_feature (55)..(55): n is a, c, g, or t
  misc_feature (62)..(62): n is a, c, g, or t
  misc_feature (119)..(119): n is a, c, g, or t
  misc_feature (140)..(140): n is a, c, g, or t
  misc_feature (162)..(162): n is a, c, g, or t
aagacctaggctcatggacgagatgggaagncacagggagaagggatanccctanacccagntcccaggctggagcatgctgactgtcctcttgccctccagcctttggccttggcttntctagcctatttacctgcagnctgagccactctcttccctttncccagcattactccccaaggaagagccaatgttttccccccataatcctttctgccgccccctagttccctctg

SEQ ID NO: 657837 - DNA, 1093 bp, Homo sapiens
  misc_feature (88)..(88): n is a, c, g, or t
  misc_feature (222)..(222): n is a, c, g, or t
  misc_feature (339)..(339): n is a, c, g, or t
  misc_feature (478)..(478): n is a, c, g, or t
ttatttctgcgcgcacatgaggagcagatttggcgtcgtgcgcgatgacaggcctgagcaaacgagaagaacgaagagcgcgaccgtngcggagtatacgtccgtatcgcatcaaagcccactgagcgtgcacggtatcttatctcttgcctcacatggcttgggcaacagcctgcgcttttatggcgctctcatttttctgggacattgttcttccgacangacgcttcgcagagtaccaatatgcgcgtcggcggagaaaaaagaaggcggcttcgtcctgtgtctcctagtccaagaaattgtttggggcgcgcgccttttttacatacggggacncagagaaccgttttgtgatcaaaagtatgggaaacccactagggcgcaacgtagtattctgccaactctcttatcttatggggacatctggttaaagaagcaccggagagtgcctgggaccaacaagaggagacccgtntgggagcgacacacgatgggcggttcaagtccttgcaggaaaacggtaagcgtgggggtgtgaagaccaaagaccagcgaggtctgggacgacccagcgcctgtcttataaggcctctcaccgcttttttggcgccacaaaatcgtaatcagagacaagaggaagagtctcacgccccctaatgtgcccgaggtaaaggtgcactacgctgcttacacacgggtaagatgtcggggcgcaaaagaaaaaactgccgcgaggagacaacatcagttttaaaatttgcgcggcgatctccagaaatccggtgtgagaaataaacaaaaagggtgtgtttattggctccttgtagacacctgtgaacctgtatgacgctagcttattcagaggcaatactgctgtgcaccacaccatgtgagaaccttcttccccttgtcacacgcaatgtgcgtaaaggcttggcagagcacgcacacgttgtgtgcagaaagcgctggaacaccctagcggacaatgtgccccggttgtaacacgatgtataataggggaggagttttgggggaaaccctttctaaaaaaaaattttcttcaagcccccccagaaaaacaaaaaca

SEQ ID NO: 657838 - DNA, 1018 bp, Homo sapiens
  misc_feature (18)..(18): n is a, c, g, or t
  misc_feature (23)..(23): n is a, c, g, or t
  misc_feature (25)..(25): n is a, c, g, or t
  misc_feature (527)..(527): n is a, c, g, or t
gggcagtcgagagctcancggangngccttcgcgctcttcctttccaacttggacgctgcagaatggctcccgcaaagaagggtggcgagaagaaaaagggccgttctgccatcaacgaagtggtaacccgagaatacaccatcaacattcacaagcgcatccatggagtgggcttcaagaagcgtgcacctcgggcactcaaagagattcggaaatttgccatgaaggagatgggaactccagatgtgcgcattgacaccaggctcaacaaagctgtctgggccaaaggaataaggaatgtgccataccgaatccgtgtgcggctgtccagaaaacgtaatgaggatgaagattcaccaaataagctatatactttggttacctatgtacctgttaccactttcaaaaatctacagacagtcaatgtggatgagaactaatcgctgatcgtcagatcaaataaagttataaaattgcaaaaaaaaaaaaaaaaaaaaaaaaaaaaaaaaaaaaaaaaaaaaaaaanaaaaaaaaaaaaaaaaaaaaaaaaaaaaaacaaaaaaaaaaagaaaaaaaaaagaggaggggaacaaaaaaagaaagcgagaggaggaaagaaagaaaaaagagaagaagaagataacaaaacaaaaagagagaacacaaaaaaagacgagaaaacaaacaaaaaagcagagagggaaggagagaacagaaaaaaacagaaagaaagagagagaagaagacaacaaagagcaagaggagacatcaaagaacagaagaacaaacaaaagaggggaaaaaacagaaaagaacaagaaaaaacacaagaggagaatagcaaaaagaagacgagcaacgaaacgaacaaaagaaaaaatagaaaagaaaaaaaacgaggacaaacaaacacaaccaagagacagcacaagagaaaaagaaacaagcggaacggacgacaagaagaagaagaaaggaaaaaaaagagaagcaaagaaaaagggaagaaaagggaac

SEQ ID NO: 657839 - DNA, 434 bp, Homo sapiens
  misc_feature (26)..(26): n is a, c, g, or t
gtacctccggtaccaaccaaatattngactcaaaataaaatgttccagtccatgtcattaaaaaataccatgtataaaaaaccgcagcatttcctacggggctcctaatgatctgatatatactcagcattcttccaaagtttccatatttattttagattttctatacttttgtttctacttttaaaaataatcacgttttttctttatatatgatatttatattttacagaagagcacaattagtcacaaaaagcttcagcaacattgattattaatggatccaggttttagaactggacagtccgaatctagagtcctccctcttaaagactacaggataccattaaggaaaattcactgtgaatgttatcagatatatttacatattaatttgtgaatgctgtttgatatttaaccctccgaggctagag

SEQ ID NO: 657840 - DNA, 735 bp, Homo sapiens
  misc_feature (18)..(18): n is a, c, g, or t
  misc_feature (23)..(23): n is a, c, g, or t
  misc_feature (25)..(25): n is a, c, g, or t
  misc_feature (720)..(721): n is a, c, g, or t
gggcagtcgagagctcancggangngccttcgcgctcttcctttccaacttggacgctgcagaatggctcccgcaaagaagggtggcgagaagaaaaagggccgttctgccatcaacgaagtggtaacccgagaatacaccatcaacattcacaagcgcatccatggagtgggcttcaagaagcgtgcacctcgggcactcaaagagattcggaaatttgccatgaaggagatgggaactccagatgtgcgcattgacaccaggctcaacaaagctgtctgggccaaaggaataaggaatgtgccataccgaatccgtgtgcggctgtccagaaaacgtaatgaggatgaagattcaccaaataagctatatactttggttacctatgtacctgttaccactttcaaaaatctacagacagtcaatgtggatgagaactaatcgctgatcgtcagatcaaataaagttataaaattgcaaaaaaaaaaaaaaaaaaaaaaaaaaaaccttggtggccgctttggccaattcaacttatgaatgaggcaagctttatcttccggccgaatttgaggctcactgggccaattggcccattagggagcgaattccaatcatgtgcccgcggttttaaaccgtctgacttggaaaaaccctgcggttcccaacttaaatggtttgaaggttcccctttggcaagttgcggaattaccaagcccnncggacggctttccc

SEQ ID NO: 657841 - DNA, 292 bp, Homo sapiens
  misc_feature (28)..(28): n is a, c, g, or t
  misc_feature (53)..(53): n is a, c, g, or t
  misc_feature (64)..(64): n is a, c, g, or t
  misc_feature (131)..(131): n is a, c, g, or t
  misc_feature (178)..(178): n is a, c, g, or t
  misc_feature (202)..(202): n is a, c, g, or t
  misc_feature (223)..(223): n is a, c, g, or t
  misc_feature (243)..(243): n is a, c, g, or t
  misc_feature (254)..(254): n is a, c, g, or t
  misc_feature (271)..(271): n is a, c, g, or t
  misc_feature (281)..(281): n is a, c, g, or t
  misc_feature (291)..(291): n is a, c, g, or t
ggagaaaggcacaaggagaaaacaccantcaatgggagaaaagtcccccaggncagtcttccanctagagcccctcccctttctcaccacaaagattgcttcactccagggcggggcgcagtggctcacgnctgtaatcttaacactttgggaggccaagcacaggcgatcacttgcnggtcaggagttcaagaccatcctngaccaacatggcaaaaccccnccttcattaaaaatgcaaanattagccaggnattatggtacacacgtntagtcccatntattgggggng

SEQ ID NO: 657842 - DNA, 1581 bp, Homo sapiens
gagacggtgttttgctcttcttgcccaggctggagtgccacggcgcgatcttggctctacacaacctccacctcccaggttcaagtgattctcctgcctcagccttccaagtagctgggactacaggcatgcgccaacacaccccgttaattttgtagttttagtagagacggggtttctccatattggtcaggctggtctcgaactccaggtcaggaagatctcaggtgatcttcccgtctcggcctcccaaagtgctgggattacaggcatgagccactgcgcctgtccattccttattcttaatcagataagagttgctggttttcacaactaattactccacctcaaaccaagatgccaccacacgcttaaagctcaaaatttctctaaatatgcatccattttattgtgtttttctactatctcaaaggaagagagatctgatttcctattttattctctcctttctcctttattgggagaaatactataactatttctttcatgtaaacttcaaatctttcccggtttccttcaaatctttcctcattgattccttcgtgtttcaacagagactgggtcatagagccctagaaattcttcctaaaactagagcagtctctaaccttatttaacttactttactactgctaccaccatgatatactgaacattgtttccattttctcatttgacacttacggttttcacccctaccatgtgattaaaaccatacatgaatcatctctttttttcatctatatccttcttccattagcaatattatgtgattctttctgaagaagtcctggtgaagtatctgaaaactacaactatttttgtgtggcccatgagctaagaatagtttctatatttcaaaaagtttttttcaagataaaaaaaaacagtattctgtgacacatgaaaattatataaaattcatatttgagtgatcataaagttcaccagcagaaggtgatgttgccgcactagataaagaaaagcctctggtggccacagcaatgaccacttcttctctactgtccaacaggtagcttgctctgcagagaaaaggcgtgaaaaaaattattctaccagttgacagaaaaaaaccagctgagaaataaaacctgattgttcacttttaaaaatcacacccccaacgtgggcccactagaatggctcccacaaagaaaaagggccgttctgccatcaacgaagtggtaacccgagaatacaccatcaacattcacaagcgcatccatggagtgggcttcaagaagcgtgcacctcgggcactcaaagagattcggaaatttgccatgaaggagatgggaactccagatgtgcgcattgacaccaggctcaacaaagctgtctgggccaaaggaataaggaatgtgccataccgaatccgtgtgcggctgtccagaaaacgtaatgaggatgaagattcaccaaataagctatatactttggttacctatgtacctgttaccactttcaaaaatctacagacagtcaatgtggatgagaactaatcgctgatcgtcagatcaaataaagttataaaattgc

SEQ ID NO: 657843 - DNA, 765 bp, Homo sapiens
  misc_feature (18)..(18): n is a, c, g, or t
  misc_feature (23)..(23): n is a, c, g, or t
  misc_feature (25)..(25): n is a, c, g, or t
  misc_feature (567)..(567): n is a, c, g, or t
gggcagtcgagagctcancggangngccttcgcgctcttcctttccaacttggacgctgcagaatggctcccgcaaagaagggtggcgagaagaaaaagggccgttctgccatcaacgaagtggtaacccgagaatacaccatcaacattcacaagcgcatccatggagtgggcttcaagaagcgtgcacctcgggcactcaaagagattcggaaatttgccatgaaggagatgggaactccagatgtgcgcattgacaccaggctcaacaaagctgtctgggccaaaggaataaggaatgtgccataccgaatccgtgtgcggctgtccagaaaacgtaatgaggatgaagattcaccaaataagctatatactttggttacctatgtacctgttaccactttcaaaaatctacagacagtcaatgtggatgagaactaatcgctgatcgtcagatcaaataaagttataaaattgcaaaaaaaaaaaatctaaaaacttataaaaaccatctacacacaaaaagccatggaacttattaacatacatcaatttaaatgcccccantgttatacatgctaactactgcacaactgctctcagatgctctgatatgcccgaatgcccctcccgtgctatcttcaccataaaaaaaaaaatttggccctcttccccctacgcttttacttccgaaattaatctacggccttggacctcttggacatcccctatagggggggttcaggggccggtttcgggctcggg

SEQ ID NO: 657844 - DNA, 129 bp, Homo sapiens
  misc_feature (123)..(123): n is a, c, g, or t
atcatcgagctcggtaccgacatccgatggtgcagccgctattaaggtcgtttgtcacgattaaagtcctacgtgatctgagttcagaccggagtatccaggtcggtttctatctacttcaanattcct

SEQ ID NO: 657845 - DNA, 1069 bp, Homo sapiens
  misc_feature (18)..(18): n is a, c, g, or t
  misc_feature (23)..(23): n is a, c, g, or t
  misc_feature (25)..(25): n is a, c, g, or t
gggcagtcgagagctcancggangngccttcgcgctcttcctttccaacttggacgctgcagaatggctcccgcaaagaagggtggcgagaagaaaaagggccgttctgccatcaacgaagtggtaacccgagaatacaccatcaacattcacaagcgcatccatggagtgggcttcaagaagcgtgcacctcgggcactcaaagagattcggaaatttgccatgaaggagatgggaactccagatgtgcgcattgacaccaggctcaacaaagctgtctgggccaaaggaataaggaatgtgccataccgaatccgtgtgcggctgtccagaaaacgtaatgaggatgaagattcaccaaataagctatatactttggttacctatgtacctgttaccactttcaaaaatctacagacagtcaatgtggatgagaactaatcgctgatcaaataacgttataaaattgcaaaactctcggagaacttgagtttcttcttcttcttcttctctcggggggagaagggggtggcccgggcaagcgcggggccccccgggggcggtgccggggccgcgggggcggcaacgcgggggccaatataagcaacgtgtgccaacctataacacacaaggggtgcccggcggcggtgtggcctttaatagcggcgcgggccctacaagagaacccccccaggggagggtgtaccggaggggtaccccgaggttttgggacgaaaccggggggtctccccaagacctagaggggccaaacacaattttacagaacgggggggacccagggggggaaaacgtattactacacgtgtggcgaacgttattttccccggggggacaccctaataagcgtctttttcaccagcgctaaaaaccaaagtggtctccacacacagtagccggccacgaggagggaatagaaggtgggtacccccaagggctttgtgggtggtgggccaaacgaaaccttcgttgtacaagcaaaactgtgcgcccacaggtatgaggagagccacagtggagtcataaattgccgcccacagaggaaacagga

SEQ ID NO: 657846 - DNA, 114 bp, Homo sapiens
tagttacacgatggagaactggcaaataccctgacaaggtaaattcgagatatctaggcattaatagacaatccatctccaacttacatgtgctgctcttacagactgaggtaa

SEQ ID NO: 657847 - DNA, 106 bp, Homo sapiens
tcgataagccaatcactttattgactccaccgcagactcctcattctaacctgaagtcggaggacaaccagtaagctacccttttaccatcattggcccttatgag

SEQ ID NO: 657848 - DNA, 223 bp, Homo sapiens
ttattacaagtggtttgaagtcgttggatctctggtaaggtaaaaatagcatttctcccaaacagtgtccagatcccgcgactaccttagaaattagggcataatttcggctacacttgtccaaatgaggcaaatttgtgccctaaatgaagctgactcaatttaaagaactatttgtaaaatagtattttcaccaattcaacgtccataacaccacacaatt

SEQ ID NO: 657849 - DNA, 488 bp, Homo sapiens
caactcatacagggacacctcatgttaccgcatttccctttatttagtttttcgcagatactgcgtttgttacaaattgaaggcttgtggcgatcctgtgtcaatgaagtccactggcaccatgtttccaatagcgtgtgctcactctgtgtctctgtgtcacattttggtagtcccataatatttcacaatgttcatcgttaccacacgttctagtgtgatctgtgatcagtgatcttcgacgctcacgctcaagtggagtatgaggccatgaaccatgcccatataagacttaattaattcttaattgatgactatagtgtgtataactgactgttccactgacctgctattcccatatctttgtccctctcctcaggcctccctatttcccacagagaaaacaatattgaaattaggccagttaataacccgccagtggcctctaagtgtttaagtgaaaggaagattcacacatctgtcacatt

SEQ ID NO: 657850 - DNA, 299 bp, Homo sapiens
cccccttttttttaaaaaaaaaatttttctttttgcggggagaccaaagatttttttttttaacaaaaggcccttttttttccaccccccctttttggggggcccttttgaaaaaattaccccccccccccccccccccatttttaaatttttgggggggggggggggaagggggggcccccccccccccccaaaattaaaagaaaaaattttttggggcccccccataaaggggggggggggggggggttttcccaaagttttttttttttttggtaaaaaaagtttttttgccccga

SEQ ID NO: 657851 - DNA, 322 bp, Homo sapiens
ctgactcagaggattcccacatagtagatgttccttttttaaaattttttattttttttggacaggatctcacttggtctcccaggctgagcgcagtggcacaatcatggctcagtccaacctcaacttcttgggttcaagcaatccttacatttcagcctcctgagtagctgggaccatatgtgcgcaccaccatgcctagctaattaaaaaaaaattttggtagggatagggtctcctatgtcgcccaggctgttctcaaatgcctggcctcaagtgatccttgcaccttggcttcccaaagtgtggggcgataacatca

SEQ ID NO: 657852 - DNA, 175 bp, Homo sapiens
agaggtcaaggttgcagtcagagtgacaccaagaccccatctcaaaaaaaaaaatttttttttctcctttatcttctttagtggtcctccgcatgaaaaggggtatgagttatagaaatagcctttaccatatttttggtggtaggagggagagctatgggtattttctcatttc

SEQ ID NO: 657853 - DNA, 458 bp, Homo sapiens
ctagaggatccctaaagacgtgtgcaatgtacttcgctaaccctcacaatcttcatttataatttcaggattatgatattgtacttatagagctttgaagaggtgagagaccgtgttgcaatgatgttcatcagggatattggcctgaagttttcctttttttattgtgtccctaccaggttttggtatcaggatgatactggcttcataaaatgagttaggcaggattctttcctcttttattgtttggaatagtttcagtagaaatggtaccagctcctctttgtacctctggtagaattcagctgtgaatctgtctggtcctgggctttttttggttagtaattactgcctcaatttcagaacttgttattgacctgttcagggatttgacttctccctggctcagtcttgggaggttgcatgtgttcaggaatttatccatttcttctagattt

SEQ ID NO: 657854 - DNA, 471 bp, Homo sapiens
  misc_feature (214)..(214): n is a, c, g, or t
ggcgaaacgctgaggcgcggccttcgctgtgtggtggggactcacaagaccgacgtcaagatgatgctttcaagggccaaacctgctgtaggcagaggcgtacagcacactgacaaaagaaagaagaaaggtaggaagattccaaaactagaggagctactttcaaaaagagatttcactggagctattacccatgtggagttcaaacgtcatngtggggaacgaagaacgaggatactaaatttgtgggacttgggacttttggtggcccttttcaacctggggtgtgattacaggaagaagcctcgtggaggaattcaggaaatagtgctagcaaagagagcgacacctggtaaattcgtgaagtcgtgggtgaacctagctggcacctacttctttctgtgggatgtataaacaagctgaagcagctggatttaaagcttcaaaaagccgactccaaaacccgctccc

SEQ ID NO: 657855 - DNA, 108 bp, Homo sapiens
  misc_feature (40)..(40): n is a, c, g, or t
  misc_feature (53)..(53): n is a, c, g, or t
  misc_feature (80)..(80): n is a, c, g, or t
agttcttcccctttggtggaaacctgtgggaaatattcgntagggaaaagaanatgagaaagaataagtgaaagactttnggtttaggatgctttaagattggggcat

SEQ ID NO: 657856 - DNA, 194 bp, Homo sapiens
ggggccccccccccccgtccccaggtaaaccaagggtttgctccggggcccatttccagtttggcccccgtttgtgaccttgggcaagtcacttgacctttgtgggccccaacttcctcctttgtaaaaaggggaaagtccctgcccctccctccctcacaggcatgttgtgaaaataaataaggtaaggggta

SEQ ID NO: 657857 - DNA, 205 bp, Homo sapiens
gtctacggctcacgaggggcagcagccatgggagagcccttgcacggagagccccccaggcgctggaggtagggtgccggcatgtcaaccataaaagggcgtgcttgttgatgggaaaactgaacacagactgggagctaaggaatctgtgcttattttgtgaaatgtgaacaggcacttgagctatgtggtggacatgtgcaaa

SEQ ID NO: 657858 - DNA, 116 bp, Homo sapiens
gctgatgctgacagccactaccaaagctgctgctgctgctgctgaagccaccgccatagcctcccccaaagccactaccaaagctgctgctgctggaggaatagcagcaggaggaa

SEQ ID NO: 657859 - DNA, 348 bp, Homo sapiens
ctatagcatgctatatcacttaacagtagagacatctaactcaaaaaatatttatacacagcagaaatttcatcaacacaaaattattcatcatatattattttttgagacagagtcttgctctgtcgcccggccttaaattaacttttatgttcagagatatatgtgcatagtttggtatacaggtaaacttgtatcatggaggtttgttgtgcagattattttgtcactcaggtattgagcctagtgcccattagttatttttccagatcctctccctgctcccatcctctactctccaataggcaccagtgagtgttgttcccctctgtgtccatgtgttatcat

SEQ ID NO: 657860 - DNA, 462 bp, Homo sapiens
gttttctagctttctgtagaatcccattggctgagaggaagggtccattcagccagctggggggcttagaattgtatttttggtttacgaaatgaatcatattgctgttattctaactttgaatcgctagatggctgatgccaagacccttattattgttctttcatgtcatagaagaagaacattaataatggttgcaattgttatgattgtaagaacaacgaggcactgtatacattcacatgggctaatgtttacttgcactacactttttttcccgttaacttctttattaggctgttcgtgtttaccacttaactctttcctcccagagcactagcaaagactgcccgttagccacttttcactcttactggctattaacatctctagaacaggaatgagcttccttgctatatagccacgagacagcataggagactaaaacctggggtagagaaa

SEQ ID NO: 657861 - DNA, 427 bp, Homo sapiens
ggccaggtgttaacagcctaccagcctccctccccgccggtgcacagtggcttccatcggtaccagttcttcgtctacctccaagaaggaagggccatttctctccttcctaaagaaaacaaaactcgagcctcttggaaaatggacatcttcctgaaccgttaccacctgaatgaaccggaagcaagcacccagttcatgacccagaactaccaagattcgcccaggttccaggctccgggcagcgacaaggccaaggacagacgcaactagagaggactgcctgcctgcctgcctgccagaccgccggggtcacctaacagccgcgagtccacgccgcccacgcccaccacctacggcctggctgtgggagcccctctgggtacggaacccttctcctcctgattaaaaacaacgaaaatcctcg

SEQ ID NO: 657862 - DNA, 365 bp, Homo sapiens
ttaatagatatgtatgaaaatttaaaaactagaaaaggttgggcatggtggtttatgcttgtgatcccaggactttaggaggccaaggtgggaggattgtttgagcccaggagttcaagaccagcttgagcaatatagtgagaccctgtctctacaaaaacaaacaaacaaacaaacaaataaataaataaataaaattagctgggaatggtgatgcacacctggagtcctagctactcagaaggctgaggcaggacgatcacttgacctcagaagtctgaggttacagtgagctatgatcataccagtgcactccagtttgggtgacagaacaagaccctgtctccaaaaattaaaaaaaaaaa

SEQ ID NO: 657863 - DNA, 193 bp, Homo sapiens
gtatggtggcaatgatggatggggatgatgaagctattgtcttcagtagaattcattcgacatatggcccattagggtcacaatagccggctaattggggggaggcctcctatcggagagtgagggtggactggaattaagggtgttagtcatgttagtttgtggcaggtgcgagatagtagtagggtcgtgg

SEQ ID NO: 657864 - DNA, 1790 bp, Homo sapiens
aaattgatggtaatgaaggagggttgtgccatgaaaatacaagagatttcctattgtaaccttgttgcactgtggattaaattgaagatgcacagtggactcctgggggtggaggagagtttggaggtcagagggctcttgtcttgagctccaagtggtgctctaagtctaggataaagattttacacagggtggggcaggtggacagccagatcttcatttattcttaccaagctcttattaagtcatgtgggtgggatttactgttaaggaaggcagagcctacctgtccccatagggctggcatcctattggaggtggcactagccacttaactagttaagtgagtgatatttgggtagggtgcccataactctgatacgatctgccttgcgattctgctcctgctagtggagtgtgggggaggcctggtcttggatcttgttcctcacagctggttcattcaggaggttagtgctctgctgaggaggctggaggcagagctccatcttggcctggctggctagtttctgttcaggactagagctagcacctgtagtcttggcaagccattttagaaatctaagttgttggtccatgtaatgtcctggtggttgaaccaacactcgttctttgccattcctgggcaggtgcttggagaaggctggtgagctgttcatgttttttgaagaatggtgcatcagtagcacaaggttttccctggttctgctgaggcctgttgctgagctttggggtgccctgtcccctgttttattcctgttttatttctcccacattgttagctgctcagagcaaatgggttttgctgcaggtgtaggtttgcctctggctgatcctgggcagtatggcatctggatgggagggtctgagggagccttagcccagagttaaggggtgccccccaacccctgcctggagtcatcctacatggagctaataggggcgagtctgggaaaagttgcatttgtttcctgctttaagactttagcttttggcccgacctcaggtgatccacccgcctcggcctcccaaagtgctgggattacaggcgtgagccaccgcgcccagccttccttttaactctttgtacctgttttttttccttgttaggatgaaatggtaacaactagctcataaggctgttgggaagataaatgagatagtgaatgtagtgtgcttaggaccttgccaggtgcatagtgagtgcttgacaaacattgaccatccttttacagtagtcacctctgcagtgaatcagaaatttccaaccctgcacacttagggtgtctggggactgataatgctaactttagttctttgctcctgatttcacctatctgtgacattctttgtcttgatacaagtgtctgtagtactacattcacttgcttaatggtttaggggcagccacagccagtggaatgctttccagaggtagctgggcaacttgggagagagaaggaggaggatgaggccaggcatggtgactcatgcctgtaatcccagcactttgggatgctgaaatgggaggatcacttgaggctaggactttgagaccagcctgggcaacatagtgagaccttgtctctacaaaaataaaaataaatttaaaaattagccaggcatggtggtgtaggcctgtagtcccaactactcgggaggctgaggtaggaggattgtttgagcccaggaattcgaggctacagtgagctataattgtgccactgccctactactgcagcctgggtgacagagcaagaccctgtctc

SEQ ID NO: 657865 - DNA, 443 bp, Homo sapiens
cccacctgttcccaaacacaaaataaaaataaaaaatataaacaactgcttaacatgaacgaaaagcatattagtgctgacaaatgtttaaccgattggtcaggagctggtatcaattctgactatttgttggtaaatagaaccagatatttatacatcaataattgatcataataaaaattaagaaattttccacgaacaatcttagaaacaagatagctatgaaacctttggctttatatggcctttctcctatgggagaaaaaaaaccaagagggataggctcccttttctcagagctattttgccacacaatagcttacataaaataacattccatttggatgtatgtttttgaggataagaagtttgtgtgccaatacgtcactcttccaaataaaaatataaagtttaacaatgcaattggctgctaacaagcatta

SEQ ID NO: 657866 - DNA, 262 bp, Homo sapiens
tcagctacttgggacctgaggttgagaatccattgaacctgggaggcagaggttgtggtgagccgagatcacaccattgcactccaacctgggcaacgagagcaaaactgtctcaaaaaacaaacaaacaaacaaacaaaaaatccccactccaataaaggagaaaacaacagctaattccatcacctgtaacatcctggctaaccagaagtcctcctcagtctttccacgtgacaacttcactgctagaacaaccagcatt

SEQ ID NO: 657867 - DNA, 739 bp, Homo sapiens
tggaaacacagtttcactcgtggcccaggcgggagtgcaggggcgcaatctcggctcacgggaatcttcggcctcctaggttcaagcagtttctccgtgcctcagcctcccaagttagttggggattacgggcagtgcaccacgcagtgccgtggattaatttttctcttattttatagtagaaaaacgaggatttcatcagtgttgggccagtgcgggttctcaaactccgtgaccactgtgtgtggctcacacccacctgtgggccctcaatatagtggtgcatttggggcataatattatacgtggtatttctcaaccattcttgggtgagtttgtgaaaaaccgtgaagggccaaaaggcttctcctgttatattctcttcaccattgtggggccgagccaacctataagtgtggggttgtgtggtcaaaatgtgacagcacactcgtgggtgcgtgggggtatcttctctcttcgagggccttgtggacgggaccaactttcctttcctctccgcacagtgttcggcctctccctctcttccatatagaactggtggggtctcctaaaagaggggcttgtgggggcccggggtctggaggttctctagggtctgggcctataccctgccacatggggtactttaggggtaggctaccatcctcttctaaacgtgggacccctctttcttggggaccttttcctaccaaaaagattttcaagataataagataag

SEQ ID NO: 657868 - DNA, 638 bp, Homo sapiens
ttctgaggatcccctataatgttggtcattgatagctaaaaaatttaaaaaaggattactaatgaagttttgccagagattagaaaaactggttcttataatcctgcaacatagctgaactttgaagatccagtataagccgctattgcttgggcgtctgaatacaaagcgaaacggattgcacaagaacaattagccattgcagcgccaaaagccgaagcgttagattgaatagcagactgtgaaaataatctaggcatacgtgaatctgggagggtcctaaagattaatcaaaaaactttagtgcagtatcttatggatcataaggttgtgtatcgtgatcaattcaagaagatacaaggctatcaaaagtcagttgatcaaaagttgattcaagtaactgtaagtggtccgcgagaaaccgagaatggagaaaaggttttctcacaagtgaaactaaccccaaaattaattactcgaattgccacatggattgaaaacggcatgccgacaaaagccattaagaaataaaacagagggctaatgccctctattcttttaatgatgttttctgcatagtatggtagaactatttagcatttaaaatcatcttatatcatatatccatagttcttgat

SEQ ID NO: 657869 - DNA, 116 bp, Homo sapiens
  misc_feature (3)..(3): n is a, c, g, or t
agnagcgaaaataatgcataccgagaaaagcatacacagagcaataaaaaaatcacgacaccaaaaacgacataacccaacagaacgaacagaagaaaaaaagacaaaatcacaaa

SEQ ID NO: 657870 - DNA, 1097 bp, Homo sapiens
  misc_feature (18)..(18): n is a, c, g, or t
  misc_feature (23)..(23): n is a, c, g, or t
  misc_feature (25)..(25): n is a, c, g, or t
gggcagtcgagagctcancggangngccttcgcgctcttcctttccaacttggacgctgcagaatggctcccgcaaagaagggtggcgagaagaaaaagggccgttctgccatcaacgaagtggtaacccgagaatacaccatcaacattcacaagcgcatccatggagtgggcttcaagaagcgtgcacctcgggcactcaaagagattcggaaatttgccatgaaggagatgggaactccagatgtgcgcattgacaccaggctcaacaaagctgtctgggccaaaggaataaggaatgtgccataccgaatccgtgtgcggctgtccagaaaacgtaatgaggatgaagattcaccaaataagctatatactttggttacctatgtacctgttaccactttcaaaaatctacagacagtcaatgtggatgagaactaatcgctgatcgtcagatcaaataaagttataaaattgcaaataacgttataaaattgcaaaactctcggagaacttgagtttcttcttcttcttcttctctcggggggagaagggggtggcccgggcaagcgcggggccccccgggggcggtgccggggccgcgggggcggcaacgcgggggccaatataagcaacgtgtgccaacctataacacacaaggggtgcccggcggcggtgtggcctttaatagcggcgcgggccctacaagagaacccccccaggggagggtgtaccggaggggtaccccgaggttttgggacgaaaccggggggtctccccaagacctagaggggccaaacacaattttacagaacgggggggacccagggggggaaaacgtattactacacgtgtggcgaacgttattttccccggggggacaccctaataagcgtctttttcaccagcgctaaaaaccaaagtggtctccacacacagtagccggccacgaggagggaatagaaggtgggtacccccaagggctttgtgggtggtgggccaaacgaaaccttcgttgtacaagcaaaactgtgcgcccacaggtatgaggagagccacagtggagtcataaattgccgcccacagaggaaacagga

SEQ ID NO: 657871 - DNA, 242 bp, Homo sapiens
ccagagaaaactgtgatacgtggctggattttagacagtcgtctagtacccactctcattagatgcctaggtctgctagcaagcccctccttccaggtctccctcacttcctatgtgaacattgcctgctctttccttgcttctaagattttctgattttttttaaggtttctttctttcttttcttttcttttcttttttttttttggaaacaaagttctcttctcggttggcccaggtgt

SEQ ID NO: 657872 - DNA, 213 bp, Homo sapiens
ccaacacaggcatgcacataaggaaggttaaaaaagtaaaaggaactcggcaaatcttaccccgcctgtttaccaaaaacatcacctctagcatcaccagtatttagagggcaccgcctgccccagtgaacacaagttttaacgggccgcggtaccctaaaccgtgcaaaggtagcataatcacttgtttccttaattaggggactcttaaaa

SEQ ID NO: 657873 - DNA, 535 bp, Homo sapiens
  misc_feature (18)..(18): n is a, c, g, or t
  misc_feature (23)..(23): n is a, c, g, or t
  misc_feature (25)..(25): n is a, c, g, or t
  misc_feature (479)..(479): n is a, c, g, or t
gggcagtcgagagctcancggangngccttcgcgctcttcctttccaacttggacgctgcagaatggctcccgcaaagaagggtggcgagaagaaaaagggccgttctgccatcaacgaagtggtaacccgagaatacaccatcaacattcacaagcgcatccatggagtgggcttcaagaagcgtgcacctcgggcactcaaagagattcggaaatttgccatgaaggagatgggaactccagatgtgcgcattgacaccaggctcaacaaagctgtctgggccaaaggaataaggaatgtgccataccgaatccgtgtgcggctgtccagaaaacgtaatgaggatgaagattcaccaaataagctatatactttggttacctatgtacctgttaccactttcaaaaatctacagacagtcaatgtggatgagaactaatcgctgatcgtcagatcaaataaagttataaaattgcnaaaaaaaacaattgaagcaccaattcctttaaggaattcaagcacaagacatcttg

SEQ ID NO: 657874 - DNA, 846 bp, Homo sapiens
  misc_feature (18)..(18): n is a, c, g, or t
  misc_feature (23)..(23): n is a, c, g, or t
  misc_feature (25)..(25): n is a, c, g, or t
  misc_feature (500)..(500): n is a, c, g, or t
gggcagtcgagagctcancggangngccttcgcgctcttcctttccaacttggacgctgcagaatggctcccgcaaagaagggtggcgagaagaaaaagggccgttctgccatcaacgaagtggtaacccgagaatacaccatcaacattcacaagcgcatccatggagtgggcttcaagaagcgtgcacctcgggcactcaaagagattcggaaatttgccatgaaggagatgggaactccagatgtgcgcattgacaccaggctcaacaaagctgtctgggccaaaggaataaggaatgtgccataccgaatccgtgtgcggctgtccagaaaacgtaatgaggatgaagattcaccaaataagctatatactttggttacctatgtacctgttaccactttcaaaaatctacagacagtcaatgtggatgagaactaatcgctgatcgtcagatcaaataaagttataaaattgcaaaaaaaaaaaaaaaaaaaaanaaaaaaaaaaaaaaaaaaaaaaaaaaaaaaaaaaaaaaaaaaaaaaaaaaaaaaaaaaaaaaaaaaaaaaaaaaaaaaaaaaaaaaaaaaaaaaaaaaaaaaaaaaaaaatagaaacaaaaaaaccaaaaaaaagtcctataattaaaaactgggcgaactttaaaaaactacgagattccaaaaaaaatggcgtaacccaccttaatcactttggagaaaaccccccttttgccaaatgacagaaatactgaaaaagcccgaacttttggcacttccaaacataatggaaaccccaatgcctaaggaaaatccaaagcgttagttttttgtaataccggtttttt

SEQ ID NO: 657875 - DNA, 699 bp, Homo sapiens
  misc_feature (25)..(25): n is a, c, g, or t
  misc_feature (31)..(31): n is a, c, g, or t
  misc_feature (46)..(46): n is a, c, g, or t
  misc_feature (50)..(50): n is a, c, g, or t
  misc_feature (463)..(463): n is a, c, g, or t
  misc_feature (499)..(499): n is a, c, g, or t
  misc_feature (501)..(501): n is a, c, g, or t
  misc_feature (506)..(506): n is a, c, g, or t
  misc_feature (513)..(513): n is a, c, g, or t
  misc_feature (516)..(517): n is a, c, g, or t
  misc_feature (527)..(527): n is a, c, g, or t
  misc_feature (529)..(529): n is a, c, g, or t
  misc_feature (535)..(535): n is a, c, g, or t
  misc_feature (537)..(537): n is a, c, g, or t
  misc_feature (539)..(539): n is a, c, g, or t
  misc_feature (542)..(542): n is a, c, g, or t
  misc_feature (544)..(544): n is a, c, g, or t
  misc_feature (562)..(562): n is a, c, g, or t
  misc_feature (565)..(565): n is a, c, g, or t
  misc_feature (570)..(570): n is a, c, g, or t
  misc_feature (574)..(574): n is a, c, g, or t
  misc_feature (581)..(581): n is a, c, g, or t
  misc_feature (585)..(585): n is a, c, g, or t
  misc_feature (589)..(589): n is a, c, g, or t
  misc_feature (591)..(591): n is a, c, g, or t
  misc_feature (594)..(595): n is a, c, g, or t
  misc_feature (606)..(606): n is a, c, g, or t
  misc_feature (609)..(609): n is a, c, g, or t
  misc_feature (613)..(613): n is a, c, g, or t
  misc_feature (621)..(621): n is a, c, g, or t
ggggctttccaactgggacgctgcnaatggntcccgcaaagaaggntggngagaagaaaaagggccgttctgccatcaacgaagtggtaacccgagaatacaccatcaacattcacaagcgcatccatggagtgggcttcaagaagcgtgcacctcgggcactcaaagagattcggaaatttgccatgaaggagatgggaactccagatgtgcgcattgacaccaggctcaacaaagctgtctgggccaaaggaataaggaatgtgccataccgaatccgtgtgcggctgtccagaaaacgtaatgaggatgaagattcaccaaataagctatatactttggttacctatgtacctgttaccactttcaaaaatctacagacagtcaatgtggatgagaactaatcgctgatcgtcagatcaaataaagttataaaattgcaaaaaaaaaaaaaaaaaaaaanaaaaaaaaaaaaaaaaaaaaaaaaaaaaaccttgtngnccgcntgggccnagnngattttagantngggcangntnatncntgcggccgaatttcgggntanttggnccanttggccntatngggngnggnnttacaattaantgnccgnggttttanacgggggggtttggaaaaacctgggcgttaccacatttaaacgccttgagaaaaatcccccttttggcaggtgggggt

SEQ ID NO: 657876 - DNA, 253 bp, Homo sapiens
  misc_feature (55)..(55): n is a, c, g, or t
aaccgaaaaagggccctttttttttttaagggaaaaaggccctttgtgcaaatcncccgttaaaggaaaaattttttttttttggcccattttttttttccccaaaaaaccccagggttttttcccttttttttccatttaaaaaaagtttttttatttttttttttttaaaccttttttttttaaaaagaccttttaaatttaatttgggtttaaaaaaaagggccttttcccttttttttcctttttttta

SEQ ID NO: 657877 - DNA, 879 bp, Homo sapiens
tcttaaaaaaaaaaaaaaattactaaggacctgtattagtcggttctcactctgctataaagaattgcccgaagctgggcgtggtggtcacgcgtgtaattcccagcacttgggaaggctgaggcgggcagatcacagggttcaggagtttcaagaaccagccgtggccaacattggtgaaacccccaatcggttaccaaaaaaaaaaaacaagacacaaaaagaaaaaaattttttcggggccgcatcggccctcacagaaaaaggttttcttaaaaacccatcgtgttttggggcgccgggcgccccggttggtgttatgtctacaaaccgtgtggccaagcagcgtggtcccaaaaggagaaccccggcgaccaaagaacactatcgaggtggtggtggtcctcccccccaaaataaaaaaaaacgcccgcggcggggaacaccacaggacggcttcggagccacaaccccaacaagcaggagggatccagaaagggccaatagaggggagcccctccacacacagcggtctaccaacggagcgcgacaagattatcaaattaaccccgcgacaggagtggagagaacagcaagacaaacacgataaaaagaacacaggacgaaaaacgaaggacaccacagagcaacggcaaaaggcaagaggggcgaggtcagcttcaaaacagaaaaaacataaaggacgcgtccaacacgagagatgacaactgccaaagaagagacgtaagcgcacacacgaccaacaaaaacaacgtagacacaacacaataacaagcaagagaggcatgacaaagacaaacgaaaaagacgcaacaactagaaactaagataaaacaaagaccataagactaccgagag

SEQ ID NO: 657878 - DNA, 981 bp, Homo sapiens
  misc_feature (490)..(490): n is a, c, g, or t
aactcaacaaactgctctcgctctgtctttacccattctggctcatcagtattcccatcatggctgtacatgtcaccaatatactcttctagatcaatgaaaccatcaacattcacaagcgcatccatggagtgggcttcaagaagcgtgcacctcgggcactcaaagagattcggaaatttgccatgaaggagatgggaactccagatgtgcgcattgacaccaggctcaacaaagctgtctgggccaaaggaataaggaatgtgccataccgaatccgtgtgcggctgtccagaaaacgtaatgaggatgaagattcaccaaataagctatatactttggttacctatgtacctgttaccactttcaaaaatctacagacagtcaatgtggatgagaactaatcgctgatcgtcagatcaaataaagttataaaattgcaaaaaaaaaaaaaaaaaaaaaaaaaaaaaaaaaaaaaaaaaaaaaaaanaaaaaaaaaaaaaaaaaaaaaaaaaaaaaacaaaaaaaaaaagaaaaaaaaaagaggaggggaacaaaaaaagaaagcgagaggaggaaagaaagaaaaaagagaagaagaagataacaaaacaaaaagagagaacacaaaaaaagacgagaaaacaaacaaaaaagcagagagggaaggagagaacagaaaaaaacagaaagaaagagagagaagaagacaacaaagagcaagaggagacatcaaagaacagaagaacaaacaaaagaggggaaaaaacagaaaagaacaagaaaaaacacaagaggagaatagcaaaaagaagacgagcaacgaaacgaacaaaagaaaaaatagaaaagaaaaaaaacgaggacaaacaaacacaaccaagagacagcacaagagaaaaagaaacaagcggaacggacgacaagaagaagaagaaaggaaaaaaaagagaagcaaagaaaaagggaagaaaagggaac

SEQ ID NO: 657879 - DNA, 538 bp, Homo sapiens
cgagcggccgcccgggcaggtgcagaatggctcccgcaaagaagggtggcgagaagaaaaagggccgttctgccatcaacgaagtggtaacccgagaatacaccatcaacattcacaagcgcatccatggagtgggcttcaagaagcgtgcacctcgggcactcaaagagattcggaaatttgccatgaaggagaaaaagtgctgcctttttattcatcagtattgactcctaaggagcaggaggggattcagaagaataatctagaagagcttactgaggagctcaccaaggtgatggtggactacataggaatggagaatttctggaaaaggtacaacaaagtgaaactggagcaactgagcctccaacatagacgagcccagctgctagatatcaatgggaagctgcgggagatgtctgaagcagtacttggatggcatctcagtgagtgacgaagtgctgagccagctcaacccactctttatagtcaactatcaaagcaacttactccagcgtgctgataaacaaggatccgc

SEQ ID NO: 657880 - DNA, 380 bp, Homo sapiens
tttgaaaggtttattctattaaaattttgccaaatcctctggttttctgaaaaagctttagaatgggttctataccccttggatccctgcatttttccatatcatctccggttcggtcgcgtccagatggaaaacggaaacaaaggcttttaattgttgccttttctggctccagtgcaacccatccctctgaaaaccctcggaagtttggtgcttggagagggggcccttgtcttttggacataaggtcatgacgggtttatgtccaaagtttttatatattttttttataagctgaaaaaaggtctatttttatgtttttaggtctatgaatggaacgttgtaaatgcttgtccaaccataaaaataacgaaaagtga

SEQ ID NO: 657881 - DNA, 417 bp, Homo sapiens
ggaggagcacttgagcctggagaggttgaggttgcagtaggctatgatagtgcccctgcactttagcctgggcaacagagtcagactctatctcaaaaaaaaaaaaaaaaaaaaaaaaaaagaacggtttactgccctttataatcagaggatagaatttggggcaaaaatacctactggaaagtagaaatcccagacagagaaggagaaaggagtagcccaaattctgtatataattgtctaaatatctggctggcttctggaccatgtatatattcgtaggtcagactccaagcagctcagctaaggctaaataagctgaacgaagatttgagctgcaatgggtgtaggggtaggagattttgcatttgactccagcctgggtgatagagtgagactgtctccaaaaaaaaaaag

SEQ ID NO: 657882 - DNA, 864 bp, Homo sapiens
atggaatcctttgcacgctacagctgacttcagggcagcagattgttaccgagctacaaagaagatgacgacatgcttccatcttcctacctgtgttggtaacaaactccagattttagaagactacaaagacaggcttctctgctacgaagaggcaaccaacacagagctgcagcagctggaactgcttacactacgctggcacaacagtctgctacacaacacgcagctaactgttgacaaggtacttctctttgactttaactgcagcagaaattcgacgcgagacacagatggcaagacagcacaacgaaacagacatggaaacaaccagaagaggaaacacgttctagccaacgagaatcacgacgaaacgatgctgcatatttataactcaacagcccaaactccactttccttcatcccttggaccgactactcaatacaactactacacttttatcaagacacttgcccaactggcacaggcatctaacttgcacctggaacatttacgttctaacaatctcttggccaacacctcggatcggttcattattcaccctacatccacgcgcactgcacaattggcgaccaactgccacatgaaacaggttccaaacctttttaacacttctcaaacaaagcgaactattctaatcaatgggcctctccaacccacaaggaaaaggtccaaagcagcgttccacatacctttcaacttctccaattacactttggcccctttaaccacatttctaattcaatgcggatccccgtgaagcactagcttacgccgatggctcaacgccctagggtgcttcaacctaagggggtccagtgcccctaaacctttggaacacc

SEQ ID NO: 657883 - DNA, 148 bp, Homo sapiens
cagcaacagctgctgatcgacccttacgctaagcaactggtgggcgaacgtcaatagtggtcctgcagcgctgtttggctacatcatcggccacccggagcgatgaccctctagttatcgatgaagcgcgactagtgcgcccgttcgt

SEQ ID NO: 657884 - DNA, 661 bp, Homo sapiens
aaaagaaaagaaatgatcaggaaaagataaaacaaagaacaagcggaaaagaataaagtaaaatgggcattagacacgtgataaagcagataggcatatcccactaaatgtatagatacatatacagaaatatacataaagacagatagatagcatacagagaattagagagacatatagatatagagagagatacagagatatatatatagatatatagatgaggtcagaaagacagtaagaaaataggatggaagaggaagtagaaagtagacggtagaacatgaggaacagcagcctagaaaaatcacaggtacaaaagagatcaaagaagaaagatcgtaagaatatggaagataccaaatcaggacaaggtagaggtacacagtcaatgcgaaagtcagaggatagaagtaagtatagacatagacagacaaagaaaagggaagaagtagatggagatgtagtagagaaagagagagagaagatagagtacgagagaacaaaacgagattaaacagatacaaacgcactctctctctagactcgcactctcactagctatctctatctctatctctatctctctctctctctctctctctctctctctctctctctctctctctctctctatctctctctctctctctctctctct

SEQ ID NO: 657885 - DNA, 256 bp, Homo sapiens
cgggggggggggggggggggggcccccccaaaagggtccccctcccccgggggttttaaattggacccccccccgggggttggtccccggggggggaacaatccggggagcgtccccccccccagagggattttcccccccgggtttgggggggccccccggggttttttttggggcctccccgggtttttgggccccccccccgggccccggccaaacccccccccggaaaaggcccaaaaatttgggggggtta

SEQ ID NO: 657886 - DNA, 874 bp, Homo sapiens
  misc_feature (707)..(707): n is a, c, g, or t
tgagttgtgaaaacctccgttgggcgcgctgtgcggccggaaaccccccgggtacacaggggcaatcaacacatggggggcccaccgcacagtggggaaaagccagacacaaggccaagagggcgagacaaatggtcccctgcgccggactctaagtcttggtggtaaaacgcgcgcccaagtgtgtcggcggcccacgcgaccctcagggcgggtgggccatgtaaacgcggcgggctaagcagccagatatgggccccaacgccttggggatgccacgccagacgccgcacagaccttgttcaagagggggtgcaaaacggttgcgtcaaaagcagtttcggagggcccttcttcttgacccaggaacagatgtgtcttcacatgataggtgtaacaagttgtcgtagagtccctccagagatctgttgtctagcgctgacccctgctaacaagtgtggatgcctgttgggtttatcacaaaatccgccgaattgtgtgcgatagaatctcgcccacccctcttatctttaataagggcggccaacaaattcgagccacactttactggtatataagaggtggtgaccgaagtgtattaaccacaacaagatggcgttgtaacagaatcgtgtccaccgcagtttggtttccgctccacgcggtgccgccagttaaaggcgaagcagtgcggatgttgagcgggncaccatctttcttacagagcacaaatgcgtgttataaacgcttccagaacagaggtaatatcttcagctagtgctcaggcatgcagactaaaatcttttttcagaacaccggccacaagttcttaagctcttagaattcacataagaaaaatttttaccccaaaaca

SEQ ID NO: 657887 - DNA, 203 bp, Homo sapiens
cctctctcctccccccccccttcaagtatggactaggttagagaggaatttgtgtaaagacaggtaggactgggaactgggaatgccctgcacagccttcccatctgaagacagtcctatggattctgtgtgtctcctcctgctgaaatgatggatggataaaccttcatgagtgaagagattacagtggtagttaggcttcc

SEQ ID NO: 657888 - DNA, 733 bp, Homo sapiens
  misc_feature (11)..(11): n is a, c, g, or t
  misc_feature (43)..(43): n is a, c, g, or t
  misc_feature (70)..(70): n is a, c, g, or t
  misc_feature (94)..(94): n is a, c, g, or t
  misc_feature (158)..(158): n is a, c, g, or t
  misc_feature (161)..(161): n is a, c, g, or t
  misc_feature (164)..(164): n is a, c, g, or t
  misc_feature (166)..(166): n is a, c, g, or t
  misc_feature (170)..(170): n is a, c, g, or t
  misc_feature (186)..(186): n is a, c, g, or t
  misc_feature (273)..(273): n is a, c, g, or t
  misc_feature (278)..(278): n is a, c, g, or t
  misc_feature (285)..(285): n is a, c, g, or t
  misc_feature (376)..(376): n is a, c, g, or t
  misc_feature (403)..(403): n is a, c, g, or t
  misc_feature (534)..(534): n is a, c, g, or t
  misc_feature (546)..(546): n is a, c, g, or t
  misc_feature (570)..(570): n is a, c, g, or t
  misc_feature (594)..(595): n is a, c, g, or t
  misc_feature (628)..(628): n is a, c, g, or t
  misc_feature (639)..(639): n is a, c, g, or t
  misc_feature (646)..(646): n is a, c, g, or t
  misc_feature (660)..(660): n is a, c, g, or t
  misc_feature (663)..(663): n is a, c, g, or t
  misc_feature (671)..(671): n is a, c, g, or t
  misc_feature (720)..(720): n is a, c, g, or t
gcgctggcaanatggcgggagtgggtgcgcccggtgagggggntccagggccttgtgtggcgtgctggtnttcctctggcagttctgcattctntcgggcggtgataagtactgaaatcccagggttatgtgatgaagtgtcggagtaatggtttgtntancangnttcntgaagactgtatagantgtgacaacaaatttctcgctgtagctatgggaagcctgtcacttttgactgtgcagtgaaaccatctgttacttgtgttgataaanaattnaaatacnaaaagaacttcatcattaacatgacttggagattttgctggtagcttcctgaaacagattatgagtgtaccaactccaccagctgcatganggtgtcctgtcctcggtaggcgctacnctgccaactgcaaggtgcgggatcacgttcattgcttgggtaagcgtactttttccaaaatgctatattgcaattggactggagtgctataagtggtctacggctctgagctctaagcatcaccctcggtnggtttggagcanatcgtttctacctggggcagtggngggaaggtctcggcaagctcttcnncttcggtggcctgggaatatggacgctgatagncgtcctgctcnttggagntggctatgttggancancagatggntctttgtacatttagctgtggtgtgtgcttcaaaaaggagcagggcttngaaaaagcccttt

SEQ ID NO: 657889 - DNA, 110 bp, Homo sapiens
ctttgggtttggttttttggttttgggtttaattttgtttttttccaattttttccttttgaacctgggaagttctttcgggccgaaaaataaagccccctttggcccca

SEQ ID NO: 657890 - DNA, 145 bp, Homo sapiens
ggaccccctatcacctggtggtgctggtcgacatcctcatgggacctgggcgcttttggcccgcaactgttcgccgagaaagcaggctagacgtcgccaagtcggtcacctaaggcctgggctacatgcactgcctgcctcaacc

SEQ ID NO: 657891 - DNA, 110 bp, Homo sapiens
gccgcaagtaaagcttagccgatgcccccctgctgccgccactgctgtgcctccccgccacctgtgtgtcttttgatacatttatcttctgttttactcaaataaagttc

SEQ ID NO: 657892 - DNA, 167 bp, Homo sapiens
  misc_feature (65)..(65): n is a, c, g, or t
cttatgattaactaagcaaatctttcatagaaagatattatcaaagctgaagaaatgcaaacttnaacaaagtgccgtgagattccggaaaaacccttaaccgattgaatggttttttaagaataaaaaagaagtctgatactgaactacaagtcgcaaggaacatc

SEQ ID NO: 657893 - DNA, 337 bp, Homo sapiens
gccggcgacaagatggcagcagcgtgtcggagcgtgaagggccttgtggcggtatacccgagagccttgccttggccttgccacggcggacgaactttttgggcagggagcctcttctgttcttcttgacctctcccaactcggggtgggggaggcccaagccaagaagttaggacacaacttcgttttcgccccaccaacgtgacctctcagaagggtgtacaaacagctctcgctctagcaaaaggaaagtttgggccctttggatttagctttcaactgtacaggaatcgggggggctagcaagacgtacaacttaagggggggccaaccccta

SEQ ID NO: 657894 - DNA, 275 bp, Homo sapiens
cgaggtagtggagatactgatagtgtattgctgatgagcgactggaatatgctgatgcagtgaagcgctttgtagacaagagatcaagtcccggcgttgttatgtagaaaagaacgttaattgtttaaattatagtttaaattttcttttgaaaatgaaccctaggtagataaaggaatctccttggcttctaactgcttttggtggtggagacaccacctgatgtcacccacggacacgttttcatccacctgtgaccagggagcttcagggag

SEQ ID NO: 657895 - DNA, 320 bp, Homo sapiens
  misc_feature (18)..(18): n is a, c, g, or t
  misc_feature (278)..(278): n is a, c, g, or t
  misc_feature (295)..(295): n is a, c, g, or t
gagtgactctccaggatntctttgcgatggaatatgacccagcaattcagacgcttagcatgacgccatcaacgggcatgatccgcatgcttatttgaaggacgtgctcacgcgcctgccgtcgcagcgggcgagtgggattgaagcggctgggtcctacgcaattttgattactaccttaccaaaggcgcctctggccaaatgttcgtacgcttcgcgtgcttgatcaaatggatacacgtggtcgattaccgggcgaatcttgtgctcgttcattncggtcaattccatcgcnaagagatcctgtagatcgacccgct

SEQ ID NO: 657896 - DNA, 495 bp, Homo sapiens
ccacctcagtctccggggtagctgggactacaggcacaggccactacgccgggctaattttggtattttggtagagatgaggtttggccatgttgcccaggcgggtctgaaactccggacctcaagtgacccacctgtctcggccttccaaagggcggggattacaggcgtgagccaccacgccgggcccaaaacgggattttttggatcttcctctccaaaaccggccttaccacggtgttccttaaacaacagaaagacaacaccggtggccatacagtacttaaactagaaacttaggaatcatccttacctctgcctcccgggttcaggtgattctccggtctcagcctcctgagaggctgagttgatgttccccttccggtgtctatctggtattacaggcgtgtgctaccatgccctggtaatttctgtatttttagtagaaacagggttcaccatgttgccagggtggtctcaaattctgactcaagt

SEQ ID NO: 657897 - DNA, 339 bp, Homo sapiens
gtaatacaaacattctcgaagtaccagtggctgaaccatcatcttccccatgtcatctgaacaggacccgatacgatgtcacttggtcccaactggatcctttacttccaccaccaaatttccatcatagacagaggcctccagaactattcgttgatttcccggccatctggtagtttatactttcgggaaaagcttcttgagaaaacccgcacctcatccattctggtccctttggtgctttatcagtagccagctttcgaaggtttaatgatgatgcttcaggggggactggccaacgccacaaggttctaaagggggattccttctcggggggcg

SEQ ID NO: 657898 - DNA, 356 bp, Homo sapiens
cgaagattcaatagcttggaaccttagccatgagatagcaatacaagcttgccagtttttgccccaacagataatccaatgaaggctgtgaaccaaaattttggctaaagcagtctccatggcagtttgatttttaaaggccaaacctcccacgacttcaaagcagggtgtcacatgttaaccagggcccctgcttagagctgcagcacaaaagcctggatacatgcaactctattccactttccaattcaacagtaaacttcagattccaaacaatgttggggccaaacagcattgcaactgcggagagaaaattctaaggagggttagacctcagaacctttgacaagagcatc

SEQ ID NO: 657899 - DNA, 167 bp, Homo sapiens
tatacggagatttaaagaagccaatgtagaggtagaatgtatgttattttattattattttttgagatggagtttcgttcttgctcgcccaggctggagtgcaatggtgcaatcttggctcactgcaacctctgcctcccaggttcaagaacgaaactccatctcaa

SEQ ID NO: 657900 - DNA, 232 bp, Homo sapiens
tatgctcagttcttgcttaaaccatgcagtggccacccttgggctcagacactctctgggtcttttgaccatcaatgccagcccctcgctctctgtctgcttgtatatatcttctctgccccaggactgctgggtggcttcctccaacgtcttccaaggctcacaagaaatttggctccatcttgcagcctgtgtactagacacaggtctcaagtatgggtatggtgtgagc

SEQ ID NO: 657901 - DNA, 136 bp, Homo sapiens
tcagaggatcccagagacacaggtgaggatgcagggatttgggagcagtggaagagggtgccaaccttgggttgggaccaacccttggtcgcagtcaactctgcttcccgcattcctgctccacgtgtcccagctt

SEQ ID NO: 657902 - DNA, 230 bp, Homo sapiens
tgagagtcaagctgaccatggcatccctgggtgcacggcgacagcatgggcctcacctcctctgtgatttctttctttgcaccagagacatacagtctccaacatgtttctgtattggtatagtttgattcagcaaacaatctcccagtagacaacatcgacaatagttttttacttactacttaggtagctctgaggaatagggagagggggtaggatagtacaggggg

SEQ ID NO: 657903 - DNA, 874 bp, Homo sapiens
cctacgcattataatctttttatcgatgtttcatctttatagaaagaggttccttttagggtacaacctataggtcaagtgatttacgcaatatatctagcgtcgaatgttcccccgggaagaaggttacaaaggggaaaggtaccggaacgacgagccttaaaacgcatttaagttttcgaaagataattcaaggtagggacgccttcaaaaccccgccagggggtttttaagaaccttggacctttacagacacgtatgtcgccccggggtagtacttaagcccttttttggcaaaagccgttctgttgccccaactggtttacatcctagtaaatggctaatttaagcccaattgttagggttccacgtgggttcttaaagaattcatggttacgcagatgtcttataccttgaaactacctcaacttttctaattacagcaacgtacactagaaacctttctctgaatttgcgatatcgaagtattaccaggtgcactcatagaccctgtaggaggtattgtatttgtagcacacctatgcctagacctcaggaataagaatactactctcataaatgggtgggagtattttggtgacaacatacttcttgcttaggcttgagtgaaggaattgatattcatatattcatttacttccatggacatttatgttagtgctttttatataccaggcatgatcgctgagtgacactcccttgtgtatatttccaaatttttgtatagtcgctgcacataatttgacatcatatattaagactttcccaagatgaggtcctggtttttcatggcaaatgatcaggtaaggatttcacatctgttgtaactattaccatctagtatatgtagaca

SEQ ID NO: 657904 - DNA, 135 bp, Homo sapiens
cctttcctctctcctcatttccacattaggaggaaaaagagtgattttcctttcctcctcccagtaacatttctgactgaagtgttggtctaagactgcgaacaactcaactccgtgtccaaccagggggtgttg

SEQ ID NO: 657905 - DNA, 305 bp, Homo sapiens
acagctcctgatcaagtttcaagcccataggtgcagacagaaagcaaaaaacggatagggaaaaaatggagaaacgaacacctcatgaaaaggagaaatatcagccttcctatgagacaaccatactcacagaggtgttctccatgagcccgtagatcacagtatgtcaagtaactcccacatcaccgtggcttcaacgagttcccattacgcagtttttctctatggggaagcgaaagtggttcaccgaaacgcacctagccagacgccacccccgtccagttcacatgataaccttcttacca

SEQ ID NO: 657906 - DNA, 277 bp, Homo sapiens
ccttatcgccacacagaatgatctggctgggtagttttcctgctgtgtaatattgataataagacgtaatactgttttaatgaaaacagttaatattgaattatttagtaaaataaccatatatttaatcttaaggtttctactcacctaaatatctgaaattcacaggctataaaatggttgacagggaaataactttacatgatgactcacagttttcataaataatgcaggtaaactattaatataaaataattaggtgttggggataacatca

SEQ ID NO: 657907 - DNA, 159 bp, Homo sapiens
  misc_feature (56)..(56): n is a, c, g, or t
tcgacactctgttgtcagtgggctgtgaactgaggaatgtgtcgttgctgagtatnagattagggccactgactacagagagaagacaggctgttaacattctcttttaacttgagtgtaagggtgggggtcacacctttgcagcaactttaagaagga

SEQ ID NO: 657908 - DNA, 281 bp, Homo sapiens
  misc_feature (33)..(33): n is a, c, g, or t
ccccttcacccaggaaagtgcgatcttttagtntcgccttgccgccgcccctcggacggccgcgacccagccaaggacgcgctcgcctacactccccgacacggtctggcgtaatcgcgtcgagttcccccgtggtcgtgccgaggtccaggcagttctgacccgcaagtggaaccatgaactggaataccgcctgatcaaggaactgtgggcattcaccggcaaccgcattgccgtgcgctatgcctacgagtaccacgacgatagcggccagtggttcc

SEQ ID NO: 657909 - DNA, 1928 bp, Homo sapiens
cttcgtgtgacgagattgcctggcgtgagctccgggtgggtcaacgtgtgtctgtggggctgaagtcgcccgtggctgatacacacgcattcgccagggctctgattgcccggcatcacttgatggacgcacccaggtgatccgaggcactaagcagcgcacattatgacaaggcgttctcgtgaagacatctctggtgcttcacacctaatccacgactccaagaagaaattgtgcgtaactatgccacgtggtctaccagatctcaccctgacgaacgtgcgtgaggctcaaggtcagatctggagtgagtctatggacggaacagcaccggaacagaggccgggacttggcgaggctaagggtcgattgacatgattggtgcttgcccgtcgcaacgctaggacgcatgcagttccggagctgaattcggccattctgcagagccttgcgggctcccgggatcgtgaacctggagtgcagtgtacagagagcctgagacaggctgtaggcggagatggagaacgctgcatggcgtggacgtgttggagatgatcctgtcgcagtgagaaggggccgagtgcctgagcgcctcacgcaaagttacctacatcatccagatctggtggcttttgagacatctttcactttcgagaaacattgtcccactggagaagtttgaaagtctaggcaaaaacggtgtatggctggggttctggcagagcccatttcctcagggtcaagctgtgtgactttggccctcggacgcgatccccggcaacaatgatccgccgatcagtggtaggacaccccggcctacttgacccgagggtggcaacccgggtaccgcccttgaacatgtgagtgggtaaagaagtaccagaggaccctacagaggagagacagcaacagagcgttagtgccacgacaatttggaacaaacaagagtgcacctgtttcctatactccccctcctctcgtccagtcttcttcttctcctcgaaataaaatcaaactcaaaacaaaaataaaagaaacaaacacaaaaaaacacacacaaataaaaagaaaaagacaaaacaaacagaaacaacacaaacacacaaaaaaacacacacaacaaaacaacaaacacacaacacaacaacagacactaaacacagatgataaaagacaaaaacaaaggccgacaagcggacacaaggacaagaaggaaaggcacggaagagacacagacaaggacaggaagagagagagaaggagagagaagagccgcgggaggccgcgaggagacggagaggggggacaggaaggccgggcgcagaggaagcagaacaggacaggaggagaagcaggcaagggagaaagccgcgaccagccgacccagagaaggcgcagagacgagcagacggagaggaaggacgacgcgacgagaaggcggagcagagagagaggacgcagacagagaaaagagaacagaggaaaagaagaggacgagcgaagagagaagaggaagataagaataggacgaacggagacagaagaggaagagacagagacaaaggaaacagcgaggagacgacagagagagagaggaggaaggcagagagaaaagaggagaacaaagaacgagagagcagaggagagacggaagaacaacagagaacggacgcaaacgcgagcagacagaaagagcagcgggaagaggagagacaaaggaagagcaagacagagagcgacggaacgaggcgaaggagagacccaagcaggagagcaagagaacagcacacgagaagaaaagagagcgaagaagaacaccagacaagaatgacgagggagggcagaaggagagagaagcagacgaccgagagcaaggaggcaacacaagagaagaagagagagacacgacaaggagagcagagagacgc

SEQ ID NO: 657910 - DNA, 202 bp, Homo sapiens
  misc_feature (91)..(91): n is a, c, g, or t
  misc_feature (97)..(97): n is a, c, g, or t
gcgtccgtgcctttttaaccatttttaagaagtggaattgctgggtcatgtggtgtctgtgtttactttttttgttggtttgtttgagacnagtctnactcagctgcccacactggagtgccgtgggacaatctcggctcactgcaaccaccatctcccgggtattttagtagaaacggggttttaccatgttgccaggctg

SEQ ID NO: 657911 - DNA, 636 bp, Homo sapiens
cccgcgtaatccgtaccaggggtacttagaggtggattctttgcatgccggattcaaagccttatcaggcacaaattctaccaacctaatttctaccgattaattacctattagctcatttgtgaagcatttcccctccctatcctttctggtttttgactctttctaaatgaccatgcatatgaggcctccaatctcacaaagcctacatgcctagcttcttccaagcgtcactccatctaatgtcatttgtctctatagtaaccaactagaaaagctgctatgcttagtaatggctttgtacgagcagtggtctagcctagagatgttttaaagatttgagtcctctctaccgattactgttttttttcctggtattaaaagtgaacctctgatgaatgagagcagtagagggttagagagaaaaggatggaatatattataaaacatgaaggaagatggactgcaagtagagacttgagttcaagaggaaacgagtttagaaagaccttgattgataagaggactaagaagacacagacaaaaaactaggtataagaaacagaaaataattattaggcatttcccttcaaaatggtcaaaaacaacataatgatgtacgatttagcactgacg

SEQ ID NO: 657912 - DNA, 498 bp, Homo sapiens
gttgagattattcactagaaaagtatagtgaatggttggaatctacgtgtatgataaagatgctacaaagctaccagtattagttagccactctataagaaatttacttgttttaaaaaaatccaaatgctggcattgtccagaaaaatttaacaggtttatttataattattataaagttgaaccgctgaaacttgttcactgaaacattttaacttgcattaatgctttacgtctccgcatttatattaaaaattcacacacaaatgaaaatggaaaaactgccaatacctgatttctgtcccctatttttccactcgcaatcatatacttaggtaccttttgaccccatggaaaaaaaatatctaacgttcagaactaccaataacaggaagaagagaaatttttttttttttttggagaatgaaatgtttcccatcataggggattcttaagcacgttctccacgtatgcggggtgctagctgaataatctcaa

SEQ ID NO: 657913 - DNA, 183 bp, Homo sapiens
gacagagcgtggcccagggtggagtgcagtggtgcgatttcagctcactgtggctcactgtaacctccacctttcgccttccgctttcaggagacttgcttgaacccagcaggcagaggttgcagtgagccaagatcgtgccattgcactccagcctgggtgacagagcgagactccctgtca

SEQ ID NO: 657914 - DNA, 305 bp, Homo sapiens
atacataaagacaagaggcttaattgactcacagttccacatggctggggaggcctcaggaaacttaacaatcatggccaaaagcacctcttcacaggccagcagaagagagaatgcgtgccagtaggggaaatgccagatgtttataaaaccaccaaatctcatgagaactcactcactatcatgagaacaggcccaatgattaaattatctcccaccagttccctcccatgacacatgggaattatcgggattacagttcaagatgagatttaggtgaggacattctgaccctggcccctccc

SEQ ID NO: 657915 - DNA, 369 bp, Homo sapiens
  misc_feature (29)..(29): n is a, c, g, or t
  misc_feature (36)..(36): n is a, c, g, or t
  misc_feature (60)..(60): n is a, c, g, or t
ggaatgtggcaagccgttcgaaagggcanttgaccnaagatgaatatcccatccgggccnagcatctggtcgaggctatccccaataggtcgcttccagttcttcctcgacttcagggttgaacgcgcttgcggttgtgatagtgaatggaaagcccgaaagccttggcgcggcgggcgacagccgtgccgatgcgtcccatgccgacaatcccgaggcgcttgccccagatgcgccgtccgagcatccaggtcggagaccagcctggccattgtccgtgcgctcgcccagcacattggcaccttccaccaaacgtctaggcacggaaagcaaaagtgccagggtcatatccgccgtgtcttcggtcag

SEQ ID NO: 657916 - DNA, 346 bp, Homo sapiens
ttcctaaatttattttcataaagatacagttcgatacaggaattattacgagtaattcttttttgtttctgtttataatgaagaacactgtatctacattttcacaagttaacatcaagccatcaaacctgggtatagtgcaaaaaacgtggcacacactgaccacacattaggctgtgtcaccattgcgtggtgcacctgctgtaagaattttagcttgctacttgcagacacaatttcagtgggaaatatgccactgaccgatttttttcttaatttttgcaatggggataggacaattgattccacaaagtatttttttcttttttctcagccccaatttgaa

SEQ ID NO: 657917 - DNA, 411 bp, Homo sapiens
aatcaggctcggtacccggagacatcttacgatgcactttgagactgccattagaatgtacaatgaaagaaaagacaaagatatcaacccacaaagcttctacagaaggaacccgtcaaggcacttcctctatgtggaatgtcgacagacaagttagcctactacggaacacagtcgacttctcgtgaaggtttaggagaagatatgtatcaggtgcgctgttatttggagtgttctactattatccttgcgtgatcatgctatactccgatggcttctgtacccctagacattgaccctggctgcctctgggttgctagccctggagattgatttgttgtcagccgacgattgtttccgtcgtcctctgtacgttctggtccgtcgttccctctgctggggcgattccac

SEQ ID NO: 657918 - DNA, 479 bp, Homo sapiens
gctgtgttggatgcctgagcaaagcgctagccaggcgcaagcgcgcacatgactgtatgccatccgaaggacacccctggcccgccggccaccgcggaggactcccctggcggaatcgcctccggatcgccctgcagtcggggggacgttgttgaggtcgcgcaaggccgatccgggtcccggtaaggaatgcacacaccacggctcttaaggcgaacgggctgtgcaaagaaagacccgtcatgtatctaccgctcccggacaggagaggacgtcatgaacagacacggagagattgcataccacgatgacaaagcagttgatcacgggcgtaactgtattccgactgagaaaacacccaagaccaccacctacactgttgaacatcccgcactacaagtacccaagcataaacaaaagctccgtcgtaggatggacttccaaccgcacataacgaaaggagaacaagagcaagacgg

SEQ ID NO: 657919 - DNA, 159 bp, Homo sapiens
  misc_feature (4)..(4): n is a, c, g, or t
  misc_feature (10)..(10): n is a, c, g, or t
gggncccaanccctagtgtccctgccccatgcctttcctttagtggtgggaaaccctttatcttgcaaagtgaatgtgccccttccccacccttcttagtgtatttcacagaaaacaaaacctcccaataaaacgggttgaaacctgaaaaaaaaaaaa

SEQ ID NO: 657920 - DNA, 712 bp, Homo sapiens
tggacgcgtgacctatgtccatcgccatgcttggctcacactggaagaggctggaggaccagaagggctcacactgtgcactcttggttctccttgtcttgacccacatggtgatttgctagcgatggcgtgctccacagtccccattcatcgaaagcatatactcaacgagctcaaataccagtgtgtccctaccaggcgttacggattaatgttcatcaggcttccatctgagactggaatgcatgggtaccatagcccctgcccaggagccgtaccctcggaccacagtggctctgtatggccaggaactgggactcgagctttcagattctcaagctagccttgtgcaaaacagctgtaggtggcctccctgacaacagacactcagcgcctccccaccctgagctctcgcttgcgattttcccgcgatgctccccgaccccatggcaaaaggctggccatgctctgttcccagcagaccgcgcaggtttccccacgtggctgcaatggacctaccaaaagccatgttgcatatccgttgtaagcacgtgccctgtgccctgtccccattccttatgccctaggaggccaagctggtgtctctacggagggcccacaaaggcaccctggatcccccagagagtagattggtgtgctcaggccgcaaggctgactcagaggtagggcagtgggctctgcaaggcacctg

SEQ ID NO: 657921 - DNA, 802 bp, Homo sapiens
agggagagcagttttgcaatgggaactcctccgtctaccttctggtgaaatggggtgctggcatctgggtcattctgtaaccacgaaacacaagatgaaatgccatggggttaccaggagggcgaggagagatgacctgcagtcaggatctgaagacggctcctggagggaaatggggtttggaacacagttggaagggctgaagcaagatgtgagagccctgtggagagaggaggtgtgttctctctctcacctcagctgaacctgggctcaggaagctgaaactcctccatgtgaatcctggttctctcattcatcacctgtgtggcgggacggtgcttttaggtcaccaagcctcactacactcacctgtaacatgaagatgatgatgcctacctcctccgactactgtgcagatttaatagtgcatgggacaaggcttcccatatgtttggcacacagtaggtgctcggtacacagcagctaacagtcacgatgtgcatgacactgttactcaggtggccaccctcttgggctcccaggtcatcctaaatccctctctctcttcaccatgtctatccaaagcatcagcactcatcaaacaactgtctcctcaagttgccccctatttcaaattcccactgctcctgcccatattctggccacatcacctcttactttggacaattttaaagcctcttgtctttgtttccagttatttcctccacctgtctcttctgcaaacctgggctactaaagtggttttcaaaacactgctctgctaaaatcctcaagtcatcct

SEQ ID NO: 657922 - DNA, 341 bp, Homo sapiens
caggatcttaacagcatcctaaccagtacatcgcaagatgtgcggcatgcctggacgccaccagcagtccatccccgctgtcctggagatccctccaagagcacccataattacgcgccaaggactccatcctgcgcaggccagggcgcatgttcacttgccgaagacctgcgctagggggactcctcaatagccctcagcccttccctcgtttccaggcctctccccaggcttgccatcatgccttctttactttttgagcctctgaatttccaattccctgctccttcccactccatataagaggctaggtgaggcgcaactaggttgctgggcttctg

SEQ ID NO: 657923 - DNA, 116 bp, Homo sapiens
gtctagccgtgcagtgcacgagacaccaaactcactgtggctaggtctcggcagcatcctactgcgcctggcttgcccaagtatggcacctaggctactgtgggcggcaagccacc

SEQ ID NO: 657924 - DNA, 691 bp, Homo sapiens
  misc_feature (10)..(10): n is a, c, g, or t
  misc_feature (36)..(36): n is a, c, g, or t
  misc_feature (51)..(51): n is a, c, g, or t
  misc_feature (77)..(77): n is a, c, g, or t
  misc_feature (82)..(82): n is a, c, g, or t
  misc_feature (89)..(89): n is a, c, g, or t
  misc_feature (92)..(92): n is a, c, g, or t
  misc_feature (94)..(94): n is a, c, g, or t
  misc_feature (102)..(102): n is a, c, g, or t
  misc_feature (109)..(109): n is a, c, g, or t
  misc_feature (124)..(124): n is a, c, g, or t
  misc_feature (139)..(139): n is a, c, g, or t
  misc_feature (156)..(156): n is a, c, g, or t
  misc_feature (172)..(172): n is a, c, g, or t
  misc_feature (174)..(174): n is a, c, g, or t
  misc_feature (178)..(178): n is a, c, g, or t
  misc_feature (187)..(187): n is a, c, g, or t
  misc_feature (189)..(189): n is a, c, g, or t
  misc_feature (192)..(192): n is a, c, g, or t
  misc_feature (202)..(202): n is a, c, g, or t
  misc_feature (208)..(208): n is a, c, g, or t
  misc_feature (214)..(214): n is a, c, g, or t
  misc_feature (217)..(217): n is a, c, g, or t
  misc_feature (230)..(230): n is a, c, g, or t
  misc_feature (236)..(236): n is a, c, g, or t
  misc_feature (246)..(247): n is a, c, g, or t
  misc_feature (250)..(250): n is a, c, g, or t
  misc_feature (256)..(256): n is a, c, g, or t
  misc_feature (286)..(286): n is a, c, g, or t
  misc_feature (289)..(289): n is a, c, g, or t
  misc_feature (300)..(300): n is a, c, g, or t
  misc_feature (304)..(304): n is a, c, g, or t
  misc_feature (310)..(310): n is a, c, g, or t
  misc_feature (322)..(322): n is a, c, g, or t
  misc_feature (328)..(328): n is a, c, g, or t
  misc_feature (334)..(334): n is a, c, g, or t
  misc_feature (360)..(360): n is a, c, g, or t
  misc_feature (381)..(381): n is a, c, g, or t
  misc_feature (391)..(391): n is a, c, g, or t
  misc_feature (413)..(413): n is a, c, g, or t
  misc_feature (415)..(415): n is a, c, g, or t
  misc_feature (422)..(422): n is a, c, g, or t
  misc_feature (433)..(433): n is a, c, g, or t
  misc_feature (457)..(457): n is a, c, g, or t
  misc_feature (460)..(460): n is a, c, g, or t
  misc_feature (463)..(463): n is a, c, g, or t
  misc_feature (473)..(473): n is a, c, g, or t
  misc_feature (477)..(477): n is a, c, g, or t
  misc_feature (490)..(490): n is a, c, g, or t
  misc_feature (496)..(496): n is a, c, g, or t
  misc_feature (508)..(508): n is a, c, g, or t
  misc_feature (541)..(541): n is a, c, g, or t
  misc_feature (592)..(592): n is a, c, g, or t
  misc_feature (603)..(603): n is a, c, g, or t
  misc_feature (609)..(609): n is a, c, g, or t
  misc_feature (662)..(662): n is a, c, g, or t
tagcttttcnagagcgatcttttattttctgaaagncccaaaaccgacccntttatcaaaagatgattgaggccccngtccncaaaccntancnttttcccnttcagcnaatcccggggccccnagggggccgccgccngagtgaaggggggacancagaacccgccccccncncccnacagccggncngcngccccccgcnaggccngggggntgngcccgaccccccnctgggncagagtccgnnccntggggngggacgggaggcgggagcagtggcggggcntgngcgtctttggntgtncaaacntgtctatgagancaaccntttccnccagggcccccccaattgttcggacnaagtcaaagaaatcattttcngcgtaattcncagagggcaaccagaatgaaanancattgancacagccgganatttgctaagaggctgaaacttcnccntcngattaatgtngganacacagaactgcntcaggnagcgcccgtccncacaccagaagagacggatatcagggatgtcgnagaggatcatggccagcctttctaatcctaggccaaaagcccagccgattnggtcttgagcnccagcngaattgaccagttgttgttccatcaccccgcagccaagaacttccagccattntccatgaaagttgatctccatctcaaagg

SEQ ID NO: 657925 - DNA, 384 bp, Homo sapiens
ccagttcacatgtctttacctacccgggcatccttgtgaaaaaacgcacagttaattgaggaaagtaagagccaccctcaaattaaaacctaaaaggacccacacacattgtattgtagagcatttttaaaataaaattccagttagccctaattacctacacccattcttactctctccataatgcttctttacctgttagaaaaaacctgtagcacaaaaccatgtaataaccatgcaccctactcaaatagcttgcgctttctaacttaaatgcccaaatttgaagattatataggcaccacagtttccctttataatactctattcaatagtgtcctataaggttctctgactatataaatctctgtcacctctcgtgcc

SEQ ID NO: 657926 - DNA, 629 bp, Homo sapiens
aggctgaaggtttacaatctgactggatattatcttggttaatatatgaaatcctgagtggggatcccatttggatacttccaggtcaacgcttccccgtaggttcaaacaaaaagagtatagagtcagcatgaaacagtttatcctgtggatggactccactgctcctctccactagttcaaatgcaaagggaaagagttactccagcagtgtatgtatggagggaaaaacattattagattatcatcttgcagagattagtgttaaaaaacaatgcagctatagattagccctcatgataatcacatcttgagcgaatttcaaaagccaacatgtggaatcaaacacactatttgccgggcaaaaaaactaaattacaaatttaactaaaccccaataagcagataacaaacaaactaacgtttggcagtactcactaattacaattgtaatatcagggtagtctcttgcacggaacaatcataagacgaatacgtcgtaaaggtaataacacaggcaaggaatgatgtgtcacagtaatacttgcccaaacattacattgatcgatatttgcatactcttacgaagctcaatccacacctgtactagcctcaatttctcataccta

SEQ ID NO: 657927 - DNA, 960 bp, Homo sapiens
gctggtcccctggcctctcttcgtcctcatcctctgacagcgtgtggccttgtgggaaagccggaaggcctcctggctcggggctgtggcctggagttcctcaacaggtgtctggctattcgggtgtctggccggagccccccagggggcccagagccgcaggacaagggaccagatggactgtcgttgtatggggacagatggtctggggctgtggtgcgcaggggtgctgtctgggcctgggtccgtcaggatggaaccaagagagcaaagggtggaagctgctggttcgtggcagggggcgtgcctggaagaccgaggcccacgcagagaaccttgcatcatggaatcagagcgtccacagtcccctccctgatgagactcgaaggcctgccagtacttccagtatgccctaaagcctgcggcaacacgggaccaggtggcgagcccttctacattcgtgccgaatcctcgactcgttgcctgagtagggccgatccccatgccctttgcggtgagtaggccactgagatccttcgactggtggactcggcatacaagcggaggcaggaatggttctgcacccgggttgacccctcactctgcgggactggaccggggcaccgtgccaattatcagagagcccagcaggctcctaaagtgcagagaaatgctgcctccagcggcaaccgaggccccgcagtaatctgaagaagagagcctggaacaggtgcggtgtgaggccagccgtgggggcgctgcagggatccccggtcagtgtgctgagccttgtcagacggagggactcgacctacagtgtgggcgttctgtgtgcctgcgctgtctgtgtgaggcgggccgtcatcgacgaacgccgcgggaaccaggcaggaacttggggaagcacgcggccaggcgccggcccgcgtggaccgcgggggggaacacagaagaccacct

SEQ ID NO: 657928 - DNA, 444 bp, Homo sapiens
taggcggaccataggcgcgtctggtcccacccaatctccgtcgaatgtaatctccagtgtggaggtgggaggtgatgtatcacgggggcgaatttctcatgaatggtttagtgccatccccctggcactgtcctcgagatagcgagttctcatgagatctggttatttaaaagcgtgtggcacctcccctcattctctctcttgctccagctcctgccacgtaggacgtggctgctccctcttaaccttctgctgtgttcataagtttcctgaggcatccccagaagtcaagcggatgccagcatcatgcttcctgcccagcctgtagatccaattgaacctttggttttattctttataaattacccagtctcgggtatttcgttatagcagtgcaagaatggcctcattcacattcataaggcccgagtcctgcatctctta

SEQ ID NO: 657929 - DNA, 887 bp, Homo sapiens
  misc_feature (14)..(14): n is a, c, g, or t
  misc_feature (29)..(29): n is a, c, g, or t
  misc_feature (47)..(48): n is a, c, g, or t
gtgctgtggaactnctggaagccagctgnctggttgcacaaagcaanngccgtgacaccctggaaatatcactctatccttccttacctttccgtgtggcagctggccatgaagaaattctctgacctaccttgtttgatagcagatcacaagaccctggttccagagcggtcctgctttacaccgagggaaaggaatgtcatacagaaaggccaagaagaatctgaagagatgctaatcacctttgcacgtggctgcccattcttcattgaacctaagcattaaaatagacagtttcccctgggtctttgggtcttcatttctgaagactccatgtcatgtaaaacgttgattaaataaatgtatcatgcattaaaaaaaacaaagcgggtttgctactcgagcatgcaccacaaaacaaactacctcacgcacgacttgcccgtttgaacgcacgtgtgtatatatgaagaacgcgcctaacataaggggtctttgtcgttcctgtggtgcgcttcctccgccattacgttctggaggatgggtattctataaccgcctcctcacagcgtggctccgtgctttgtttgtgtagggggaggggagctgttctcccttggggtggcgaagaggtttcccgcgcggttaggtttcgccggcaccaaagcgagccgtcgattgccgggaggcagaaccaaggaacacgagtggggtgggcatacctacacgccccaacccgtcggagttcgttggacacgagactctgcacagggcggacatgggagtatcataacagggtgcggcccatccgaagaactgtcgcccctcaaattgagagtcgctatgcgagtatacgcatccttagcgtacataggtggcttataaac

SEQ ID NO: 657930 - DNA, 851 bp, Homo sapiens
cgtaacggacgcagcgctctcgcggctccgcgcgtgccgggaacgtatgttatgcagtaacaagtggataattttagctatgataatatgcatcaatgcgccccaattgcttctatagaggcaggagggtcctagacatacgtttgaataaacagagatgctgatgctgatcatgtgggacagagaactatcccagagagaggggagcaagacgttatctgtctaacacagagcgatatgcaagtaaacgagttcctcccgttcagaaacacgacaagatcgtgacagcaatccgagaagtcacaggatcgaccagtacactcttattgtcgacagagggctgcaaactttgtagaatcgatacaggacgcctaggataacctcttcgttgactatccccttatgtgaatactagcacgagtcgttatgaacagccaatcgctattattttcagataccaaccgaaaactagattgactcattgactacctttagactttaagctagtcaggtgccaggctgtgtgatgtatatcgcaggagtcgttgtaaacattagattcctataccttaaaaatggggaacgaatatacatcgtgtcgtcgtacaaaagatcccctgtagctgcccggaactgacactaaactacggttgcaacttctgtctcataccggagaaaagtcatcagcaaacgtttatgctcaaacttttgatacaaacatagcaattatagctatacgtaccgatcatagaatgtaatgacgcaaccaatgttttgaatgaagatggtaaatacacttaatccttctaacttaataagacccttaccaaaaaattttgaggataataccg

SEQ ID NO: 657931 - DNA, 432 bp, Homo sapiens
  misc_feature (14)..(14): n is a, c, g, or t
  misc_feature (26)..(26): n is a, c, g, or t
  misc_feature (38)..(38): n is a, c, g, or t
  misc_feature (49)..(49): n is a, c, g, or t
  misc_feature (94)..(94): n is a, c, g, or t
  misc_feature (287)..(287): n is a, c, g, or t
  misc_feature (390)..(390): n is a, c, g, or t
cccaaacaccccancctattttccantttccaaatatngtacccctaanaaaacccccagaggatatccccacactttattataccaataggcnttgtgttaggtaattttgcccccaattgtagggtaatgtaagtgtttttgagccatgtttaaggtaggctaggctaagcctatagtgttcagcaggttggtgtattaaatgtattttcaacttacagtgttatcaacatacaatggctttatcaagatgtaaccctgttgtaagtcaaggaacatctatatgnccaaatcatcctcaaggaagattttgcaggggccaggcacagtgactcatgcctgtaattacaacactttgggaggccaaggcaggaggatcacttgagcccnggagtttgagagtagcctgggcaacatagggagacccccatc

SEQ ID NO: 657932 - DNA, 712 bp, Homo sapiens
tgcgcacggtcagggctgggtgttaatcggacgagggagagaccagagagagtaagttggacctcctggtcctgcaggaatgtgctggtgctcgtggctgctccgggtgaacgtggagagactgggccccccggaccagcgggatttgctgggcctcctggtgctgattgccagcctgggtgccaaggtgtgagcaagtgagaggctggacagaaatggcgattcttgtgtgcccctgtgtcctcagtggcccctctgtgagcacctgtggcctcagggtcctactggatgttgacttggtcctaaagtgatgccctgatgtgttgcccaatgggcccccctgtgtgatgccacgtggattccctggagctgctggccgcgttggaccacccaggctccaatggcaaccctggaccccctgtgtcccccatggtccttctggaaaagatggtcccaaaggtgctcgaggagacagtggcccccctggccgagctggtgaacccgtgctccaaggtcctgctggaccccctggctgagaagggagagcctggagatgacggtccctctggtgccgaaggtccaccaggtccccagggtctggctggtcagagaggcatcgtacggtctgactgggcaacgtggtgagagaggattccctgggttgctggcccgacgggtgagcccggcacgcgggtgctctggagcatctgga

SEQ ID NO: 657933 - DNA, 157 bp, Homo sapiens
aagttatgtcgggacggggggatgctcctctgtatacagggttcgacagccttctggcctgcgcatagaagacgcagatctgccgggaccccgctgtgctacaatggcgccagagactgctttaatccaagttcattatttattatttatttattat

SEQ ID NO: 657934 - DNA, 151 bp, Homo sapiens
aattaacactcgtatgctcatgtaagaacccaatgcctacaaaatggatacctttcagagaaagtatatacttaaaagacccaagacgtcaggatacataaagctctgtatttataatacttttatatagtcctacttgtaggctattatg

SEQ ID NO: 657935 - DNA, 411 bp, Homo sapiens
aaaatcatttttaaggagaagaaaatcatattgaaacagtcacaactacactcatgagcactggacctgccccagcaaacatcatctcaccaataaagatctgcctggcgaaacgccccggcctaagtagcgcggggtccaggatatctggtcgattggtgccggccaaaatgacgacatttgttgttgtattaaaacctgaaagataacaaaaatgcaaacactattaaatgacaagaggcagaaagcaacagtgcaccatcaggaacatatgagcactgcaaattcatagctacagtaaacacattttctattcattatctagtgttttttgctttttttttttttgggaaaaaagccccggaccatttttataaggtccttgcccaaatgccacccatataaaaggag

SEQ ID NO: 657936 - DNA, 1176 bp, Homo sapiens
tatcgctgattgtggctctgcctagttcacttgtcgatacgccaagcggtgtgtacgtttggaacgcaaggactgcgtactaggctcttagcgggatgaattgatgcgcggcagaccactgtgatcggtgtggaacgtggaagagatacaccttggcgccgttaccgtggtattttactgcgactgtccagtgagagaaaaatctgtctttacgggaatgtgactagtgcctgtgtgggtcgacctcttttgtgtcatgaatctaactcgaagatgagtgatgctagtttgttgcagtaattagtgttggttttgggttgtttagtagatttctcatctctatgcggacatattaagagagatttcgtcatgtgttatggttgggtgcaccctctgctcgaacaaggccaatttccttcgttgggctttagtttgcttttcaatcctgtccttttctgtgtagtgctaggaatcagaatgccaactataatgattgttatataggatagatgtatgccttggatcatatacatagttgttgataataagtagtggtgcaactcatgatgttatgtataagagttatatatagtgatatatattgtatttatatagtgagtgggatagtccgagaagcgtgtttgtgagattaactctagggatagcgtgagcacacactcggctgtatatatcttgattatcgtcgtgattgagcaataagagtggttataccaatggcgtttgactgaagtgtgcaagttgatggtgatattactattgatgttgtatgtatatggcgatatataagctggtgtattgtatgcttgttgctgtgtgtcttggatagttacaggaatgaaggtgatgttgatctgcatctctgctcgcatttaaattaaatagctgcgagtgtatgcgcaatagcccactgcccctctatagtaagaagctttgattttcccctagtcatgatatagcccttgtgtcttcaatttctttgaatgctctgaacctgtagttatcatatagagtttcctcttttgataacatgctgtactttcatattctgctcactatcgagatgtattgttaacacttagtatagctcctcgctaaatgataggggttttatctgcatgttgacattgaaccttgaagtatctttaagtatcgtca

SEQ ID NO: 657937 - DNA, 851 bp, Homo sapiens
cctggccgaggagagccggggggcgggccgcgaggggcgggcgcgcggcatgtgaaggcggggaggaggagcaaaggtgcggggagggggaagcgcgagggcggggtgccgcgagagggggaagggggcgccgggagggcgggaggtgggcagaggcggcccggcggggcaggcgaaaggcggacggcacgaccccgggtgggggcaacaatgattgttggtggaggggcaggagagagaatggcgtgggacaggtgggcgcacgacgcaggagtgtagcgagccttcgtgccaaaggggccccacgagaggcaagaggagcggctcccccacgggcatgaggtgggcggcagtagaataacccgagaggacgggcagccaccggggtggcaggcgaacaggagggcggggggcccccgcaaggaagcaactcggtggggataatttgggggaacaaacggggggctctgcgaccaccctttcacaccggtgggagaatgccaagggcacacaaagcgtggtggtacatccccgcggaaatacgggcgcgccacgcgtggggggcgcggttttgttcactacgtgggttgtttatgcgccggtggggcttttcttctgcgaaaggaaagtggtgggtgcgaatgtcgttcacgttcacagggaggcgttatgcgatgacagggggagatcctgggacggggagaaaaaaagtgtcgcggtaagacactatgcgagcgttgccaaacaggcaatgaagcttgtgcactcatgtctagaggagcataatcctcgaaacccgtcgaataattctggtctttttcccaaaacacccccataaacgccacataaca

SEQ ID NO: 657938 - DNA, 128 bp, Homo sapiens
catattttgtgccaaatcacactgttttccaaactacataagtgatgagaatcttggcattgtttacacatttatgtaagtctctttagtgtctggcgtaggctggtaagtttggcgttggctggaaa

SEQ ID NO: 657939 - DNA, 876 bp, Homo sapiens
  misc_feature (63)..(63): n is a, c, g, or t
agaatatataatatatttttcttacataatttacattagtggcaactttgaggcaaaactagnataatgaattcacaggagaagacatcaaaataaaaagccaagatttttatgaaaaattttaactccttagtaaagagaccagtgaggaactcctgcctccaccagttcatactcaaattaaaggccatgcctatgctccatactttggaaaggaagaaccctcaatgactaccaactgcaactggttaaaactttcatccaggattctggatgccacgagaaggcatgagccacatatcaatgaaacgcgttatgtgaaaatcctctacatgtttaatggatgtgactattctaactaaataaaataagtgaatacttaacaacaaaaaaatcgtccaatagtgaccataattcttattatatagccaaataaatttgtctattctggccttcctggttgtaggctatgccttcacttcccttaagtgagggttatataattgatctctagatcaatagcatctattagtctctgctcgttacatatgtgaaatatatggcatcgttataaatactaatactctatcaccatatttctactccatttcacgggattatcctacaaatttaattggtagattaatcggtttaatttctcagtctgacaataattaaataatatatactttatttgtaatttaacatattattctctcgccacttttgtatttcccattttaattctaaatatatttttatattcgttttatattaactgtactaatttgattttattgtatttatttcatatatatattctttttctcttttctcatcacaccatacttttatcaattatatataatccttccg

SEQ ID NO: 657940 - DNA, 388 bp, Homo sapiens
ttttttttttttgcagcaaaaagattaaaaacattttagcccttcaatgtttaagttcaagtggaactatctaaacatcacatcaatcaatacctttatatgttcttctttatatgcacaagggcaagaattagtttaggggtataggagttggttacagtcattatgctctaatgtggcaaacattagtgtcaatttaagtaaactctaaagggttatgaggtcaaaatgcaagactgcataatttatcagatcaagcaaatcattttgaaagtacagaaataagtgaagcatgaggctattactgcctctcatgaataaaggttaataccaatgtttatttattacacgctggatggtatttgctgtcgacgcggccgcgaattta

SEQ ID NO: 657941 - DNA, 122 bp, Homo sapiens
  misc_feature (5)..(5): n is a, c, g, or t
gattntagaggatccccatggtcggtgaagagctatggttggggcggtgatgtagagggtgatgttagatgtggagggctccaggggctcattggagaagagttttatggcgtaagtgaagg

SEQ ID NO: 657942 - DNA, 416 bp, Homo sapiens
ccgacggggactggtccaccggggattcccaaagtgtttcaacaaagaattcttttctcatagagaaattctcggtctcatttggcagaatgcattttgagaaacactctcctaggcagtctagacatttttatagctcctcccctagaaattctgactctttacctccagtcacctcttggtcccctttctgcaagatatgtgggataaacaaacacacaaaaatatctcatgtctctgcctcagcctctttaatgaggtccattataattaagaggactgagtgatagcatgcatggaaaccactaaaatgtggtacctgtagttttgcttttatgataggagcaaagctctttgcttctctaaattgtttgggtgttagaaaaattctgttacatggttagaatccccggtcg

SEQ ID NO: 657943 - DNA, 742 bp, Homo sapiens
agggccctgcctgctcagaatacagcatgtactggtgccggacgttacttgtacgactgagtgccctatactgagtctgatataagccaggcttcgtgagaccgcatgcgtagaatgtcgatgagtgcctacaagttgatctgcttggcgatgtttgagatggaagttattgctgtgcttgtgacatgattggacctcatacgctaacacgcgagtcttcatcgctgataagcgctacattatggcaaatgtatatcatgttgtactatgtgtagttccacagtatggttgtactaattgcctcagtcaaggtctgaagaggattttgcatgtgatgatctatgtagtttgatgactgatcttaatagcactggagagctatgtgataaaggtttctctccagatcccccaaataagctccgagagcgcccttcggtctgccatcatggttaagtctgtccaaataaaaacacatccgggtaaaattgcttgcccatgttagtaggtggttactcaccacacgaatgaaccgacactggtcatttcgctcactgtacgaatcattcacgtctgtgtatgtcaagacgtgcggtgacatcaagtacttcctggagcttgcacgcggatggcatgcatacattcgtgccttgggaatcctgtaagacttcttgcatgagtcccccgtcaatcttgatcttgcacactggtcgaacgctgttctttgacgttaccaatactttgc

SEQ ID NO: 657944 - DNA, 421 bp, Homo sapiens
  misc_feature (102)..(102): n is a, c, g, or t
  misc_feature (116)..(116): n is a, c, g, or t
  misc_feature (133)..(133): n is a, c, g, or t
  misc_feature (171)..(171): n is a, c, g, or t
  misc_feature (225)..(225): n is a, c, g, or t
cctcctccttgctgggtacgacgacttcaactgcaacgtctgggatgcactcaaagccgaccgggcaggtgtcttggctgggcatgacaaccgcgtcactgncctgggcgtgactnacgatggcatggctgtngcgacagggtcctgggatagcttcctcaagatctgganctaacgccagtagcatgtggatgccatggagactggagaccattccaacttggncgcgttacatgagagcatatctatccaaccgtactaacgtggacaccctacactccctcagacttcaaagggcagatcttttttcctcacttattgctgaaacagagacaattccattagagaagatctctgtgctgtaactaacaaatgtcatcttcgggcatgcttgtttctttttgctgaatgaatttaaagg

SEQ ID NO: 657945 - DNA, 114 bp, Homo sapiens
tcttttagagaggggaaagtgtgagctcttcccttatgcctaatggctatttttgaagcaaagaaggcagcaacattggcacatgcacctggcaaaggacccttgagtaagtga

SEQ ID NO: 657946 - DNA, 354 bp, Homo sapiens
ttgctgcgtttttggtaaagggtgtaatttgtaaacagtgcaatttaaagtgaccttagtgatgcagagttcctgagtggtgtttgtagaatgagtttatcatacattctttctactactggaaaaaaatggatgcagtctggactgttgtaaccttaggttgtaatctgatttggaaataagtacatctttaaaagttgctacagatttgagttcatgattttgttaaaaattgctatgacaggcccagccataaatttgacgcctccctgaaatggaactagtctaacaaaattcattgttctacctagttgcagctgtacctgaaataaaaatgttattgatgactgaaaa

SEQ ID NO: 657947 - DNA, 230 bp, Homo sapiens
  misc_feature (158)..(158): n is a, c, g, or t
  misc_feature (183)..(183): n is a, c, g, or t
  misc_feature (194)..(194): n is a, c, g, or t
ttttttttagtagagacaaggtttcaccatgttggtcaggctgggctcaaactcctgaatccgcctgcctcggcctcccaaagtgctgggattacaggtgtgagctgccgcacccagccaagaaaaataatactcttaaatacttagatgttcacctnaagttgatattatttggtatggganttacttttganctgtaatctttcagattacaccactttgaaaacaag

SEQ ID NO: 657948 - DNA, 825 bp, Homo sapiens
aatgtttctcagtgttgtgcatgtgagatacatctcttcatttgtaggtccagttcgtagtagcttctgcgatgatgtaaattaaagcacacgtcagtcttataatgatatcctgtggtgtccacggtctcgtcgcattatattgatcgtgtagtttgtagcaagttcccaatgctggttattagtggttgacctccaacctgtttcggaaggctatttctctgcagtgggttgcgaaatgtgatttgtgaggaatacattaacatagatgacgcccgttacccactcctgggagctatcttaacatgacaagagagtccagtattctcagcagctcgtgaattatagagggaaatacaggagaggaaccgctcttccactattacttttcgtccaaatgcatgcatggtgtaccagaagtgtgaagatcggcttgaggattggggctagctcgtatgacactaaggccccaacatcgtcgggcactctgtcttgtggtcgtcggattcttaggaacgctgtctctagccggccacctgtcccaggggtcgccgtggccggcattatttcctagttcttcctgtaagcctgagtgtgccagcgcggggagtgaggaggggtcagggggctaaggatgcaacctctgacgttctgcgccttcctaggagagtcttacatgtgttgagatttcacaagcaatgcgaggtgtaaaataccagctctacaagaagctaaggctctgtgacggcatagttttcagtatcctcctatcacaataaatcacaatggagaattagtataacatggtagcacgtatatagcccc

SEQ ID NO: 657949 - DNA, 206 bp, Homo sapiens
tgattgtatatacttgggctgtatacttgtcaagtatcagtgttgttaatcatgacgcaggcttatgcggatgataatgttttcatgtaacttatactaacattagttcttctatcgggtgatgaattggtccacttgggatgtgacggagttcacttatatgtttgggatttataaagtagagggtgtagaagcttgaacgcttt

SEQ ID NO: 657950 - DNA, 304 bp, Homo sapiens
ccagtacaacagctgaaggaatatgagtgggaagactttagatgtcatgtacaccaaagaaggcctggaactatccagaggatgaagaagagaaaaagaagcaggaagagaaacaaacaaagttatgagaacctctgcaactctcatagaaagacatatatgtgatgaaaaaagttgaaaaggttggtagtatgtcaaacctgattggagacatctccatgctgtatttgtcacaagcacatatggctggacagcaaacatggatataatcatgaaagctcaagccctaagagacaacacaaca

SEQ ID NO: 657951 - DNA, 784 bp, Homo sapiens
  misc_feature (1)..(1): n is a, c, g, or t
  misc_feature (496)..(496): n is a, c, g, or t
nctggagggcccccaggccccctcgggggggttcttcttcgcaaccagttgagccccccccgctgggggcaacagggacaatgccccccggcgttaccaacactgcggggcccacaaaagacgatgtgctccccgctcggacaatattgattgcacagccgaagaccatcattcagaaggcgcaccccggggtgtcccagacaccacagacagaggtcctcggttaaggccacgcgtcgcccccgcccgcgactggtagaatccccccagaaagaacgtgggtgctctttcgtagacaactccccaaactatcttctgagtagtggtacaaaaacgcaactcgccgccgaggggttcctgcagggacaccccgcgttggtccccgtgcctctcacgagattctcccagcccccacgaaacagaggtaattatcatgccccctccgagcaaaatcagcaccgtttgcgacggctttgcttcccaactctaggcacgnctctttattctctcccgcatcgcccatcccactctgaacacacaagagaacatcccatgagatatctattgtgagctgcgacatacaagtatttctgcaatcatagagcacctttctaccccccatccttgggcggcataaacatattctagagttaaccaccacgcgtcaccacagaagcaagagcacctcacggagcaccaccgctcagcaacccctcttcttcgttgaaactatatgaatgttcgacaaaaacaagacccttcagtgggaacaaaaaaaaaaaca

SEQ ID NO: 657952 - DNA, 557 bp, Homo sapiens
gtggtggatataaaatatattaatatatatgccatggctatcttttatgctattaaaatttgggaggataacaggacttataatgaaaatagaatattattaagaaaataaagcttcactagtaattacatttaaaaaataaatctaggccttttaaaccataataaaaatcattgaaaagatctcagttctcatcacattatctgcaagtaacaaatttagggcagaaattatacttttccttttataatactagaaagtgatttctggctaacgtaattttagttctatcacatttgggactgttcttccttcagtaaattttctcatgatgaaacttgctaatcttatcagacgtttttgttgaatataaaacaactactgttatgattaggaaaattattaatgccttatattacctgcctaagggctagaaaattgaaaataagttgtttacttttatatcctgttatcaaaggggtttgaatgacatgctattaattgtatgaaatagaaaatgtctaatgcaatcaattgtaagcagcttttcttacaat

SEQ ID NO: 657953 - DNA, 398 bp, Homo sapiens
gtcaggtggacttggccatcaggctgtacacggggatcctctcccggatccaacagagccaaggttttcaactacgccactttctggatctagaaaaaattcactgtcttccagatccatagagtgagtatcgtatatgtccattggatccaatatcagcatcctttgcactgacttatcaggatgatttatatttgatggaatgtcttcaggaagtaatgctgtatattcaacctgatcacacactggtctattgtcattcacatcattgacgctcatttccaccatggcctgtgttacaaaaagcccatcattggcagttatattgagaaagttaatatcctgttcttctctgtctagaggcctcttcacatagaccttccattataataaaatca

SEQ ID NO: 657954 - DNA, 982 bp, Homo sapiens
  misc_feature (110)..(110): n is a, c, g, or t
agtgatctgtgtgttctgattcttacccgcattcagtgtggtgaaactcatccgggtcgctgtctttaaaggccctggtgcatgtactaactgctatgacctccacgttntgctccggctctgataaggacctcgtagatgcactagtgcttctcagacaatgttggtcgggagtccctttaaaacattggtccatggttgggacaatttcagacagtaagtgcctggttgcattgttagcctactccagtagagacggtgagtggtaatcatgagtagatacagtagttgtctggccctaacccatgtgtttaatagaactaatgagtgtactcaagtaaattcagggtgtgactgggtccacggagtccaggataggcatcctctactttggccacctgcaaagattaaccgataatttcaccctgaaaaggagaggagtgccaacagtaatggagaatatgagcattctatttgcctggtggaactcgcgtacatgcggcccatggcacattcactgccttgagcgcacgttgctgtctcggatgtatgtgtcataggttgcacgtccccaaaggggcaaggatgacgttgtgccgatcagatcagtacagataggaagctactcaggacaatgggccaactagactgatcgtattatgctcattacttagtaacctagctttgtttaccgactgttggctacctctacgggtgcgtcctgcgttgaacgtttgtccttcgtgtccctggttctgaccgtgtttacacgtccgtatgggattacgttattgcccccaattccgggccgtgtctgagagtggggaccttgggacctgagtgtgcggtgccccaccagtttccacgtacggttgtgttaacattccctcttgccctgaggggatcccccccgtttaaggggttcgggcggagaaacacaccggttttgtacgggcccggagcggggcgccttatgccaaaa

SEQ ID NO: 657955 - DNA, 1020 bp, Homo sapiens
cattaacttgtggcaagatggcgcagatacaacttgatctacctcgcagtcgcgcccagttctgtgatcggcatctagctcttcccgcgtacttgaagtgcgtctcgtgacagacgggccgactactactacgttgacaacggatatgactcacagagcgtatcagtgggaaccttctatatgggattacccaacgcattggtaggacctctccacgtactggcatgtattacatgaaaacgcccttcatgttctgcatgcatagttccctacatgtcgttggacgagcagctactacgatagccaccaggtgtgtggcaccacacggtgacaccacagctttcagggccacgcaaaccagacaccacagtgtgtcgacacgactcgtgcgacatgactcccagcaaagctaccacagtgcaaattgcctaggtcacaccacggaactggtacggcatcgctccttcggacctactcctgggctggcacaacagcattggctttctaatggcaagcgacactacttctaccgcataccacctctaacacgataatggctacatattcccagtcacgacatgtaggagcaatctacctccaggacgccagccacgaactcactcctcacatatctcgtcacgagctgctggttaccagcaaccgtatagcacaatgctcaaagtttccctactggggcaaagctggcctctgaacattctctaatggccaaattgtgggattgcatggcattggaagaaaccttacaccggttaaaaggagaccatagcataactaacttctggtgagtcctccacctttaacggctctccagcaagagaacactggcattcactgggctctggtgcgtcgttcaagaccccaaggcccgaattcttatagcagcttcttttcagccaaattgctgggctcaacatgtgcgccatcttctcgtacagcgcaacacagagacaaccagcaaaccatatatcacgcagtcaacaacagactgtgtggcagata

SEQ ID NO: 657956 - DNA, 375 bp, Homo sapiens
ctctgatgtcccccgtctccacgacactccttccagaatcattgttcaaagaagcagctggtaatctctgttctgctgcactacctttgaagcttcccactgttagtaggacaaaggccacactttgagcctgcctttaaggccctgatgagctggtccttgtctgcatctcagccttgtgcactgctggtgcagctggcatccttcccctaaacagccaagcaggacacactggggctcagccaggcatcacctgaccactgggaaaataagagaacggggtgaggacagggctggggtgagacctgctgtgaaaattggctggttctgagcccagacattttgcgggtgacctgaaggtcagtcacaatgacc

SEQ ID NO: 657957 - DNA, 847 bp, Homo sapiens
ggactcgcgtcgggtaggcgattcccgtgacgtaggatagtaaggtgggccggtgttctgaggtgctgccttctcgtttacttgttccagcgtcataggcacacgatgcgcgctagtagcgagacgctgggaggagttcatgaacgagtctgccgagaagcttgagtctcgctgaccctatgaatggcgacgtgtggtttcgtgcaaagtataggcattgctgagtgggaatctgtgtagtggttgaagaagtacacagatggatcttagattgggttgtggtggtatagaagtaggaccatagttcaaggaatgtaaacgaaggattggagagaatgccatcagggcgagattaaagtgcgacttactggtaggcaatgggaagccctgcaaggttagccatggaaagctggagtgaatggttggaatagtgaaggacgtttgtcgtgtacgttaggaagtaaatatcttaagaatgagagaacagtgttggggacaggaaagtgagttggatgtaagtagagtgggctgttcatgaagcttagaggtcatttgttgtaaataattctctgttaattactttaggagagctgagggatgcaaagtgtgtgcaggttagaaacgtgtttatttacttggggaaatggatgcaagaacatggatctgtcgttagaaagtggagattattcgatgttgggtacgaatgtgcttgtggtctctgggcaacatgcggtatcaggtaggattggcccagtggagatattacggaaaggacaaagggttcgtcaaatgtacgtcagtcttctttgagacgaaccttgagtgtaaccatgtggcggatcctgta

SEQ ID NO: 657958 - DNA, 491 bp, Homo sapiens
  misc_feature (308)..(308): n is a, c, g, or t
tgttagtttgtttatttatttatttatttttattgatcattcttgggtgtttctcgcagagggggatttggcaggatcataggacaatagtggagggaaggtcagcagataaacaagtgaacaaaggtctctggttttcctaggcagaggaccctgcggccttccgcagcgtttgtgtccctgggtacttgagattagggagtggtgatgactcttaaggagcatgctgccttcaagcatctgtttaacaaagcacatcttgcaccgcccttaaatccatctaaccctgagtggacacagcacatgtntcagagagcacggggttgggtaactacgctttggctgccaaagcgtagtacccaatagctaggactacaggtatgcaccaccacacctggctaatctttgtatttttagcagagatagggttttgccatgttggccatgctggtcttgaacccctggcatcaggtgatccacccgcctcggcc

SEQ ID NO: 657959 - DNA, 220 bp, Homo sapiens
  misc_feature (29)..(29): n is a, c, g, or t
  misc_feature (118)..(119): n is a, c, g, or t
  misc_feature (171)..(172): n is a, c, g, or t
  misc_feature (191)..(191): n is a, c, g, or t
  misc_feature (209)..(209): n is a, c, g, or t
gcacaagtacgtttttttgacaggcatanaattttaagattttttaagtctaagggacttgttcctgatcttcctgaagatctcttaccatttaattaagaaagcagttgttgttcgnnagcatctttagaggaacagaaaggataaggatgctaaattccgtctgtttcnnttagagagccggattcacngtttggctcgatatatangaccaagcgag

SEQ ID NO: 657960 - DNA, 741 bp, Homo sapiens
cgtggtggctcacaactgtaatcccagcactttgggaggccgaggaggcagatcacgaggtcaggagatcaagaccatcctggctaacacgggaaaccccgtctctactaaaaatacaaaaaaattagccaggcgtgtggcgggcacctgtaatcccagccactcaggaagctgaggcaggagaatggcatgaacctggcaggcagagcttgcagtgagccgagatcgcaccactgcactccagcctgggcgacagagcaaagactcccgtctcaaaaaaacaaacaaacaaacaaaaaacaaattaattctagatggcattaaaaacttctatgtgaaaaggcaaagccttgaactctaacctattcctatttagaggacccatataggagacatatcttcaagacttcaggctagagaagcattcttaggacacaaaaagcatcaccataaaccgataatggtagattctaactccccaggtatatcaaccgctaaggaaacccctctgaacacataaataccaggacaactataccaaccactgttccacaagactccctctgaaaactagctcaaactgaaaacctacacctatgctatccagaaccagcataccctaatgtgatcatacctattcacaagcgactgggccacctcatccagccactggaaaggaattgcaaccaactgcgacacaccctcagaacaccattcttgcctcgacaaaaaccaatcata

SEQ ID NO: 657961 - DNA, 534 bp, Homo sapiens
tgattcctttgtctttcttcatcaaaatcatgacgtcttacgctcctcaaaagctgtacctactgctaggttggacaatgaggtgtgagtggggtagacccctgtcgtgacccttggcagcagcgctttggcactacagacagttccaccatgctccttccctgccacagcagccgtgcaatgttccagacccagggcgggggaggggaatggccaataaacacatcaacagatgctcaacttcacttccaacaagagaaatgcagaactgaggtacccttttcatctactcgattcataaaaattataaagtgatatcccatactggtgagaaaatgtcaaatcaggccattttccacactgatggtgagggtacagaccagcatggcatgcagacagtgatctcccaatccttgtcaaaattggccgggcacggtggctcatacctgtacttccagcacttggggaggctgaggcgggcaaatgagctgaggtcagaagttcgagaccagcctggccagcgtggtgaaaccc

SEQ ID NO: 657962 - DNA, 1018 bp, Homo sapiens
atgctttcctctttgactttcacattagatggtttcttctagatctacctcagttctacttgcctttcaatcagcccagattctcctgttcaacttcttatttggaggaccagacaaattcattagctgtccatgtgtttttatttactgtagtgtgggtttccttcttatttatcttttccaatgttttcttttccccttttttttattggcagaagcggaagtttgggtccagttgtaaaccagaggttatggaaaaatgcaggggccattgaaattccaaagggcccagtggaaacacttttgtgcctcgcgcgggttcccaagcgccattttctctggcgtgggcaccccgcgaatgtggggggaacattaatggggcgccggcgccgagcaaccagccttggactaactcctgggctactccaggataacaacacgggcgttcccaccaattgttggccaaaacagagtgctcccaacgacacctcggggacctaagtagaaccagacgcggcaattgggaccaccaaagggtagcaggggatacaacggcgttgtgacgccccaaaaccaacaccctcagatggtcagcggaacaggaccacagtatgggacaggacacaggggaaagacatgaacccaaaggagttggagtgcaacacagccaacatgtgggaccaggaaagccacgcccaccacgggacaaaaacaatcacccacaacgttaagctaccccagacgtgtgggttgtgccacgccgcacgagaacgaacgcagaaaagaacattgtggcggcgcccgccacgaggaagcacaaagcacagtgcggggcgccaccaatattaggatcgtactcagtgccaaggcacggctatagtttggatcaaaaacaagcggggacgacgataaacgagtgcgggtagagtaaaagacgagcaacccgcgcgcggaaagagaaagagtcacagcgcagcgatcgacacagacgaacgagcacacgacgacgcgaaacacg

SEQ ID NO: 657963 - DNA, 932 bp, Homo sapiens
actcgcgcattggaggtcaagatggaggagtacgcgcgacgcttgcccatgcgaattgtgatgactgtggtgggcctttacgatgggtcaccattggttggtgtatctttccacgcaatcacagggtgtttgcgcaattcctccatgtggatgttaaccacagacttacggaggagatgtttgacagggcttaataaaaaccagggctccacagtaagggaggtacccttttgggcagttgggggaggccttggtttcccatgattggacttggacgtatgggtcccacgtgtcaagagggaacaagggaagatcccttgaaaactccatcacaagtgtgtttgccttaaggtggggagccataactggcaggcaaaggaattggccccaagttgcccattgttgggttacagccggaatgggggtggcaatctccctagcttaaatggaagggacgctggatcatcttgtggaccaagagatttgggcttgctgcagcagttccccattgggtcctctcagtgtggaaaagacccttccaatgttgcgtcacttcagtacccttcctcaccttttgtgagaatctatcgaccatatccaggaagcacttccttccctaaggatttttaccaagaaacggagtggtgcttcgggagaggtttcaggacgatccagttaccgtcggtgtcaacaccctagtgtggaccgttattggcatagggtataagggacttagcactttttccaattcaggacacccggcagcggctcaacgcacacgttttattccctttatggctgctgcccaaatttatcgcacggaacagcagtgttaaagagccacggccaacggaaagacttccggcggtgcggtgggtggtcaacaacggcgcactatagggtcgcgaagttgtgcaccgtactgctagaaa

SEQ ID NO: 657964 - DNA, 240 bp, Homo sapiens
ctgcatacatgattatctaaagcgtcataagtctcccccatcccgggatttgtgagcctgccagcgtgctataaatccagttaagagaccagattcattttagttagtccctcaaatacaaggctcaaggaacttacgctggagaaggcacttctaaaactaggggggatcctctatcagtctgaccagtccagcttagtccgtgaggagaaggctgctattgaaccttctagagctagg

SEQ ID NO: 657965 - DNA, 130 bp, Homo sapiens
ctccctccgtgtttcattgcctattggtactgatgaaaaccaaagccatcttaaaaagtgcatagcacagtgcctggcttggttcgggccctcaataaacattttctaaatggttgaatggcctatgcta

SEQ ID NO: 657966 - DNA, 411 bp, Homo sapiens
gtaaaaaaatgattgcttatcggtaacatataaattcagaatcaggaatgatggtgatggcaaccaatccaagttcgtccacatgggtgggcgagaatgttaacacctttgctttctgatggttcagtgtatccacactttgtttcatgccaaaattatttaaaatattgtatgaaattaccttcaggctatgtgtataaagtatatatgaaacataaatgaactttatgtttaaactgggatcttatcctcaagctatctcattgtgtatgtgtaaatatttcaaactaaaaaaaaaaaaaatctgaaacacttctggtcccaagcatttcagacaagggatattcaaccctgccctgcagtcttgattactgtaactgtataataaatcttgaaatcaggtaaaaaaaa

SEQ ID NO: 657967 - DNA, 293 bp, Homo sapiens
  misc_feature (37)..(37): n is a, c, g, or t
tgtgggtcaagtgattctcatgatatagaagttgaanaagggtgatttgaagggttagaggatttggaggtgagaatcttcagaagaattcaaaaattcaattccagggtctaccaacagtgagggactgtgggaagagagaggaggcagggccttcctgtcggtgtccttttaacccattaaaattatgggggagtgttcctcaaggggtgagacacccggggggaggaggggtgttcaagctggaaagcaggaagcaagcccaggagggaagacttgagcagttgtgcttg

SEQ ID NO: 657968 - DNA, 194 bp, Homo sapiens
acgcgtcaagtaacagggtcctaccatgtaagatgaagccagtgcagggaaagcagagccaaaatatggagagacttgaatcctgatgacagcgtttgtgcccctggatccagctgtgcctgaagctagaatatcccctggacttttcagttatgtgaaccaattaatacccttttttgcttaagttactttga

SEQ ID NO: 657969 - DNA, 356 bp, Homo sapiens
tgaagttttgctcttgtcgcccagtctggagggcaatgtgcgatttcagctcactgcaacctctgcctcccgggttccagcgattctcctgcctcagtatcccaagtagctgggataataggcacttgcaaccatgcccagctaatttttgtagttttagcagagacggggtttcaccgtgttggtcaggctggtcttgaattcctgacctcgtgatctgcccgcctcggcctcccaaaatgctgggatcacaggcatgagccaccgcacctggccctatatcctgcttcctatctcgtgggtcatggtgtatggcttttatttatttcaacctgcagttgtttgcagaacatctg

SEQ ID NO: 657970 - DNA, 189 bp, Homo sapiens
ctgctacgacggctggagtgcagtggagcgatcttgtgtcaatgcaagatccgcctcccgggttcatgccactactcctgctgcaggctcccgagtaattgggaccacagatgcccgtcccacccccaatttacttgcaatccagcaagaatatttgaaaaatatatgaatagccgtcgtaggcagtga

SEQ ID NO: 657971 - DNA, 107 bp, Homo sapiens
aggctcgaaaagggggaacggcagacggaacttaagcgcaagagtttgaacacgatgaaacaacgataggctcaccagataccagggtgttaagtcttgtatgtgaa

SEQ ID NO: 657972 - DNA, 300 bp, Homo sapiens
  misc_feature (176)..(176): n is a, c, g, or t
  misc_feature (270)..(270): n is a, c, g, or t
ctggtgtgctgcacccattaactcgtcatttagcattaggtatatctcctaaagctatccttcccccctcccccaccccacaactatcacaaggatacactgttaaagcagcacaaaatgaactaagacacacctaataaaatatatatttactttacagttaaataatgaaagtngttttggattcaaatcattgtaagttttgtaaaataaaaatttgttgtgaaaatgtccttactcagcacttttatttaagaatggaaagtgtgnagacattttttgacaggttaaacagcaagc

SEQ ID NO: 657973 - DNA, 762 bp, Homo sapiens
gtttaaaagtgtgtagcacttacccaccgccaccccagaccccatcttggtcctgctcctgccatatacgacacctgctcctgctttgccttccaccacgagtgaaagctcccttgaggcctccccagaagcagatgctgccatgcttcctatacagcctgcagaactgtgagcaaattcaacctcttttctttataaattacccagcctcaggtatttctttatagcagtgtgggaatggactaatacaggggtagaaaaacaggatcataaggtgtgatatgggccataaaaatattctactaacatgaggctgatgttcataggaaagaacaattatttccccctaattttttttttcttttttgttgcgggcacagaaaattggggaagaatttatgggggcagtgctatttgaacaagaccttgtaatgttcctgtttcatctctgatggtgtcttaattcttcaggactcaaaaatatgtttttctttctcactggaatgaagttgctattctgtgctttctagtgtaaaataatttttaaaatatggataacatttcaactcatttaaaatttgtaggccaggtgcagtggctcatgactgtaatcccagcactttgggagggtaagacgggtggatcacgtgaggccaggagttcaagaccagcctcatcaacatggcaaaaccctgtctctactaaaaatacacgaattatctgggtgtggtagtgcatgcctgtcatctcagccactcaaaa

SEQ ID NO: 657974 - DNA, 191 bp, Homo sapiens
atggaatccagctggtggaacaacgccgtctcatcaccgtgaaactttgaatttactggttcgtaacctgaaaaaaacgccagtatctgaataatttagatcctgtacaaatgctccgaattcggggcattttctatttataactggtcaaaaatgatcaacagttttcgttatcattctttgttatagtg

SEQ ID NO: 657975 - DNA, 389 bp, Homo sapiens
gcagtccagcaaggcacgagtgcaagcttgctcccccttacaccatggttctttaaaattttccagccaaacagctatggtccgcagtagccttcttgcagggcacacggacctacttcagatgggcacacctcatggccaaattcaagtgcaaaccatcacccagcacataaataactcacagcagcaggtcagcgcatgcgcttgccacaggattccaggctacgggagggccccagggcaagtaactgccttcgtgccagttctccatttttcaactttcaaaaaaaatccccttagattcaacatcgccaaaacaagagcttgtggcttttccttttcaaagttatcctcaagactccatccagaaaccagacctaggagtcatt

SEQ ID NO: 657976 - DNA, 290 bp, Homo sapiens
  misc_feature (44)..(44): n is a, c, g, or t
  misc_feature (49)..(49): n is a, c, g, or t
  misc_feature (56)..(56): n is a, c, g, or t
  misc_feature (77)..(77): n is a, c, g, or t
  misc_feature (240)..(240): n is a, c, g, or t
  misc_feature (256)..(256): n is a, c, g, or t
agaacacttaaacgtcttctgcaggtccatttttatacaatctngatangaccgtnatactttctggcttgccacanagcatatctttctatttctgctcatccaataacacatgctgtgccctactgtgatagattttccaaacaaaaatacctggagcagcattttagcataatatgccttcagtggcattcaacagatggagtttccccaagcacagttctgtaagatgtgcgtgtnagagtgtgtgtatatntgtgtatgtgtattttaagttattatttgtattg

SEQ ID NO: 657977 - DNA, 110 bp, Homo sapiens
aggccaaggcagaagtatcagctcaccatccacacggctgacctcatacatcaagccaataccgtgtggcccaagacccccaccataaatcacatcattagcatgaacca

SEQ ID NO: 657978 - DNA, 845 bp, Homo sapiens
  misc_feature (29)..(29): n is a, c, g, or t
  misc_feature (35)..(36): n is a, c, g, or t
  misc_feature (41)..(41): n is a, c, g, or t
  misc_feature (112)..(112): n is a, c, g, or t
  misc_feature (170)..(170): n is a, c, g, or t
  misc_feature (172)..(172): n is a, c, g, or t
  misc_feature (184)..(184): n is a, c, g, or t
  misc_feature (186)..(186): n is a, c, g, or t
  misc_feature (195)..(195): n is a, c, g, or t
  misc_feature (197)..(197): n is a, c, g, or t
  misc_feature (269)..(269): n is a, c, g, or t
  misc_feature (384)..(385): n is a, c, g, or t
  misc_feature (390)..(390): n is a, c, g, or t
  misc_feature (393)..(393): n is a, c, g, or t
  misc_feature (423)..(424): n is a, c, g, or t
  misc_feature (432)..(432): n is a, c, g, or t
  misc_feature (435)..(435): n is a, c, g, or t
  misc_feature (441)..(441): n is a, c, g, or t
  misc_feature (488)..(488): n is a, c, g, or t
  misc_feature (498)..(498): n is a, c, g, or t
  misc_feature (588)..(589): n is a, c, g, or t
  misc_feature (594)..(594): n is a, c, g, or t
  misc_feature (627)..(627): n is a, c, g, or t
  misc_feature (629)..(629): n is a, c, g, or t
  misc_feature (653)..(653): n is a, c, g, or t
  misc_feature (691)..(691): n is a, c, g, or t
  misc_feature (708)..(708): n is a, c, g, or t
  misc_feature (733)..(733): n is a, c, g, or t
  misc_feature (750)..(750): n is a, c, g, or t
  misc_feature (755)..(755): n is a, c, g, or t
  misc_feature (768)..(768): n is a, c, g, or t
  misc_feature (773)..(773): n is a, c, g, or t
  misc_feature (824)..(824): n is a, c, g, or t
ttttttcctcttttctccttcttcactcntttcannctacnattcatatttctttaatttttttttcccttcttttctttctccttcattcattccccccttccttttttcntccacttattttctcacataccaatatactttttatttacctttttaatcttatttanantctatttttttnanacatttcananctaataccaaaccattttacactttctctttttaccaactattctttattcatcttatattactttattttnaccaatacttcttatttccacctttattttttttccaactctttcttcttttataaatatttttccctcattcattacaatttcatttatcttcataaccatttcatatattttnnccttnatnttttttataattcccttctatctcttcaannccccactncancccagntactacattccttcttttcatattaccttaggaaacttcccttcatnaccagttctnttatttatttttttttcttttctttcttcctctttaccctctttttctacacattatattattttttttatatctcttttcctttagctnnttcanttcacctttcaacatctattcttaaaaacccanantttaatctttcatttctttcatcnatttacatccttctcctttattcattcctcttcctttnttttaattacatttatnaacacactacacctttttatttcancctcatttttacacttntgaancgccgccgagctnctatngacttccctggagccaaggtcattgttccccagctgaagggcagggtgcancggaagcgtgttggggtttat

SEQ ID NO: 657979 - DNA, 405 bp, Homo sapiens
  misc_feature (165)..(165): n is a, c, g, or t
  misc_feature (279)..(279): n is a, c, g, or t
  misc_feature (363)..(363): n is a, c, g, or t
  misc_feature (392)..(392): n is a, c, g, or t
taataatcagtcagtaataatcagtcagtaataatcagtcagtatgtttatatgtacagtaataatcagtcagtaataatcagtcagtatgtttatatgtacagtaataatcagtcagtagttatatacaggctcagttccagggtcagtagttatatacagggncagttccagggtcagtagttatatacagggacagttccagggtcagtagttatatacagggacaggtccagggtcagtagttatatacagggacagttccagggtcagtagttntatacagggacagttacagggtcagtagttatatacagggacagttccagggtcagtagttatatacaggctcagttccagggncagtatttatatacagggacagttccagngtcagtagttata

SEQ ID NO: 657980 - DNA, 1260 bp, Homo sapiens
  misc_feature (1260)..(1260): n is a, c, g, or t
gggcgtgcggcaggctgaggaagcaagacgccctccattcactcgtccgtgcccgttctccttggctgtcctccactgttccgctgacccgcccgtggtcgccgatgatggaacgaggccatctccttctgccacatagacttctgtgtgaccatggagggcctcggcgtcgccagtcatctcacaaagactggccgtagtgctccgagtcgagcgtggtcaatgctgcatgcctgcaggtccagcacgccagcgctgcagtatcggcgtacgacgagctgttcgcagggcactcgtgggactgccgttgtcctgtcagtcccccctagtgtatgcacgggtcagttgccttgtgcgctgttcgtggcatggggggactaaaccgtatgcccagaacgtgtccatatcgacttatatatccccacaagctcgtacagcccctccaatcgttacgactcttacacagggactaaacggtacccaacacaggactcgtgcacgtgaggtggggcggatgtgcacccagggctaagcaacggccaaggttagcttgagaaccgggtaatcgtttttgaccgtttgacaagaacactaggggcccattcccgggcacgaggtagcctcgggtcaccagtggttagacaggaccaccttacccacgtaccatgggcatgtccggtagattaacagcccggcgtaggcactttatgtggcgcaatgaaaatctcccctgaccctttgggccattatgtccgcagaaacggattggggcgacaacaccgtccccaacggggcgcacctgacaagaagcccctggacaggaatgtgtttcccgagaaacatggtccctttgtgtgaaacgcgaacctatgctcctagtgctctggatagtggattaccaactccaggagattacaccggacactgaggtcaatttcacctgagggtgtgcgccctaggttaaccccaacgaggaccttatacaaggagtgattctatcccccgaatggcacacgaggtgccgagttcgaatcacacctatcgtaacctcaggcgtgagacgatggagcttaagcataatcccgcagccagatgttacaccgaacttaacctagagatcatagataggtgggccaagatagcattcctccccacggaatctgctcttcaagaggcacatcaagcgtgccatccgatatatggttgggagtcgaaaggcccttgggatatatggattcagagcgaggccagaggaccccn

SEQ ID NO: 657981 - DNA, 226 bp, Homo sapiens
ggcacgagcccctcagagttctacaggtctggcaagtatgacctggacttcaagtctccggatgaccccagcaggtacatcacgcccgaccagctggctgatctgtacaagtccttcgtccagaactacccagtggtgtccatcgagatccctttgaccaggacgactggggcgcctggcagaagttcacggctagtgcgggcatccaggtggtgggcgatgacct

SEQ ID NO: 657982 - DNA, 390 bp, Homo sapiens
ttttttttttacattcatgttctttcataaagaatctcatatcatcatagtaaggccaagggcccaaacggaaaagaaagagaaagaagaggggaatccaaatgaatgtctcctagacgcctcactgcgcacgggcttttccggacatcttccactccttgtcccgaagtttggttcgttgaattttccctgtgacagtcttgggcaggttcaagacaaactctatctttcttgggtacttgtatggggctgtcctgacttccatgctgctgcagctccttggtgaagctgtttctgggttcttggaataggaactgccaaggccagaatcacaaatgccttcaccactctcctccgaacgggtctgggctgctgattacagccgtctca

SEQ ID NO: 657983 - DNA, 936 bp, Homo sapiens
  misc_feature (14)..(14): n is a, c, g, or t
  misc_feature (71)..(71): n is a, c, g, or t
  misc_feature (92)..(92): n is a, c, g, or t
  misc_feature (94)..(94): n is a, c, g, or t
  misc_feature (96)..(97): n is a, c, g, or t
  misc_feature (102)..(102): n is a, c, g, or t
  misc_feature (133)..(133): n is a, c, g, or t
  misc_feature (135)..(135): n is a, c, g, or t
  misc_feature (145)..(145): n is a, c, g, or t
  misc_feature (152)..(152): n is a, c, g, or t
  misc_feature (155)..(155): n is a, c, g, or t
  misc_feature (175)..(175): n is a, c, g, or t
  misc_feature (180)..(181): n is a, c, g, or t
  misc_feature (192)..(192): n is a, c, g, or t
  misc_feature (201)..(201): n is a, c, g, or t
  misc_feature (233)..(233): n is a, c, g, or t
  misc_feature (291)..(291): n is a, c, g, or t
  misc_feature (293)..(293): n is a, c, g, or t
  misc_feature (301)..(301): n is a, c, g, or t
  misc_feature (328)..(328): n is a, c, g, or t
  misc_feature (330)..(331): n is a, c, g, or t
  misc_feature (335)..(335): n is a, c, g, or t
  misc_feature (354)..(354): n is a, c, g, or t
  misc_feature (360)..(360): n is a, c, g, or t
  misc_feature (367)..(367): n is a, c, g, or t
  misc_feature (371)..(371): n is a, c, g, or t
  misc_feature (373)..(374): n is a, c, g, or t
  misc_feature (383)..(383): n is a, c, g, or t
  misc_feature (387)..(387): n is a, c, g, or t
  misc_feature (394)..(394): n is a, c, g, or t
  misc_feature (398)..(398): n is a, c, g, or t
  misc_feature (402)..(402): n is a, c, g, or t
  misc_feature (427)..(427): n is a, c, g, or t
  misc_feature (438)..(438): n is a, c, g, or t
  misc_feature (481)..(481): n is a, c, g, or t
  misc_feature (835)..(835): n is a, c, g, or t
  misc_feature (934)..(934): n is a, c, g, or t
gggggggggggggncgtttttgtgaggaaagtccatataaaccccattaagtagaatctggatctaaatanttccaaacaagagtacacaanangnnaacantctccctcatcccactgatctgctgcttcananaagatcagcnacgttcntcngcatctcatcaatctgagtngcatnntactgctcgcnatctctggngctgcggatgtcgtcattctttacaaagttantggccacacccttccggccgtatcgacctgttctcccatttctgtgtatgttcaattntntgttattngggagatcatagtttatggtgggggananntggngggcatccaaccccctggnccaganatctgtngatntnngcgctcggntggngcccgancggnactncttcatgatggacttccgctctttntggggcatgtntccatgcattgaggatacagtgaagttggcttccctcattttntccgtcagccagtgcacctttcttttggtgttgcagaagatgaccgcctgagtgatggtcagtgtgtcgtagaggtcacacagagtgtcaaatttccactcttccctctccactgccacgaaaaattgcttgatgccttccagagtcaattcatcacgtttcaccaagatgcggattgggtcggtcatgaacttgttggtcatctccagaatctcgtgtggcagcgtggcactgatgagaaccacctgtgtggctggaggcaggtacctgtatacatcgtaaatctgctctttgaaacctttattcaacatttcatcagcttcatccaaaaccaacattttgatagcacgtgtncttaggcttctgcgacgaatcatatcaaaacacgccctggagtgcccgcgacaacatgctgtccgtaatccagcttcctgatgtctcgccacatttggngc

SEQ ID NO: 657984 - DNA, 1575 bp, Homo sapiens
gcatctcacaagtgtgtcctcgcaagtggactactgcttcagtagagtcccgctgacgaagaggagcagttgtgtccggatgatctttgtactggcgtacttatgagagagatcgcagtatgagcgactcggaacgtcagatgatgttgctgtgatgcaccgcgctgcaggatgaacgctgatgtacagctacgagctctggctcctatgtagtagcaggaatggcagtgcgcggttcacctcagcccctgcactcgttcgtcctaggaggccgagggagtataggaccagatcgattctataggctcagaaggcaattcccccaacctttactagctaggacacgttcccaggtaatgcccaagttggatgcttcagcagaagagcagaggcctctgggcgtccgactcctgtccgggccacctgatctggactattgccaggaccatgcttctagatgttccgcaaccgctaaatccgcagagaagtgaccctcacttgtgtacggtgactgcaagggccctgcatgttagtgtgtggggctccctccctggtgggccacacggcattcaacttggacttgtcatcagagagcttatgtagttatccaagtcccaccatcataagcataagaggccaagctttacaagacctttcaccaacaccttgtagagcaaaccaggggttcctggatgtcatccagtgcctagtggggctgcccccctttgagcggatacagataccctaagatggtttcgaatcgctgttcgccaagtactagtggcctttggtgcatctcgaattcgcagccgggctttggccctaactgaagtagccgcggtgcgcagacaacatataatctctatgaaccagagaacacgcccatatccttgaagaagtaactataggaccttccctaagggtttgtctacttccgttccaaacatcggaaggaaataagttggtcctttctcgaacaggggtggagttcgcaggtccgaccatggataaacacaacgtgcccctttaatttacgccctttgggcggttagatataaccgcgcctcatacacccggcaaccgcgcgtgtatcgaacacgggctcctaccatatgtcagcagaagctaggaaaaacagatcgttagggtcggccgaaggtgttctatcattcgcagaaggtagggttactcacccgtgttcccctagggcctccccaggcaaattatgcccgagatgttcctaacgcgctacagagctaatacccgatattatccccctttctgtgccccaaagggaaattacttttcaccacggcgacaaccggtgtgctggctaaaataccccacataaccttgtatgtgtgcatcttagggggccgccccgtattccgcagagagcatgtttagtgtagatccgtaaaacagtctcgccagattatattgtctccacgacaaccgccgcggcaagtgctgtggctacgcatcaccatgttccaaggcgcccttagtgttatcttgcttcgtcgagcaccgtgtgacatcctgaacatgactcgttgcttgatagatgcgctt

SEQ ID NO: 657985 - DNA, 424 bp, Homo sapiens
  misc_feature (407)..(407): n is a, c, g, or t
ctgcgagtgcatttgaggcttaggggtagtcattccatctttagattatccttggacttcagctaccagcacagcatgcattagccttggtcctgtaggttaactgaagttcaaacatcagtgccagcttgcctccatccttttcacatattatgcaggccaattgacatataatttgttcttaaaaataggggcatgaaatatgtgatctggaaagagattgtactttctaggactcttttcccactctatgcctcttgtgtgctgcatgtttcagtatcctccctcaacaccggtgtattctcccagcccaactcagtgtgtctacatgcctacataaattccctcaaacttgtctcttccctggatataggagcacagcgctaaatgaaaaacacgtcaataanaagagctttcatcctga

SEQ ID NO: 657986 - DNA, 385 bp, Homo sapiens
atagcggtccgagatgatggagtggggcatgcgctgcgggactggtgggcagctccgccctcgtccctggcttgggatccactaggcgaagccagctgggctcctgagtcaggtggggagttggagaacgtttatgtctagctggagtattgtaaatgcaccaatcagcactttgtgtctagctcaaggtttgtaaatgcaccaatcagcactctgtgtctagctcaaggtttgtaaatacaccaatcagcaccctatgtctacctcaaggtttatacatgcaccaatcagtgctctgtgtctagctaatctagtggggacttggagaacttttgtgtctagctaaaggattgtaaacggaccaataagctctctgtagaatgga

SEQ ID NO: 657987 - DNA, 382 bp, Homo sapiens
  misc_feature (241)..(241): n is a, c, g, or t
  misc_feature (330)..(330): n is a, c, g, or t
  misc_feature (351)..(351): n is a, c, g, or t
agtaatataggaaaatataccctcattttgatgtggcatctttgtttgaaaagctggcccaattaattaaaaatacttgtaatgaaagtctcgtttcctgagcagtccatatttagataaatgggaaaagacatctatagccagcattttcatagatcttcactgtagactaatgtcaacaacaaaatttaatcatggcagtcttgatattttacagctccacgcttttgagggatacacnttctcaggtcttcatttacatgtgaggaacctgcaacaatatacactgcctattactatggtaatgcggagttaacagaatagagtccntcatgtaaccggttagaacantacttttctacttagtccttcaaggcacaga

SEQ ID NO: 657988 - DNA, 128 bp, Homo sapiens
  misc_feature (15)..(15): n is a, c, g, or t
aaaaggggggggtgnttgggggggaaaccccccccccgggggtgggttattttttttaaaaaggaggggggaaaaatgggccccttttttttttggggggggttttttaaaaaaaagggaggccttca

SEQ ID NO: 657989 - DNA, 113 bp, Homo sapiens
aagtctcctggctttggcctgtgtgtctgcttctcctgcaaacccaggctctggccttgcatcaggcctactcgcacagctggccatgtgacctctccagtgctcactcagcc

SEQ ID NO: 657990 - DNA, 379 bp, Homo sapiens
  misc_feature (13)..(13): n is a, c, g, or t
  misc_feature (256)..(256): n is a, c, g, or t
acggatccccctntatcgggagaagtgcgggttgagaagtaactatccctgcatcctggcagccctgtggcagaagcccctagggacggaggaaatgagagtggcctatgtccagaaatgtaggcccagataatcttgtccaggcatcccctcccggtgtgctgccaaccctcgaagaagcatgtctaggccacgcctagtttcgagaggactgagaagttggaaaaacgaggtactctgaagggaggcctgcgantgctacccgaacactctgccatacaggatattttagcctgggtgttgggcaccaggacccttgcctttgaggcttccgttgttcggtcatgctgctgccccgtggtggccagtcccgagcccc

SEQ ID NO: 657991 - DNA, 1448 bp, Homo sapiens
  misc_feature (578)..(578): n is a, c, g, or t
gagtgtatcttctcaagactgcgggggtctttccctcgggctgtccttccgctggttttagcaccccgtggtggccctctccttttcacgacacgcgggccacactgggttgggcgctcccctagtgagccccgctttgatatatcaccgcgcctgggaggttgtctctatattttgtggcgctcgctcccccatccatatatgatacccctttcgggggcggatggaattttgcctccccgccgcttcctcacaaatggggggagccttctcgtcgttttgtcaccgcgagcggcccaccaatctttggggaagttttcccggtgaaattatcctctgcgaggggtgcataaatttcgggtgggagggcaaagtttagggcgatccccacgggatgccccttgtgaaagggcgctgttgcacccccctcgcccagagaggaagactcttataataaggtgaacgcatagagctgttggggcccacagccgcaacagtattacgcacctcatataacatttgatggaggaagaatagctcctggttggagaacaacaccccagaggtttctttggcgnccacaaatatctcgggaaaaccaccacgagttttttgaatgggcgcccccttcacttcccccaacggaggggattatcccgaacccccctctttttccttcgtgaagagggagtgcctatcccgccccatattaggctttccacaagggcctcgacacgacataatagagataggggtccacctcaccctggggacaccacactagaaattgccgagattagagttttattaagggcggcgctcttccctctttctctgctcgcctttgtcctctgacacagctcgggcgtatacacacccctgcgaggcacacgttgtcgccctctggttgtgctgtctctctctgaggagagtccccggcgtctctctgtcccctcccacagtgaaactgtttctgatgtttgtttgtgcgcgccctcctttgcggcttgtcccgcccccacttttcgcgctcttctcaccacggctcacaatagctctgctcacatattcgcgcaccccttggtcacacacacacgtgcttctccaagcaccacatttacacggggagacccctgagagtgtgcaaacaccgcgttcacgaaaagtcgcgtttgtcgtgttcacatccgctgctattgtgccctggcacacggcctggcgacacacgccctctggctttccacacgccctcgaggcgctggaagaggcccgcaggttatgttgtagttccgcgcttgcgcgtggggctgaacttcctcgttggtttgaagcccccttttgttttgccctctctgggggttttttttggtcccccacggagggtgggtggaacacggtggactggaattttttttgagggccaataaaagttttcactggtgtgtata

SEQ ID NO: 657992 - DNA, 1972 bp, Homo sapiens
tgagagaatcagtagtctggatataatcacaattcttgtacccctcgttgttacctaatgtttcagtctctgtatgctcagtaatatatgaaaaatagtatctcccttgcaagggtcattgtgaagactttgtttatttccacggaagggcctacagatgtcttttctggtatcattttttggtagtgtgtgtgtgtttgtgtgtgtgtgtgtgtgtgtgaatcagcgcctaatagcactatatgcacagaattatactgttcctcctgtagccatgaatgaagatcagaatgctctttttccagctgtactctgaatttattgagaatagatacctgttctgattatgcagtgtatgccaagtgccaagcacagagtagaatttccttagtggatttgttctaggtccagagtgtagcgggcctgcttcttagagactgctttatattcagcaaagtcccaaggtactatattgttaatttataaggagaaaaacatcatgtaggtggctacaagcagtactcaaatctccatgtccaatctgcatgctctgttgtagagtctgtcctacataggtgatcataagcagagaatgtttagaaagcctggagtcaaaccaagaatatgcttttcggacttttgtttatagagcatctgaggctgaccacctcactttccatgtgatacattttatagtcaagccttgctaaccttgaacccattttattgctcttcagtttaagttctgtgaagctgtaattaatccttttcaaaacagctataattctcttattccactctgtcatactcacctgtcaaaacctcagccctggttaaaaccaactattggtcagcttacttagctttggccttctcttttgtcttcattttatttgcaggtgccatctagtcccatgtatttaaatacttcagctggtggctctgaaatttctagcaacagtgctgccctctcctgagctccagacttagatccaaatgtctccttgatggttcatgttggaagacttcaaggtcaaacacatgtacagggttaacatgactttatttttttcaccaagcctgcctcttatgtttgcctgtttgttccatctaaaactctacttttcctggattctttactttccagttgtcttgcatatgatcatccaaatgtcccaaaagtgcccatttctcttcttcaccactaccttggggtccatgccactagtgttttcttgcttgatctgttacagtgacctgactggtctttctgctttcactcctacacactcccccaaccctctgtgtgcaagagcagagcgagctttttaaaataaaagtcacatgccttaggtaatcctcccatgttccactatcttggctcattgaattcctgtcttcaggaatcttgtcctctgccttacctcaacctctcactctggtcttattcatttccagtaatcgaaccccctccctaattgtgtgtatccttctctctgaccatagctcctgtctttccagctcactttctgtagtatcccagatccagtaatccttggatcctactaggaccttcaagccactacagacaggctattacctccatgaccccaccaaagtatgccatgccctcctagtttacggtgtacctgacttagcagccacacctcaacctgggcccctggctgctccccatgtccctgacccactgagattagcaggtcacctaatccatcttccctgtctgctgggccagccaggacctccccttgaactccactgggcccttactggcctgcttgacagctccacttggatttctggtattcttctggcattctttctgacctttacccaccaaactgctcctctcacaatttctgccatttcagtttaatggcaactcttaattattagcatatcctgttggttctatgtttaaagtaaatccattggagtccagttactctgg

SEQ ID NO: 657993 - DNA, 620 bp, Homo sapiens
atactattaaccagcaaaaatatatttaccatacttttcatagatctgcatcagaaaagatcacactgggaaaaagcctgacatatacgctataacaactgcactctactacatccaagatcagaatactgtttcttgctctatttacacagctgatatacctattctaacgaaggagggagaggagtaatgcacaagaaactcaggccaatgggggagcaagaagaaaacgaagaagtgcagtgcatgcgtcatcggtgtttaacagtcagaagcgaaacagttcagaacaaggcctgccctgtcaaaagaagagctaaagacagttatataaaaattaaggtgggctttcagactggctaacacaacaacattccatgagtagatggtaatttatttttgtttatccatttcgttgggagcaaggacaaaaatgtaaatctacaccttgcttatcacaattgccgacaaaagaatgctctgccttttaaaaaagtatcatgatatagtagaccttgttaaccaatttaatatgaggaaaaggtgtccttttcctattcctactcagatgccagtgtaatgcgtttacttccggggggcgttatttaaaacgggtttgc

SEQ ID NO: 657994 - DNA, 767 bp, Homo sapiens
taaattttctagatctccttaaatactatcatttttcactacttgtatcttaactgttaagttcaacattttctataatattaatatgttgtgaaaatttccttactttcttatttgtcccaggttcaatgttttgcagtctctacctcaccctgtgaagcataaacattgtacatgctgtacaaataatacatagttcatgtgcttagagattgcacaatttttatttggttgacaatagctaatgttttcttcttcattttctatttcctgatttttctttatttagtatatactacattatcataaaaataagaacgttttacaaactaaagcaaaagcaaccctaggaataaaatgcacaaataaaatatataaacatacatttagatgtaccatgtacccttgtaatttatttagacatttaattttagtacaattttaattaaagtctgtgtattatctgtcatcatcttagtattttttatataacaaattttgtaaatcaaaaagtctcaatgtcattataaagtatcttggcagaggttgatctccaaggaataatttctctcccaaattatgccaatcagaatttcactctaccataattcttttaatcagtttcagaggaataataaatttcaaaattgttcaaggtacttcttttagttcaagtaccttttgacaggtgtaaaactgtagacagactgatacaaacatattctaattgactcaaaattatatgggacctattttaaaatctagat

SEQ ID NO: 657995 - DNA, 305 bp, Homo sapiens
cgacagtagcaaggagcgtcacccaactgcagccccgatgagccgcaggagggatgtgcatggcggtgggcctgcttcttgggaggggtgaacaggatcacatggataagcgaaggtcctcgtcaacaaagctgggcacgatggctgcccggtcgccttcacgatgaggccggatccggatgaactccggccgcagaaagggagccacatctgtgtcgctgtgcacgaatatccggacgggattcttcgaggagacagaagccagatctttcacctcgtctgtcatggtggccgagcagagcatg

SEQ ID NO: 657996 - DNA, 240 bp, Homo sapiens
aaggcccggggggttttttttcccccccgtttagggccaagggggtttttggggttttttttaaggggcagttgggaaaaaaaggtaaaaggcccccaaccccttgtgaaaattagattggtgaattaagggtcaaagggggggaaacttttttaaatcccaaccccctaaatttttaaaaaaaagggggaacggttttcatggggaaaacttttttgccccaaaaaaaaatgtttttta

SEQ ID NO: 657997 - DNA, 891 bp, Homo sapiens
tgctgttcacgcaagagaaagacagatggatgttaaggttgacgttgtatggctggaatttgaacctccagcagtgtctgacatttgtggaacactctggataatggggacttctgctcaacatggcagtggcatgtaggcatgttagggctttgaaggtggggcattcacattcatctgactgtaaatcccaagggcctccgtttcatgctaaattgagaatctaaggggtaaagcaccccctccaggaccgggttgctcagccttggactagtgctgtctgaccattctctgtgtggggctgccctgtgtatggtgggctccacccatagattgccagtggcaccccctcccagagatgacaaacggaaaatgtctctagacatttgccaaatgtccccttgtggaaacatcccctattgagacccactgctttagccgaagagaaggggttacttacgcgacgaatggggaataggaaaattcccagctgagagaactaagctgtggctcctcagctacctgaacttccttaagttcttaatccccttagaatttcatcttcctcgaatgagccagcgttcttgaaccccactctttttttttggccccccccgaccttccatcctgggagtgtagagggtcgtcagcccgggactcctaaggtggctcttaaggggcactgccatttgttcctcttcaacccccaggttcctggtaataatcccacgggccgaggtattggcatctgacataagacttgtaagtcccgaaagctcttggaggtccccctttgaaaaatggggcttggggatttgaatattccgagaacatcatttagagactgggcccttgtggtcacgacacactgttaggacaatttttttgacg

SEQ ID NO: 657998 - DNA, 880 bp, Homo sapiens
tggtaagtcttagcaggtcatccatggagctgcgtggtgagagtacgtcggggcaggaagggaagccgcagaagctgcgggtgtgcctgtgaggcgccgggtgacggcgaccctttccagggtcctgtttgtctggtgcgtggcccagatgaaggacaatgtgtaacggagttattctgaccctctggttgcagggggaagatgctagctagctgggtgtgcggcggctctatacgaggcacctctgcgtcggtgatgatgtaagatgatgcgggaagatgaaaatagacagttgataacagaatcgtaacgttacgatgtgatccagtctgcaatgcgggcgtgaagaccgtcttaaccaactagccttcatgaccagtttaacaagatggcctgccgtatccttatggtgacagtaggacattcaacggaagacttatgctctacttggcaccaagcattctgtgtcgtctcctgggaccattccccgtccctgacgagaacctggttattcttgcgtctcagcaacgattagtgccggctgtcagtcatagactccctgtcgcgggcgacgcctcgctgccagaccccggcatgacgatcgcacacctctcctcctgtgtaggactcctcggtgggttggccaccgcctcctcctcctcgtcgcctatcctcaccccatcatgcttcgggggactgtcactcctgtacctcgctggtctgtctgagcacgcctgcccgctcctggccgtacgtccgggcctgcctttcctgctctgcattgcgctcctctcccccccggcctgctcccggcaccgtcttcttcgcccctcgctctctagctgcccgtctgccaccgtctcctccctcccgtcgcgcc

SEQ ID NO: 657999 - DNA, 204 bp, Homo sapiens
atgcttcttccactgacctgaccaccccctatagtcctgtcctctgcttcctggtttgttttgttttgttttgtttttaggtcatttccaacagtgaaaacccgaatgctaccttgctttggttttaagaaatgtcaggctataagccattttttggtgctcactggtttctgaacactgaggatagaaatagccactttcata

SEQ ID NO: 658000 - DNA, 148 bp, Homo sapiens
gtgattcctttgtctctaatgctcttttctgcagtttctttctttcttttcttcctactactctactaaatcttactccctcttcccatgtcttagctacttcccagcaaaaaacaccactcccctggcactgctgccgcgttctttt

SEQ ID NO: 658001 - DNA, 328 bp, Homo sapiens
ggggcgactctacaggatcccggcagctatccggttcaataggagtggtgagagtaggcatacttgtcttgtccagtgttagggggaacactttcaactttgcccattcagtatgatgttggctgtgggttcgtcatagatggctcttattattttgaggtacattccgttgatgcctagtttgtcgagagtttttatcatgttgggatactggattttaatcaaagacttttttcacatctattgagatgatacagatttcgtttttaattctgtttatgtggtgaatcacatatattgatttgtgttcattgaaccggatagcttg

SEQ ID NO: 658002 - DNA, 385 bp, Homo sapiens
gcggctatctgcagcactctctctcctggacctgcaagtattcagaatgctaaggcaagcagagttgaatccagatgtcacgaggattacagagttctcatacattgctggtgggaatgtaaaatggtgccgctgtttaggaaagcagtccagcagtttctcaaaatgctagacatagaattcacacagtaactctgtgtaacattccacttcacaggattgaaagagaatagaaagcatatgtctcacacaaaaacgtgtacataaatgccccatcaggagcattattcataatagccaaaaagtggaaaaaacctaaatgcccatcgatggacaaatggataaacaaaatgtggtctatgcatatgatggaatattattcagc

SEQ ID NO: 658003 - DNA, 699 bp, Homo sapiens
  misc_feature (18)..(18): n is a, c, g, or t
  misc_feature (50)..(50): n is a, c, g, or t
  misc_feature (96)..(96): n is a, c, g, or t
  misc_feature (107)..(107): n is a, c, g, or t
  misc_feature (137)..(137): n is a, c, g, or t
  misc_feature (155)..(156): n is a, c, g, or t
  misc_feature (164)..(164): n is a, c, g, or t
  misc_feature (182)..(182): n is a, c, g, or t
  misc_feature (186)..(186): n is a, c, g, or t
tgggctctctgaccagcnccatggcggtgggcaaaaacaagcgccttacnaaaggcggcaaaaggggacccaaaaaaaaagtggttgatccatttnctaaaaaagantgggttagatgtgaaagcacctgctatgtncaatataagaaattatgnngaaagacnctcgtcaccaggacccangganccaaaatggcttctgatgcgtctcaagggtcgtgtcgtccgaagtgagtctggctgatttgcagaatggatagacatgttcgcttatttcagaacatattcaagctgattactggaaagattgtccaggggtcaacaacactggcctggactaatcttcccatgggccatgggattcttacccgtgaccaaacgtggttgtcccatgggtcaacaacaatgggcagcacatctcgattgcgaacgctccacgtttcgatcgtcaaaagactaccagatgggttcacttggctctcgtctggtcctggtagtggcgtcttaactaaaaacacgcaccaatcagaatcacggagaaacctctttatgtctccagccaccaacaggtcccgccaaatccggacagacggcatcgtctggacacatccatggacccggagaggtgcagacacattgcacttgaacgaaggtggtccactcaatggcatcccagacagccttggcaacagacttgcag

SEQ ID NO: 658004 - DNA, 106 bp, Homo sapiens
gatctgtttcttaaagctacagggtttaaaaaataaaaatgagtgaaaatacttgatgtttcttgaaagataaatttaataataataaataaatacataaatacat

SEQ ID NO: 658005 - DNA, 245 bp, Homo sapiens
cttgggcatatcttgatgacattgatgtaaaagtcatcacacattcaacggacacaaatccagcagcacacggacaggttttccaccatgttggggtaggctttattcctggtgcaggtttgtttcaacaatttgaaatcaataaatggggattctacaataattgggcctaaacatggacctattatccaataatcaggaggtttataattaatttcctcaagtaggcctcacgaactaggctg

SEQ ID NO: 658006 - DNA, 406 bp, Homo sapiens
tattaatatccatccatataaggtgttacttcagttttttcgtatttgttgagacttgctttgtgttaacatatgtgttcaatttgggagaaaattccatgatctgctgagaaagtatattccttcgtgtttcagtgaaatattctgtaaatatttcttagatccatttggtttatgatgtcagttagctccagcatttctgtttagtttttgtctggacaacctgtatatttatgagagtttggtatcactatgtgatgttcaatatgtgactttagctgtggtattgttctttttacaacttgagtgtcatagtgcaaacactaatgcatagatctttagactagcaacatcttttttgtggatgcttcctttaatgagtatgtagtgtcctccccgtcgacgc

SEQ ID NO: 658007 - DNA, 239 bp, Homo sapiens
aggatcccccgggcccctcaccctgagatggggtggaaaaggagggagttgctctcaggctgcgtccagcaacagtgccgggggctctgatgagtctctcatcgcttgtaaagcctgagacagctgcctgtgtgggactgagatagcaggatttcttcacacctctccttcagacttcaagagcctctggcatctctttctgcaaaggcacctgaatgtgtctgcgtccctctccttca

SEQ ID NO: 658008 - DNA, 333 bp, Homo sapiens
tgaaatgggacagtaagagctcccccgaggccaagtcctgccgccctcctgccctgctgtggaccccagtgcaactgtgagcatccgaggtggtgaaggggacctcacagcacacagagtgcacggcgctgcagcccaaggagacctcatcagtgtgtcggctctcattttcgttatttttcctattattttctctatcttctgaagtccttatgtaaggaattatggtttccggggagacccattgtgataaatgccggaaaacaaaagcttttttccagggcgctgaggcctgtggatcctcccaggccctggtcatgctcctgtgcccac

SEQ ID NO: 658009 - DNA, 1091 bp, Homo sapiens
gggcggcggcggcgcgggcgccggacaggaggagaagcggatgagatcgtggggctcaccatgcgtcccccgatgtgcttctagacgtacgctgatggtgatgttgagatgttcatgacacacacaagaccgaaggcatcgcaccgacggctctgtccttgacccatcaaccatgacatccatgcatctctgccagaggcagcatggtccgcagggcaccatgtgggcccagacagagtgacagcacgagaactgtgctgagaacgacgacctggccaccagcctcgtcctggacccctacctcggtttccgcacccataagatgaacgtcagccctgtgcccccacctgcggctgacagaagaatctgcgctcagcgctggaaactttcctgaggcaagcgggacctggaggctgcgtaccgggccctgacgctgggaggctggaaggcccgctacttccagagccggggcccgcggcaggaggctagcctcaagacccacgtactatcgataagctccgtgacttcctgcctggaaagtggcttaaccatcctagcctagcaacgctgctacctccatggagaccaacggggccaaagatcgtgtccactcgtgcttgggacaacaagaatgacgaagctggagctgctggtgggctgctttgcagtagcttgcgggaggcacgctgcggggctgcatgcagggacagatgcagactgacttccagacgtcaatgatcatcaagcctgcaagcggactagatcacctgttgctgcgcccagacgcatgatcaaccatgactgcaaccaactgacagttggtgcttgcaatggaaaggacaccgagtgaaggtgtctcgggaacttgttagcgtgggacgaggtggactgtgctaacggaggagggatactacgtgaggaacacaagagacaggagatggcacaactctagcagagcagtgagtcagggagtacaacatggccttggacctcgcttcatccgggcccgtatatagacaaggttgacaacgaggggtgatgatgtgtgtgtaaagaccattgacaaccaggaacctcggagacgtcatagc

SEQ ID NO: 658010 - DNA, 438 bp, Homo sapiens
  misc_feature (422)..(422): n is a, c, g, or t
ggcaacctctacccccgcgggtcaagggattctccggcctcagcatccggagtagctgggattacaggcgcgcaccaccaggccgggctaattttggttttttaagtacagatggggtttggccatgtgggccaggcgggtctggaactccggacctcaggtgatccacctgcctcggccccctgaagggctggggattacaggcatgagccattggcacccagccagatctagaccttttaaacaattgccttggccagtgggctggtggtaaagcataggggacatggggcatgggagagacacggcaggaggacagagcttggcctccgggtggccaagcttcggctcagcaggctcctgcagctggggaggcttctcggggagcatccagaagccaccggtttcttccagaacccggnttgtgtaggtgcattt

SEQ ID NO: 658011 - DNA, 86 bp, Homo sapiens
  misc_feature (14)..(14): n is a, c, g, or t
tcggcaaggcgagntatgaagaccttgctttagaaatcttcaccaaacatacttcaaaagataacagaaaacctgaattggaaagc

SEQ ID NO: 658012 - DNA, 392 bp, Homo sapiens
gggaacacatctccacttagctcacctactcagcctgtgcagaagacagatggatcttggagaatgacaattggattaattgtaaacttaattaactagtgattccaagtgcaggtgctgtttccacatgtggtttcagtgctgagcaaacgatacgtctgacaactggtttgcagttgttactgagccaggcccaggtttgttctgttctcacacagtaaatcaatcactgtgacatgggttttgcaaaagagagaagaattattcacaaggctgtccagtgaggagatgggagaatggctctcaaattcacctccccaaagatgaggcttagagagatttataggttagagaagtagggtggtctgaggcatggggaaaggtgattggca

SEQ ID NO: 658013 - DNA, 197 bp, Homo sapiens
ggatccctgaaaggcaggatgagaaagtgatcctggaaaaacgcgaggttaactatgaacaagaagaaagagtcaatagcagatctaaatccacaagaggctgggtgtggtggctaataccttaactaccagcactttgggaggccgaggcaggaggatcacccgagcccgggaatacgagctcatgtcatacatgt

SEQ ID NO: 658014 - DNA, 152 bp, Homo sapiens
acggtaagcacactactcctctgataggcacaatcctctctcttctgcttgaagttgtaccttgatgtgagattcgctctatctcccggaccccgtaactcggccgtcgcggtgatgcgcaggaagaagcccccgtttttgcagtacagccg

SEQ ID NO: 658015 - DNA, 162 bp, Homo sapiens
gacatgatacaagtcagctctgtaccgatctctagagcagctagccaaagcaccagtttgtaaaggactcttccgtcagagatgggaaaaccattggggaggactatggacccatatgggaattactacctctcagggccgagaggacacgaatgttcagga

SEQ ID NO: 658016 - DNA, 1746 bp, Homo sapiens
ggagcgacgggctgtcggcagaccccgaggttctcgtgtgcgctcagcgtgccgccgacgctagtgagtgccgcgctcctgccccgaataccatgaggcccctggaaagccttcctgctccatgctgctcttgtggcgctggtgcagcatgcatggcctgtggcagtggtgcctgatgggcccctggaccgagggcattcttctaaccagcgaaacatgccagttgacggactgacacgacggacgcgacgcgacggacgcgaccgactgacgtgactgaccggacacgaccacgcaccgaccctttgcaccgtcacaccggacacgacacacactggaccgctctatgggtacactacaacctgacctgccaaacaccctccatgcgtaaactccccgatcggacctgaccaaaaaaggagcaccacgaatgtacatgccatggtgaagaatgtctacactggccgtcccacatgagctgattggcaccgattactgcacacgacaagacatataggcgctacccgcgcaaactactggataccaacacattgtccccacaccatctacttgcgcacgcgaatacaacacgcattccctccccctcatctacccctcactacgggccacaaggaactccgaaactgggcgaccccctacaccaacggctcgtagggcggccatgggaaccaacggcccacgggaccacacgacgcgctgcacgccgcgcgctaacccaacagccaccagctcacaggcaactcccatctaaccgaacaccgggagggcgaccggaccatggcaaagcaacccaaacagacagggcgccaaacccaagaaaacaccacacagagggaaacgaccaccgttcggtccggcccacaagtgcgcaccagaaacgcacacgcactccgcccaaggccgcccccgaacccactgcgcacggccccatcgccaccatcaacgcacaccatacaaggagcgcaggaactgatacgcaccaacgaggcacacaaaacccagcacactgcagacggccggcggcacaagtacgtgcccgcccactcaccaccaccacacgggaggaacgctcgcactggaccccaacacgggccacggacccacagtggacgcaaacacagacgacacccacgacggctcgcgcaaagcgggccgcaccaccgaacagactcagaacagcacagaaacgtcccacccaatataccgccaggccacaaaacggacgaagagaccagcagagccaacaaagaagacaaagagcaacagaacggcacagcacgacaccccgcacacccacgccacccggaccgcacgaccccacacacaagccacagacaacaagaacacacgcagccccgaccagcaccaacgaggacacgaagagaaacaacggaccaagaacagcgggaacacgccaacacaagacaacgaaccgcacagcacgccccaccacccagcacacacagcacaacaaaccaccgagccaacgaccgaacacccaccccacaaaccaaccaaccacccgaccacacaaccaagcagagacacacacaagaccagcaggaggaagaacgaaacaacagaagacggccaccagcaaaacgcaacgaacatagacacaaagacaacgacacgaacgcacaaaagccgcccaccgcacgcatcaacagcaaccaccacccagcgcccaccccagaacaccaccacacacgcaccacgcacccc

SEQ ID NO: 658017 - DNA, 668 bp, Homo sapiens
  misc_feature (259)..(259): n is a, c, g, or t
taacctacaatgccaatccaaggttcccaaatcgcccgcacatcctggaggggcctgtagtcagacggtttggtactgaggcggaggtttaagaaggtgttttgcgactgttatccggaagagtgctttgaggagtgtgtgtggccggatacggacttattgttaggagacggtctaaacctttcgtctaagttccctcgggaaggggattgtgggttgactgctacacctctagcggcagcgaggagacgtttgaggnaggcggggtgtgtgtggcgtgctgcttaagaacttttgtatttttattacgtttgtatttttacgatcggtataggttcttgcaggtatgcggcgcgggctatgtaggaccgtaggaagggcgagaaaaccgggaaataaagcgaggggagcgttacgatgtaggaaggaactttaatttactcgggataccgaatatgaaagtaggcctctagcaaactttctacccggagagtagagtagagacctcctcgccccgacgagtatccgagactagtttgactacgagactctctatatcttttactttgggagggggttaccgacgctcaggcctcgtcgaccttcccgttgcccgcgtctatggttaatgcgctttaggttttgtggctgtacgcgtcttttagttt

SEQ ID NO: 658018 - DNA, 436 bp, Homo sapiens
ctaccagagacatgccgggagctggacttcatcagcagccttctgaaaagccacccagtgcgagagctgaagaaaagcaaggggagccgaagaagcctgagcagccgtttgcagcgccttggtcaccagccggcccactcggccaagaaaccttacaaatgcgatgactgtgggaaaagcttcacgtggaactccgagctgaagaggcacaagcgagtgcacacaggggagaggccctacacctgcgtggagtgtggcaactgcttcgggcggcagtctaccctgaagctgcaccagaggatccacaccggggagaagccctaccagtgcggccagtgtgggaaaagcttccgccagagctcaaacctccaccagcatcacaggctccaccacggtgactgagagcagggcttcccgctcggctcacaaggaggat

SEQ ID NO: 658019 - DNA, 152 bp, Homo sapiens
aggctatggacttctggagaactacagccatctattcccagctgtccctcagtggctgcactgcaccctttacctgcacctccttgttgcttgagcctccagaaggtccaggtatgccagaaggtccaggtatgccagaaggtccaggtatg

SEQ ID NO: 658020 - DNA, 310 bp, Homo sapiens
gggggggtttccccctttcccccccgggggaaaaaaaacccgggcttttttttttggcccgggggcccccggatttaaaaaatttgcgggattccctggggggggggccctttaagccttttttaagggggttttttttggggcccccccccctttaaaaaaagggggtttaacccccccgttttttctcggggggggggggtttttttaaaatttgcgggggccccccgtttttccacccggggggggggaaatggggtcccccccccccgggccccttggggcccccccctaaacccttgggttttta

SEQ ID NO: 658021 - DNA, 1202 bp, Homo sapiens
  misc_feature (451)..(451): n is a, c, g, or t
aattgtaccgatagattggctggtatgatgccggtgcatcgggggggcccgggagcccctgtatgcgccttggcaattcgagaatcgcgatgttcttccagcgaaccgttaccgggagatgaccattcaggcgctcgagggtcgacgcgccagtggacaggcagtcgagagagactgtgagaccgccgagagactccacggatagcaaaagcggattgcatacaccgaagtgagatgcaccggctcactcatatgtttcggggcccagagtcaaggcttcgagaagagaactgttgcacaggactctacttttcctcgtaggtaagcgaagcattctaatgcatacgtgacgttccgcatgccctcgattacatggggatactcctaggcaggtactcgaattaggagtttgggcttaattcgcctaggaagtcgttccctctttcatacnaagcgcatttccacgcgggttttaggaaacgcaatttaatgccctgggttagaccgattgagaagccacgcaagcctcggatgaaccgggtccgaagacagaccttagctcgaaggggttctcccaaagtgactcttaatgtgccattgctatagtaccggggcggatacctcaaccaacattgggagcccaacggattcaagggtccttcgagtgcgtggtttgaacaagtgtgccattacccaaagggtagaggatagggaatcgaacccggcccaacatccctggttgcgtggaaccctaatcaaattcactttgggacgcaaagagccagtctttccaaactcgtggtccaccccgtgggctgctaggcagggtctttgacgtgaggggggacacctagagaagtacgtggtacaggccgcccagacactgttgtacccgtttgccagaaggctgaacaggtcccggcagggcgggcattactgctgacctgggtaacgacccttcaatccccggggaacccgcaagagggactcctgggcaattcagagcataccggaatcccttgtgcggttacgaaaagctagggtcattgattgggcagggactcgcatgacgtgcgtaaatgcgctcaaacccgtggtgtttagcataggccaatcctgtggaccaagtttctgccagggacacgcgtttggaagcccatatcttatgaccttatacaggtaactgtaaccccgaccttctg

SEQ ID NO: 658022 - DNA, 110 bp, Homo sapiens
ggggagtggaaagccaacgaccagcagatcctcccgacctcagacggttggctgtccctcgtcccagcctgttacaacagagcctgccacgagctatatgccctgacacg

SEQ ID NO: 658023 - DNA, 312 bp, Homo sapiens
atagaaattcctaattgtagcctattgaaatcctcactttcctattcttttaaagatgtttcaactcaagtgtttagatgaaacaagagaaaggatgataaattattattttaaaaattgatggtagcaccagttagatccataacagattaaacaaggtattacatatatcacctatcttacttcaaaatttaatcttaatttaggtaagaatatagctttaagaaggcatattttggatgggaaataacattcatttgcctactgatatgtccacataatatttctgataatgcatgtatcagactaaat

SEQ ID NO: 658024 - DNA, 102 bp, Homo sapiens
gccacataattcattaaaaatgtttttaatgaattatgtggcaattccaggaatgttctcaaaatgaaatattcatactttattaaaaacatttttttaagc

SEQ ID NO: 658025 - DNA, 433 bp, Homo sapiens
tgaacctgtgtaatgctttaccttgtttacagtttggcaaagttgcagtttgttcttgtttttagtttagttttgttttggtgttttgatacctgtactgtgttcttcacagaccctttgtagcgtggtcatgtttgctgtaatatttcccactaattttcttgctgtccacatcaacatcttaatcatttttttatattgatctctaccttccccatgctttgcccaggtccattttcttttctctcattcacaagatgctttgaaggttctgattttcaactgatcaaatctaatgcaaaataaaaaagtttgtattcttcactattgagtttcttctttggtaaactatcactattgagagatgggataaacctgaatgtataaagcatttttttgtcaataaactgccttttgtaaggggttttcatat

SEQ ID NO: 658026 - DNA, 114 bp, Homo sapiens
ggtactctagtttatcccgagtctgctcggacgatgttgattacgggctggcccgcagcagcacattgtggtctgacaggctacccactagaatgtctagggtagaagttctca

SEQ ID NO: 658027 - DNA, 694 bp, Homo sapiens
ggtgtttctgtcgccgtcgccgcgtttgaggtcacctccgacggctgcgcgtcggtctacgggcgagcggcccatccgcgaaatatcacatactttgcgcaccaggctcaattacgcgttagtcaagctgcaaaatggatggacggacaagacacttcccgaactggagacggagcttgctccagcagtgcagacgccgccacgtcgctatcacaacatatttccagatagtgcagacgcgggtacttccgcgcatacagcgtttcttcaggcgctcggaggccacccaccacgggaggaggccacggctgtcgaaacactgatgctattgtcgtcgcctaccaagaagcaacaacaccgacccgtgccggcgacatctgctggagaacccacggacgaaacggagcccgagtcggataccgaagtggagacgtcttaatgtggtagtacgagttttttctccgcaatctcggagttaatgcagccgcgcccgctgctgcaccctttagcatatatataaagtgcgtaatgtgcgtgctaaaaaagctcactagtgcgtactctgcttatctctgcgtatccgccgatcaacatccgcggctaaaatggaacagaacaggttcaagaaagaaacgaaaacttgtagcgctagctggccgcgcgcaccgcagtcgacgctgtgtgcgacagatcg

SEQ ID NO: 658028 - DNA, 157 bp, Homo sapiens
cagttgctttgaggcgcctccacgtctttacacacagctgactgaactccgacattccattttcccgaagtggtacatctcagcctttctttgactccagataaacatgaacccttggtggctacttacatagcagctcgtccccaattcggctggc

SEQ ID NO: 658029 - DNA, 112 bp, Homo sapiens
gtgcatgtgtgcggtgatttagaggatccctcagcacatggaggatgagatttgctcctggcacagagttggaaataacactggcttgagaaaccgagattccagtctcagg

SEQ ID NO: 658030 - DNA, 410 bp, Homo sapiens
ggtcttgtgatggaatccaatcttccaaagtgcgaagatgagcacgattaacagcaacaagccgtcaaaaacactcagcaggatgacccataatggcactctgaccggtagcccatctatgaatatccgaaaaacaagctctctttttagattgctgctacttaaaaccagagaagcatttacactccgaagttctcccctaaaagtaagatttaagctggaaaaataagattttataaaagttggtttccacaagataaacgaaacattgacttggctgatgtcagaagaagtgagattacatgtgatggtagcaaatttacatgtattgcagaccagaattgtgcctcgtttgagatggtcagttgatgtagtcattttctttccaaagtcgatactgaaaggatcct

SEQ ID NO: 658031 - DNA, 403 bp, Homo sapiens
ttatgttctacccacctgctaggcccttcccctctggcagcctcaggccagccaggagctccctcctgtggctccgagcacctcctgacacctgagtgagaccctgtccaacccccctccgtcctcaggacttctggtgaccagccactgtccccagaagccacgccggacagtgtgccttctccactcccctctgacttctccagggtgggctcgttggccatgtgccccccaggatgctccagcctcaactcagcccatgcgacctggacggatgaagatcatcatcctatcagggcgatcaatgtgggttgggcaggacgttgtggtcttcaggcttgcttcgtgcgttcttgcttttgtcattgtccccctgtcacgtggggggggggtttaatttggt

SEQ ID NO: 658032 - DNA, 236 bp, Homo sapiens
  misc_feature (9)..(9): n is a, c, g, or t
  misc_feature (24)..(24): n is a, c, g, or t
  misc_feature (126)..(126): n is a, c, g, or t
cctagacancatactacgaccctntctatacaaaaaaaaacttctctaaattagccggatgtggtggtgcatgcctgtagtcccagctactcgggaggctgagtgaggcaggaggatcacttgagnccaggaggttgtggctgtagtgagtgatgatcatgccactgcacttcagcctggaccacagagcaagaccctgtgtaaaaaataaaataaaaaacagattgaatgtcttt

SEQ ID NO: 658033 - DNA, 337 bp, Homo sapiens
gggaacacagtgagcgcggaccacaattcagatgtgtatgcgcacgatgagatggggcacccagagataggagatgctattggccgcgtcaaggaggtgctggagtgcggcattggaggcaagtgtaaccgcggtttgacggtggttgtggcattcccggagctgtgggagccaagggaacaggatgctgttaggctccagagggcccggactgtgggctgtggtgtggaactgttgcaaggtttctttctgtggggagatgacatcatggattcattccttacccgccggggacagatctgctggtatcacgccgggcgtgggtttggatgccatc

SEQ ID NO: 658034 - DNA, 194 bp, Homo sapiens
cagatatttgggcaccaagagcctacctgctaaccctccctgtatctgctagacttcgaagcagcatacccccgatcccgatacgaccaagctcatacacctcctatgaagaaaacttcctaccactcaccctagcataacttatatcatatgtctccataccccttacaatctgtcacatcataatggggcac

SEQ ID NO: 658035 - DNA, 324 bp, Homo sapiens
taggccacatatataatatataaataatatatactgtgtgtcttatatatcatcaacaatatatcataagtatagtgtatgtaatagtatatattatctttaatatataaacataaaatttacatacacaaattaaattaaaatataaatatattcattgtgtatataaaatatagctattatatcacagtatacaatttcaatagctattacaatatgcacaggattacatatactgtacaattaatattgtatatatgtataaataaaagacatacacatatatatatatcatgtgttacttaatgattgggtcgtcacaga

SEQ ID NO: 658036 - DNA, 758 bp, Homo sapiens
cataacttctaatcctgtggctttaggcagtttagtccacaggacaataaggaggttgtttgggaaaggactgttatgtcatgtttcgaagctgaacttaaactaggttcctcccaaagttcattcggcctatgcccaggaatgaacaaggacagcttggaagttaagagcaaggtggagtcagttaggtcaaatcgtttttcactgtctcagtgtaattttgcaatggaagtttcataactttaaatcatgactatcacagtttttataaataatctaggtaaacaattaataaaataactaggtaaatgtaatgggataaatacttatagaccaactggacataatttagaatataaagtcatattaaattaaataatagataatttattatttgggtattttccaataaatatatcttgtaggaaaacatgttgcttaaaaaaaagtgtgtccttttttaaaaaaatggtgaacaagtttgtctaattcaaagcttattaaaaggttatatataaaacaaggtaaaaggaaccagaaaagaaaaaacaatgtaacataaagttataaacaataaagaatttttctcaaggttaaaaagctgaaaaagaaataattttatataagaaagaattttatatggtacatttagtcctaaaataaaataactggttgtttaacaaggagggatgttcaggagaaacagaaagtccagcatgtcatgaacattgggtaggtcagatagaatatatatataa

SEQ ID NO: 658037 - DNA, 250 bp, Homo sapiens
ccttcagccttcccgagtggctgggattacaggcatgtaccagcacacttagctaattttttgtatttttagtagagacagggtttcaccgtgttggccaggcttgtctcgaactcctgatcttaggtgatccaccttcctcagccttccaaagtactgggattacaggcgttacgaccccactttgaccttaaaccctgcatagtctttactttgaattgcaaatattcattagaatcttggggacaga

SEQ ID NO: 658038 - DNA, 772 bp, Homo sapiens
tttggcgacatattgttgttgtgcagtgttgatggggtggtgccgtgttcgcgttcgctgtctgccgggccccgttaaccattggtctccctcgacgggcagcttgcggccccaatttttgcactataccagtccttccgcggaattccggatctccttcgcgggtaagtcccagacccccccctgtccagcaccgggcgaaccgttccccataagtttgcgtagaatgacccgccaataaatatgtcccacggggagatggaagttttccgcgccttatattgcaggctacccaaccttcgcatagattacttgaatactttgcaggagagcccacttagaccccgaaccggcggctccttaggaccgcttaagagcacccccggtctatgtagccaaataatgggaagaattataggtagaggcgaccaacctaccgagccctggtgataactggttggtcccagatagaatctttaggtccaccgttaaatttgcccccagaaccctctaatccccctgtaaaattaactgttagtcccaagaggaacagctctttggacaaataggaaaaaaccttgtagagagagttaaaaattttacacccctagtaggccttaaagccgccccccatttagaagcgttcaagctccacaccccctaccttaaaatccccgacatattactggactcctcacaccccattggacccatctatccccccatagaagataatttatataatacagaacattttcctccgcataacctc

SEQ ID NO: 658039 - DNA, 184 bp, Homo sapiens
tatatggcattggatatgatatggaaattcgcggacgagtgacttgccaatggacacagtgagaatgcagcacagccaggccttggggataggagagtgggtccagagctcgcccttctacctcaaggaggcgaggaggcagcatgggggctctgagtcacattgggcaagaaacaagcaagaa

SEQ ID NO: 658040 - DNA, 253 bp, Homo sapiens
tcaacgccttgctgctctgcgtggcgcagtgtgccatgcctgctcccttttcttgtgtcccagccatgcagggccatccattgtgacgtcggccgcccaggctggacaccctctgccgagtcatgcggtgtgtggctgggcccttctttattctgtgttcatggctcacctgttcacactgggctgggtagggtcagggtgtactggctataggggggggtatatattttcaacagcaaacatcaatcatcct

SEQ ID NO: 658041 - DNA, 278 bp, Homo sapiens
gtgggtggtgaatgcagtctacggcagtcggtgcgcagctgtgcgggaggacttcaaggatctgaaagcacagctgtggtaacgcggtggacaaggagatctcgccgggctgaatgtgacatctacagctatgacccagacttggagtcagatccgttcggggaggatggtagcctctggtccttcaactacttcttctaccccatgcggctcaagcgaatcgtcttctttagctgccgttccctcagtggctcctgctatacaccctcataggccgc

SEQ ID NO: 658042 - DNA, 1196 bp, Homo sapiens
  misc_feature (488)..(488): n is a, c, g, or t
ggagagagagagactagttcgagtttggtttttttttttaggcagcttagcttaagatatttattcaaggctctcactttgggcctcggtgtgacccagaaaaagcggataaagcagggttaggagccacatgtgagtgcattcctttcaggccactgtgcaaccttccagagagggaccgaggtcttcttcgagaagaaatcttgcgtccgtgggtggagtgacgtgactcaagcgcaataaccatgtgggagaagaagctccgtgggcttcttccatttctcctccaaatcgacgtggaatttctcgcgtgagagagttcagtgcacaattcattgtggatcgtggttcccgcggtcaaaaggtatctccaacagggccccgacgacgagtgttctcccagacaagtggtctccagtgtggcgtgcacaactccaagagccaccttctccgcagtgtggtctctcacaagcccaaacaccgtgganacccctgtggccttatcgtggagcggaatatagcgagggaaagcctcattaccgagggtgttagcgaaatctcgaggggaaccacccgagaaatgcgcataaagtgtttcatacagagtgtggggagagaactcacaatcttgcggggagacacgctattttacagcgccaaacaaaaaccccgtgtgttttgttgtggggaggctccaaagcgtgtccaacacaaattccccatctcgcttggggaaaacacacagcacttgtggcgcacccttggtgcccccaaacatagacgctcatcacaggattagtaggcgccatggtgggcaaagaactcctgggggaccactctcgggcgacaaactcttaacacgcgggataccccaaagggggcgacatgggggtaaattccctggaaaaggccccagtggggagacacggacggggcgacaaaggaagaaggttccaaattaggaacaacgcccaggggggaccaagctgtctgtgagctgggtctcaccccacgcgggggtgccccccaacttcacacatggggtgcgtctagacacgtgtcgtgggtgcaaccgcccaagaaggcatcaaggggacacgcctagagagacaccccaacggggggtgcggcccccaagaaggaaggagctccggaggaattatctaacacacctttgagatccctacacataataa

SEQ ID NO: 658043 - DNA, 247 bp, Homo sapiens
agatctgaatcttggatcagcgatcctcccacctcaactcctaaaagtgctgggattacaggtgcccaccaccacgcccggctaatttttttgtattttttagtagagacggggtttcaccttgttagccgggatggtctcgatctcctgacctcatgatccacccgcctgcgcctcccaaagtgctggtattacaggcacgagccaccgcgcccggcagaaatttctctaggatacagtagggaga

SEQ ID NO: 658044 - DNA, 119 bp, Homo sapiens
gctcggcccggatgtggagtctcagagctgtcagaaagaataagactgattttatgggaaaattaagcagatgctccagtttgagaaacatggatctgcgatctgtttgtggcacagca

SEQ ID NO: 658045 - DNA, 295 bp, Homo sapiens
cgcctggcagcccggacttcccccgacatgtgatcggcttccagggagggcgggaggcccgggccgttcccccgagcctttggggaagcttggccgtcccggacttgacctcttcggggaggagccaaccaaaggccaaaaattcggcccttgcccaagccttaccggttccaagtttttgtttctctccacgcggaaaaaacctgggggccccgagggaaatggcattggcaaccttttcttgagaaaactctaaccgggcttaaccttttttttcaaccccctctcctgcatc

SEQ ID NO: 658046 - DNA, 814 bp, Homo sapiens
  misc_feature (63)..(63): n is a, c, g, or t
  misc_feature (300)..(300): n is a, c, g, or t
  misc_feature (309)..(309): n is a, c, g, or t
tcctacgtccctccgggtgattgtaatagagcgtcccgacgcaccatcacggggggccagganagacgcttcgctcccgaggcgaagttcactggtgttgtcaccacctggccgacactttcctccttcctttgaagatgtgcgagcgccttcttgtgccggcccacaatgagcacacagaggcgtatcacagaagaccctttgttgcccccccctcccacgacgatctcgtcctttctctccttggaattgagggcgcgtcatcaccatatggggggccttgtcgtttctggcaacccnccagggagngccctaccacccacgcgtgggtggcgccccacacgccgtgtcgctcctgccaccgtttgcgactcgtgaccacctaggcatgctgtgggcgacaggagaccccgggccacacacagttgttttcgtccggagttgctgccacgagaagttgtgtgagacgacttgcgcgggacctcccacaggagacaacttgtgcaccacaggcctcggacaagagacgccgcacctccgtcgttgtttcgcgctctccctctcattggacacgacctcggcctttttatgctgtatctaaaaatttgtgagtgaagttagagcgcagcgtcaccttagcacgctcactttgagggcatcctattaaacaccccccactcgtttttttatcgtttcggttttagcccaaaatggaagttagcactgggctccatttttccccacccaaatatttgatttttgcttttagggccccctttccatcccacaaaaaaaaggggaaatttggcttcca

SEQ ID NO: 658047 - DNA, 877 bp, Homo sapiens
  misc_feature (1)..(1): n is a, c, g, or t
  misc_feature (85)..(85): n is a, c, g, or t
  misc_feature (112)..(112): n is a, c, g, or t
  misc_feature (164)..(164): n is a, c, g, or t
  misc_feature (186)..(186): n is a, c, g, or t
  misc_feature (232)..(233): n is a, c, g, or t
  misc_feature (237)..(237): n is a, c, g, or t
  misc_feature (245)..(245): n is a, c, g, or t
  misc_feature (266)..(266): n is a, c, g, or t
  misc_feature (269)..(269): n is a, c, g, or t
  misc_feature (272)..(272): n is a, c, g, or t
  misc_feature (283)..(283): n is a, c, g, or t
  misc_feature (293)..(293): n is a, c, g, or t
  misc_feature (298)..(298): n is a, c, g, or t
  misc_feature (303)..(303): n is a, c, g, or t
  misc_feature (309)..(309): n is a, c, g, or t
  misc_feature (311)..(312): n is a, c, g, or t
  misc_feature (314)..(314): n is a, c, g, or t
  misc_feature (316)..(316): n is a, c, g, or t
  misc_feature (385)..(385): n is a, c, g, or t
  misc_feature (389)..(389): n is a, c, g, or t
  misc_feature (419)..(419): n is a, c, g, or t
  misc_feature (428)..(428): n is a, c, g, or t
  misc_feature (437)..(437): n is a, c, g, or t
  misc_feature (443)..(443): n is a, c, g, or t
  misc_feature (446)..(447): n is a, c, g, or t
  misc_feature (623)..(625): n is a, c, g, or t
  misc_feature (627)..(627): n is a, c, g, or t
  misc_feature (631)..(631): n is a, c, g, or t
  misc_feature (639)..(642): n is a, c, g, or t
  misc_feature (644)..(644): n is a, c, g, or t
  misc_feature (670)..(670): n is a, c, g, or t
  misc_feature (857)..(857): n is a, c, g, or t
nccaaacaaaagctgcttagttatttattttgcatttgcattttgtaggaagtgagaaaaaaacagctctattgggactcaagtntattttcaattaaaatccccataaatnaggaaatgtcttataaaacggagaaattggaaaaaaatgttattcagaaaanaactttcttgagtgtgcttgtntcctgtagcaccttggattttgtgatcagtcttttaaagatatttnncaanaaattcancctctgtcttcacatttaggncanggnagggggggggnggggccttgnaggcnaatgngggggnanngngnggcgggcgtagggtcgggcattgagagcgctcgcccctaattctgccatttgcgcatgtcccacatgantaanagggtacagcttagagaccagggccttgcngccattggntttggggcnaattanganncagagtattaaacacagttgagtacatccatgcatacatgacataccgtcatcacataccggaagctccaatcaagagccccgagcaaagctcgtttcataacatcattaagattcattgtacactgcgtttcagaaaggctttgtcaaagcagataataatggcctgtcagaaannnanaaanagaaattnnnncnaaattgtcctttccctccttttaaantatgggaatctattaatagctgcattcccggtataggggactcaagtcttcagttaaaaaaaagtccccagcttctttaatattgtaagcttattaccaaaataagagtataaaaagttaagtgaaaaatatttgagtaactaggtgggggtattcctgggaatactaatcaaatataatgactgtntcaataacaaaggaaggcgg

SEQ ID NO: 658048 - DNA, 908 bp, Homo sapiens
ctgaggccctccaaagatgtgtgtgcgctctctgacaactttggcctgtctattgaatgtgtccatggtctatgccaaggctgacggcccttggtgttcctacgtaccttcccgatctaaatcgtgcgcctatactctcggttgtgtgctgcctctgtgtggtcatggcgtctctagttagagcttagcgtataggacgtgaacgcttgcatggtaagaagccactggatggtgttatagatgcgttgttgcctccctactttctctcagttcctgctatcgtgcatgcggcacgcgttggatgccggacggctagcggcatgcgctaccgcggtcccagacgtgccagcgtcgagggtctcagtgaggactcatgtaccacacggctgcggtcttagagtcgtgtcttgagggcctctggctccctgaatcgccagtctcgtgccatgtctagctctttggaacacggatgcagtgtgcaacaggcacctgagccgccagcccgtgtccccgtgggtccgtggcatggcctactaccccactcccacttctcctcccaaaaccagagccacctagccagcctcagctgggacagggcttggccgtagcacgagaccccaagctggcccactggtcccactctctcggctctgtagggtccactgggctctggacaagcactgggggacgtagcccccagagccacccaccttctcagtcacctaaccctagtggtccctgccccctgacgtctgcatgattcgggctgtggcctccacgtattatagtgcagtacagtctgcctgacggaccagccctgcctctgggacctgggggctgggctgtagaagagttgttggggaaggagggatgctgaggaatacgcatctgggcaacttctcaccgtt

SEQ ID NO: 658049 - DNA, 84 bp, Homo sapiens
tagaggttatacgctttgttagaaacattaattgtagtttggaagcaagtgtgtatgaataaagataatgatcattcaaaaaaa

SEQ ID NO: 658050 - DNA, 837 bp, Homo sapiens
cgtctcacaactatggcggtggcgtagtcgatatgaagcctcctttaaggggcgccaagagggcccacatgcggttccgcggggagtatacaaaaggttgggagacccatacgcaagttcctgtgctccccgagaaggacagtggtaaacacccgcacgcccggtgtcgagaggtgccaaaagggaattctgcccgggagataagagtaccccccgcaagaagggggtcatctccgcaaaacattcagggtcaaatgagaccgtaaccaggtcttttaaagagttcattttcattgtctggtaccccgccgtttgtcccgtgaaagacacagcggtcccttctccttcatgtgtaagccccgcgttttggcttttatctcgtacgctcccctttctattgggggtaaaacgcaccgtctttagcaagaaaagtacacaaaacagcttcgtagtcgtcggacaaaattgctaagcagcggaccgcccattttgcacaggttagaatcaggaagaacccacccctaaagtggtgtgaaactagtgaaggacttgaaaaatctcatggggggtctgttccacaacataaacaaacgacaactcgttttcttttctgtgtcaagcacggctcggagccacttctcctctttgaaaagaacatgtcggtcccgcatgtagtgcgaataaataaaagtgggaccttccaccgctgctctaaccagaaggaacactaaaatagtaggcagcgtcctctcatggcacctcttgatggagtataattgtatttaccagggttccctgatcttgttaaaagcctaatttccccccccaaaaaagaca

SEQ ID NO: 658051 - DNA, 336 bp, Homo sapiens
aagtgacaataccagcagaatttctcggaatattcaccatttgacctacaggagcatgctcttttttcccagaaaatgccaactgtgagaaggcagtctgatatcctgaagtatcttctatgtcaataaaatgttcctcatcaggaatggcatcagtcttcgggtaactcaaaaagaccaatcaaagactgtaataatggagtccacagtttggtatactcagggtccatcattgggggacattctgttagtaatttgagtatgccaaccgcacaggtctttttctctacatttccagataccttctgaatttcaggaataataatttttttccaa

SEQ ID NO: 658052 - DNA, 763 bp, Homo sapiens
gggcctgcggaagttcccaggagaaggcagcgcgttgtacccgagattcagggtctggctctgcttcccaggctagagtgcatttggcgcgatcacagctcactgcagcctcgacctcctgagctcaagcgaacttcctgcctcagcctcctgagcttcctgagtagctgcgactacagttacctgtagtcaaccacagtctgaaaatattaagggtattttaagacagaaagaggagagaggagagaaaccggattcaccttaccgatgtccttatgacatgaacattctccatggagctgatggaaccagtatcaagtgtggccattattgggagaaatgggttgctcctggcctttgacctgagagtgaacagaaaggttctccaggccacagtcatgcccaggatcagattggttgtcctgttattatccatcctggacggaggctccaggggcaccaatttcagattatcccgaatatttgccaggaagcaagcgcgcagcaccatctcccaaaacagtcattgtcacacctggataggacctattcttgataaagacaagaggctcttgggaggtttggtcaactttggactgctacttgggaatatggactctcttggggacgtgaaactaacttccattaccaatctcggcccagatttgacgttgctgattgattacaaacgactatagcaaggcgcgtccccgggtgcaagacgggcgtgacgaaccgattcttggtgccacttgcatacttc

SEQ ID NO: 658053 - DNA, 470 bp, Homo sapiens
ataaactatagtctattaaacagatcttcctgatgaacagaagttcttaattggatgaactccagtatataaatctttaaatctattaacatacagattatacataaagtgttctgttttaaaaaatttttccctaactcagtgccaagaagataattacctatgtactagaataaagtgttgacttttacgtaggtatttatagtctacctagagttaattgattacgtaagtttgacatgaggcatggggtagttgcacattttaaaaaatagtgtaatttttatagttagctatcttttaatcaacaataaatgtaatctttccatattggtacaaatacatctaccttattcttttaaactattacatagaattccatcaaatggatatattatagttgatgtgaccatttctttatgatatgacattaaagttgttaccatttgttgctaataacaaaataatta

SEQ ID NO: 658054 - DNA, 463 bp, Homo sapiens
  misc_feature (186)..(186): n is a, c, g, or t
  misc_feature (236)..(236): n is a, c, g, or t
  misc_feature (281)..(281): n is a, c, g, or t
  misc_feature (289)..(289): n is a, c, g, or t
  misc_feature (315)..(315): n is a, c, g, or t
  misc_feature (325)..(325): n is a, c, g, or t
gaagctttatagaaccattcgttgggcgcgctgcggcccaagtaaggtagagtgatgcattggtcataggtctgcttatccgtaagagtagagtccttggtgtcatgactttaagttgcgtgtgtgattatcttcaactcaaactaatagagtcaacgcgccgggtagtcgcgaccgggatgcggntatcatgagactaacagtcactaggatgtgtcagtgttacgtgtcagagntcacatgtgacatgtcgtatctaatcagagagacagtggaaagtncccagagnctgactgacttactgacttaattcanaactgtcacncgggccctctcggggaccctgggaggtggaagagagagagaagaaacagagacagaggaggacaacaaaggggatcaaagagagagacacagcgagggacaaagaaagacaagtgtaccgcggggataagcagaacac

SEQ ID NO: 658055 - DNA, 218 bp, Homo sapiens
aacgacaaggcgactccatattaatattgtttgggctactgctcgtagtgcgccgcatcaggtcgtatttggattttgatgctcaccctgatcagcggattgcgtagccggataagctataggtggctagaatacatatgaggtctaggttgaggttgaccatcgggttgagtctagcgaggggcggtcatactagaagagcgatgttgagggctaag

SEQ ID NO: 658056 - DNA, 460 bp, Homo sapiens
  misc_feature (35)..(35): n is a, c, g, or t
  misc_feature (61)..(61): n is a, c, g, or t
  misc_feature (143)..(144): n is a, c, g, or t
  misc_feature (150)..(150): n is a, c, g, or t
  misc_feature (173)..(173): n is a, c, g, or t
  misc_feature (375)..(375): n is a, c, g, or t
  misc_feature (378)..(378): n is a, c, g, or t
  misc_feature (385)..(385): n is a, c, g, or t
  misc_feature (391)..(391): n is a, c, g, or t
  misc_feature (393)..(393): n is a, c, g, or t
  misc_feature (447)..(447): n is a, c, g, or t
gggggggggaatcgggtgtggggggctcccctcgngtcccccgggggctcctgggggtggntggcgttggggggtccggcccggggggccggggggggggggtctttggtgggtgggttggctgcttggccctcctcccctgnngggggngggggggccagcttggtgcggcngggctggggggcggcaggcccgggcccgccggggtctccacaaattgtgtctgaagagaatgcaaaaggtcctcctgcccgtgtgcaaaatagaaaccggggtctgcaggctcagctccggcctcctgctcctctgcaggtgctctgcatgtcctcatggggtgccgggctcagatcaagagactgctggcagtggcggctnttncagccanggccananttatggggacgctgaccaagaagggtgccgagggtcccccgccgctgcccagcnccccagggtcaca

SEQ ID NO: 658057 - DNA, 1283 bp, Homo sapiens
  misc_feature (1)..(1): n is a, c, g, or t
  misc_feature (98)..(99): n is a, c, g, or t
  misc_feature (128)..(128): n is a, c, g, or t
  misc_feature (151)..(151): n is a, c, g, or t
  misc_feature (206)..(206): n is a, c, g, or t
  misc_feature (450)..(450): n is a, c, g, or t
  misc_feature (541)..(541): n is a, c, g, or t
  misc_feature (591)..(591): n is a, c, g, or t
  misc_feature (683)..(683): n is a, c, g, or t
ncctgaaatcaaaatcacgcccttaggggccggccatgacgtgggccgaaactgcatcctagtctccatttcaggcaagaatgtcatgctgaactttnnggggcacatagacttcaataacgaccganacttagaaactgcctgaattaanaaataccgccccaacctactcatcacaaaatccacgtacgccacgaccatccgtnactccaagcactgccgggagcaaaacttcctgaagaaagtccacgaaaccgtggagcgtggtgggaaggtgctgatacctttattcgcactgggccgcgcccaggaactctgcatcctcctggaaaccttctagaaacacatgaacctaaaggtgcccatctacttctccacggggctgaccgaaaaggccaaccactactacaaactgttcatcccctggaccaaccaaaaaatccgcaagantttcgtgcagaggaacatgtttaaattcaagcacatcaaggccttcaaccgggcttttgctgacaacccaggaccgatggttgtatttgcnacgccaggaatgctgcacgctgggcagtccctgcagatcttccggaaatnggccggaaacaaaaagaacatggtcatcatgcccggctactgcgtgcagggcacgtcggccacaagatcctcagcgggcagcggaactcganatggaggggcggcaggtgctggaggtcaagatgcaggtggagtacatgtcattcagcgcacacgcggacgccaagggcatcatgcagctggtgggccaggcagagccggagagcgtgctgctggtgcatggcgaggccaagaagatggagttcctgaagcagaagatcgagcaggagctccgggtcaactgctacatgccggccaatggcgagacggtgacgctgcccacaagccccagcatccccgtaggcatctcgctggggctgctgaagcgggagatggcgcaggggctgctcccttgaaggccaaggaagccctcagagcttcccttggcactgggctaccccttgggaatccattgcaaacgggaacaagcgaaacctttcccctgggcctggggtgtcctctagagcaagccctcaaagagctgggtctggctgagcaccagctgcgcttcacctgccgcgtgcacctgcatgacacacgcaaggagcaggagacggcattgcgcgtctacagccacctcaagagcgtcctgaaggaccactgtgtgcagcacctcccagacggctctgtgactgtggagtccgtcctcctcc

SEQ ID NO: 658058 - DNA, 426 bp, Homo sapiens
  misc_feature (6)..(6): n is a, c, g, or t
  misc_feature (418)..(418): n is a, c, g, or t
atccangaatggtttaccatttaaaaatgtatccaatctaataaacccatattaatgaaccacaggagaaaaatgacttaactagctcaataaattcaggaaggcatttagtacctatttgtgatttataaaaaattgtcaggctaggcacagtgactcacgcctgtaatcctaacactttgggaggctgaggcgggctgattacttgaggtcaggagttcgcaagatgagcctggccaacatggggaaaccccaactctaccaaaaatacaaaaaattagctgggcatggtagcacatgcctgcaatcccagctactcgggaggctgggacaggagaattgcttgaacccgggaagcagaggttgcagggagctgaggttgcgccattgcactccagccagggggacaagagcgaantccgtctc

SEQ ID NO: 658059 - DNA, 956 bp, Homo sapiens
  misc_feature (477)..(477): n is a, c, g, or t
ggaacattccagaggtcgacccatctccggtgctgatgggtgtggaccgaggtacgtcgctaggacagcccctcgcccgctgctcggccgtgtcggcagcgtggcccggtcgtctcctcgctgcgacttcgtcctcctgaccttccttcgtgactctggactctggactcgtggtttatatctgcgccgtacaatcttcatcccgagtcgccggtgtcgcagtcgagcgttgtgggttctatggtcctttatactttagtagcgcaaaaacctgagcctagttcgccagtcagacgctatttgcgttagccgtagtcatttcgtgtgcggaacatcactatgcgataacaacgacagacgaaaagcatttaccacgaacacctgcagttgcgtcgcaatagactttattgtcgactggtaccagcaggaccggacgcaaagcttcgttggcaaagtcgagtgttaattgatacagtncacgcgttaccgttcttcgcatgcacgagagatgagatatcagaagacacggttgtcaaggtcataaagaagttcttcattctacttcgtttaatttgactaaagtagtcccaaccgtaaattaaggtcgcaaaaaattggtctgttcaaaactgttcaatccagcaatgcggtgtcaggacccaggttctagtccgctaacaaagatagccccgtactggattgccaaagagtagaagggccaaacgggcaacatggaatcaaagacaagttaatagtcaaacatggcttgaacagtttgcaagaagggccgcttaagttcgggccttccgaaacggtaattcccagaccaaaataatttttgggatatgttgaacgcttggggaagcaacaaggacccccaaggtttggaatgtataagggaatttgaacgcgtttaacatttcgttcaaatgggaatcctcattgaaggcgaaata

SEQ ID NO: 658060 - DNA, 172 bp, Homo sapiens
caacggatcccagatggaaaaagatgtcagaggcacacgatcctgatccagcaggtccgggacttcctaacagagcccgaaactatatgcagacactatccaggaggtcagcaaggccgtactggccatgagaatacacacagacatcagctcgtgtactgcagaaatatga

SEQ ID NO: 658061 - DNA, 119 bp, Homo sapiens
tgtgtgtatttgctgtggcatccgtgatggacctttttcatgcaagctacatttctcttctccttcgtatgctgaaaaatatggattatttcctagacctttggaatattatgttatga

SEQ ID NO: 658062 - DNA, 326 bp, Homo sapiens
  misc_feature (3)..(3): n is a, c, g, or t
gtncgacgcaaacccttcttgagctgattcaaatctaacctcctttgaccaggcatggtgactcacacctgtaatcccagcactttgggaggctgaggctggcggattacttgaggtcaggagttcgagaccagcctagccaacatggtgaaacccgtgactactaaaaatacaaaaattagctaggcgtgctggtgcatgcctgtaatcccaggtactcgggaggctgaggcaggagaatcacttgaacccgagaggcagaagttgcagtgagccaaggttacgccactgcactccaacctggatgacagaggagactccatctc

SEQ ID NO: 658063 - DNA, 155 bp, Homo sapiens
ccttacctcgccgttgttgtgtgtgctgcctgacgtgccggagaccggtcctgctgctgccgcagtcctgccagctgtccgacaatgttgtcccacctagtcgagccgccgccgcccctgcacaacaacaacagcaccgcgatgcagtggcggca

SEQ ID NO: 658064 - DNA, 496 bp, Homo sapiens
tgacatcagctgagtgtcaggagttcaggaccagcctggccagcgtggtgaaaccccgtctctactaaaaatacaaaaattagctaggcatggtggcacgcgcctgtagttacagctacttaggaggctgaggcatgagaattgcttgaatcctggcaggtggaggttgcagtgaggtgagatcacaccactgcactccagcctgggcaacagagcgagactctgtctcaaaaaaaaaaaagaaaacctcaattattcggtaaaaaaattttattatgaaagatactgggggcttaagggtgaataatacggttttaaaccttcatgtgtcggtgatggtaaaaagtctcaaatataccaccggtaacttggtccttggtatatttaacctcataacggtatagtcacagtatcacagaatttagacacagagcctgggcatactggataccaggttttaacagggcttaattaactactcttttctcatacttcc

SEQ ID NO: 658065 - DNA, 483 bp, Homo sapiens
  misc_feature (337)..(337): n is a, c, g, or t
tatttcataaatatagaaatgaaataattttatttttgacagactggatggaatgagtgtgtaatgattgataaaggttgtaaattttaaatgcaagatgacgcttacgttctgtaaaccattagtaatacatgctgtaatatagaattagtggaacattttgattaatctttccctagaagtgactgaaatatttttgtgcatatttgagaaagggaactttccttttattaattgtcaatttagagaaactatgcttaagctggtctttcgcattgctaatgcgacaggcccccaactttccaaaatgttatcccccattggaaacccaaccaanaatttgggaagtggtgttacccaaaaaaaaaaaaagaaaatggtctcaccccttttaaccacccccacttatcttttgcttgataaaaatgcgttgttcttttttcttttggagggacaagatgaaaatatataatttgaataaaa

SEQ ID NO: 658066 - DNA, 714 bp, Homo sapiens
aagggtcctgtacgccccggaatatcgggatgctctgtgtgcccaggaagggacttcatttctgcctgtggattctttagaatgcccagtcgtctgcgggtctgccctgatcacaaggagaagccaggagcctcctcttcaggctacaaccttccttcttaagggccacagagtttgtggccccacccccagcacagccccaccttggccccaggaaccctgggagtggccttggcttcctgcaggacagccatggacctactctggatgcccctgctgctggtggccgcttgtgtctctgctgtccacagctcaccagaggttaacgccggtgtttccagcatccacataaccaagcctgtgcacatcctggaggaacgcagtctcctagtgctaacgcccgctggcctgacccagatgctgaaccagacccgcttcctcatggtgcttttccacaacccatcctcaaagcaatccaggaacttggcggaagagctgggcaaagctgtggagatcatgggcaaaggcaagaatgggatcggctttggcaaagtggacattaccatagagaaggagcttcagcaggagtttgggattaccaaggccccggagttgaagctgtttttgagggcaacaggtcagagcccatcagctgcaaaggagtggttgaatctgctgccttagtcgttggttgagacgacaaattagccagaa

SEQ ID NO: 658067 - DNA, 435 bp, Homo sapiens
  misc_feature (175)..(175): n is a, c, g, or t
  misc_feature (255)..(255): n is a, c, g, or t
  misc_feature (260)..(260): n is a, c, g, or t
  misc_feature (399)..(399): n is a, c, g, or t
aaaaagccattaatattcaaacaaaggaatcacattttaaaaaccctatacataagaaacagcctccaggaacattcaagcagcagtcaggagggaaaaatgtttcaatagcccagttttcttcaaagtatgccagagaatacaatccaattcactgctacaattcatagaattngtcagtgttttcttgagacgctgaggttcactgttggcagtttccaagtggccgcatgtgctgctcagaaaggccagcgnagacnagctgcccggaagaactttcactgctggaaaactgctccgctcccaaggaaagcccaaggaaggctgggccgtgggctcacaacttcatcctttctccagggtcatccagctccacgtcacttgaggtcaatgtcgtcntccacagggaagctcaccatcctttgccatcccagg

SEQ ID NO: 658068 - DNA, 189 bp, Homo sapiens
  misc_feature (26)..(26): n is a, c, g, or t
  misc_feature (39)..(39): n is a, c, g, or t
  misc_feature (61)..(61): n is a, c, g, or t
  misc_feature (102)..(102): n is a, c, g, or t
  misc_feature (147)..(147): n is a, c, g, or t
ccaaattagcatttagtattttgcanaaagtctaagggnccatggctgcctgccttggggnggaaccatagctccctctgggccgcttctggcctcttgganccatggccaaaggccaaggggatgggcagaggtctgtgtttggtntggcccagttccccatcattaaactcagcctgactgctgcct

SEQ ID NO: 658069 - DNA, 337 bp, Homo sapiens
ccggtgtttatcgatgccactccgtgccggttcctcccgctagggagaagggcaagagaggggagaacagcggcataagtggctggcagaggcagggaaagaccagcagaggaaagagagagaggcagagagacaaagagggagtcaaagagagaaagagagagacagagtcagagagagaagcagtaaagagaaaaacagtgtaccctgttcctttaaaagccagggtaaatttaaatttaaaacctctaattgataattgaaggtcttctctgtgaccctgtaacactccaataccaccttgttgtcactgtaaacaaggtggcatcgataaaca

SEQ ID NO: 658070 - DNA, 357 bp, Homo sapiens
  misc_feature (200)..(200): n is a, c, g, or t
  misc_feature (247)..(247): n is a, c, g, or t
  misc_feature (288)..(288): n is a, c, g, or t
catatgacaaacccctcatgtcactggaggggtagatacggagaaatctcatggttaggcaagctccctgaacatgactgcttctcagagccaaagtgacttgattctgtgtttaataaccaagatgactgacagcaataaaatccaattatatatatatatatatataatatatatatatatatacttatttgagatgnaagaggcaggctttctctatttctaatgataattttgcaaaaaaganaaactgcataatttcttggggaaaaaagtgtaagaaatctncagaccatatggtgcttatattccttttcctaaattataaaactttttttagaatgaaaaagactagtc

SEQ ID NO: 658071 - DNA, 427 bp, Homo sapiens
  misc_feature (1)..(1): n is a, c, g, or t
  misc_feature (69)..(69): n is a, c, g, or t
  misc_feature (97)..(97): n is a, c, g, or t
ngttccactaaggtttccctgttcccccacgtggccttgtgcctttcccccttttcccccgatttacangcacacacagtggaaaaatttactttcnttagtgcccctaaaataccttccacaacgcaaacaattttctgtggtacttgtgttaaagtcgttgtgcgagagtgcagaccaccttcactaaaaaaaaaaaaaaaaaaaaaaaaaaaaattgtgtgtggggggctagggccctctggagaactttttaaaacaccattccgtggggcggcgggcgccagtatgtctagggcgcaatggtggcataagtggtcccaagagacacggtgccaggcaacagggcggggcttcccacccagataaaaaggcccgggggaaccggaggtttgaacacacccaaaggagtctggggacatcggga

SEQ ID NO: 658072 - DNA, 1041 bp, Homo sapiens
ttcttcctgccctctctcccaccatgaccatggccacagttcagagatgggaaaaaaaagtgggtgagaatgctagagtgaaggagacttagctgtcagagcatagaaactgaacaaagccactataggtttcgaagtagcacggaagaaggttatctgggccaataaagatacttaggttcccgtgagagggcacatagtagcatgtccctcttagggtagaccccacttctgctatccacttggtcagaagacacacagaggcagcatatattccagcaattttgctggacttataagagccaaaccagaagcttacacgagatttaaaaactcacaaaggtgccaactcatcataaccaccatccccgtcgtgtggtcggcatgtagcccatccaataatcccacagtcgcatttatagcctccctaactactcattcagacaaccctgcccgcagattactctctgtctgagaaccccaaaggggaaaggagtgtttggtaatcagcccctcttggcaaaaaggaaagcttgcgtcacataggcacgtacaagagggattgatgcttactaccaaagtcaaccaggggacaggagccagatggtagattcacctagaagggatatcgactcttttgtgcctagtaaagttgcttcctggtcccgggcaacttgttgtgcctccgcacaggtcctgcgaagtggcaccagtgcctacagggtgatctttctacaggtatttccccaattcaggcaagccgttccgtcgggtgattgcacgagcgataaagtgccagtcccaaatgcaaaacaatacgtgcattatttagcgttgctattcgatgttaaataattgggcagacaagctcgcttgggcgggaaagaacttaataagataattggagggggcagcccaaatttccggggagggctctcataaagaccccgcttggctgtttacaggttcccgaagcaaattctcttgtgtggccccgcttaccacaccacgtttgttcggcgcgcggacctctcggagaca

SEQ ID NO: 658073 - DNA, 212 bp, Homo sapiens
gactccagagagagatactaagctccaggtaaagatatggaaaggcaacagaatttccgtggtaactgaaggccagaggttgaataaaaataagttcaagagaacctaagagattggcaggaccaaaggagccagtaccgaatctgtggaaacactgatatttacccatggaggaagagaaatagaccctgacaactgagacagcataatca

SEQ ID NO: 658074 - DNA, 223 bp, Homo sapiens
gcggacgtcctccgagacttggagaagttctcgtagaccttgttgtctaccgacgcgtggtagagacactaggacaaggagttgttcgttctagacgagcgactctttcaggaacgaccctttagcttctaactcctgatgaaaggtcttaaacgagcgatgtgatgaggactcctacgatgagggctcgggcctctcctgggtgcgcactgggcccggttca

SEQ ID NO: 658075 - DNA, 157 bp, Homo sapiens
gcgtcgcccgcgtcctcctaacgctcctccacaaggatgggcaaagaggccaaggcaggttaagcaaccaactgagaaccctgctccacccacccagcaggacagtcctgagtacaccaggctccttaggcaccttacaattggcaggtagccttaa

SEQ ID NO: 658076 - DNA, 346 bp, Homo sapiens
ccacaaccatgggtttcgtttttgtgatggagtctcgctctgtcacccaggctggagtgcagtggcgcgatctcggcttactgcaacctttgccttctgggttcaagctgttctcctgcctcagcctcctgagtagctgggactacaggcgcctgccaccacacccagctaatttttgtatttttagtagagaccagttttcaccacgttggccaggctggtttcgaactcctgaccttgtgatcctcccaccttggcctcccaaagtgctgggattacagcactggcgtgagccaccacacccagcccacaacttacttttcgtttggtgatcgtggggttgtaa

SEQ ID NO: 658077 - DNA, 556 bp, Homo sapiens
  misc_feature (155)..(155): n is a, c, g, or t
  misc_feature (546)..(546): n is a, c, g, or t
aagatgcccatgtcctaatcccaggaacctgtcaaaattaccttgtatggccaaaggggctttgcagatgtaatgaagttaaggatctttcgccaggaagattatcccagcttgttcaggagggcttgatgtcctcacccgggtctgtataacanaagagcaggtgacgggagaggaggttggaggtgtagcgatggagcaggaaactggagttgaggagggcagctcaagccacagagtccaggccacctcagagccaggaaatgcatcctcccacgggccaagagggtgcacgctttgaaaagactgagggactcggccaatgccaatgatgtggaaacagtgcagcagctgctggaagatggcgcggatccctgtgcagctgatgacaagggccgcacagctttacactttgcctcatgcaatggcaatgaccagattgtgcagccctgctcccacctggactggctcagtgaggctaattttataattctggctgattttagaactctaacggcctaaatttgtgttgttttaagtccaatntaaaaaaaaa

SEQ ID NO: 658078 - DNA, 603 bp, Homo sapiens
ggcgactcctcgtggcctccactggggcccaggctggaacccaggtggcggaggcggaggcggacgcggtggcggtggccagtggcacagcagtgggtgacgacgtggggtgcctcggggcgccccctgctcgcaaagcccaggctgggcaccggagctacaaccttcaggagaggaggcgcatcgggagcatgactggggctgatgctaggcactgctgccccgggtccccacggatgaggattgagtgcccagactgctggccactggactgaccttagacctcatgaatgagtcaccggtttgaggacgttcctggggtgcggcggcgcttggtgcggaagaatgccaaaggttccacacagagtggccgataagggcgggagcctggccccacagtctcgggcccgacccctgggccccgccagaagccccatgaggtgtttgtggaagctgaagtgagttgctccatggacaaaaaccaggagccccagtggccgggagacgagctcgctggatcacatttgaaggaggacgtggaggaggagaccgagcgctgggggaagccctcatgtggcctccctctccttccgcagtctcctg

SEQ ID NO: 658079 - DNA, 959 bp, Homo sapiens
atggtcagtctttagttaaatcgaccattttcatctctcgcatcatctgtgaagaaagagagaagccccccagagtgaggcgcctgcagggtggaggaatgccatcatggaaggactcctacctgtatcacggattgctccatcaccaatgtctcagtctacctgtatcccttcataaccatccactctgagatggcacgaaaggcccctgtgtgagcacacaagaactctgagcactacacagtgtacccaacatatcaggggctacttgtagtgccttcgcttccccttatcgggtgtccttactcacatagacatgccacctaccctaaaacgagatgtgctctgtgaatccaccttcagtgcatagaacatgcagacgcgaaggagtatgacatgatattagaacactcacctgcagaatcattatcacagtaccctatgatgagaggacatagatcctgctgcatagatccatatagtactcagaaatcatctgtactacactcttcatgcaaaatactataacagagcagctccacggtacatgaggcggacagcctgacaatccgccacagcacacaaaatgatggacacaccggccaagccaccagctgacgatcacgcacaccaggcccaccaacctatggacatggacacgaggacaccacacgccagacacgtaagacacagcacaccacagcgaaacgagaacaacgcaccaccaccacacggaacacaccaggcactggaaccgccgcaggcagcacaccagaacggcgccagcaagcaccagcatccaaagcaagagcgaccgtcccacaacccgacacaaccaccgcacacacacgagcatcacatgaagaaaaagccgagaaacacacgaaaggcccagaaacaagacaagccaagaaaagaacaaaagcacaacaacacacaacacacaatacaacaagcac

SEQ ID NO: 658080 - DNA, 271 bp, Homo sapiens
  misc_feature (116)..(116): n is a, c, g, or t
  misc_feature (143)..(144): n is a, c, g, or t
ggggggatggataagtccgcaaagggttatcggtgatcctttaggatgaggagacttcgtgcgtaaagttcggtccagcttccaagacggggctttgtaaacggtccgggtagcanttcctgacagggacagtttggtctcgnnggcattgagggttgcgagtgtaagcctttccacccctacccaggaccccgtgacgtccataggaaccaaatcccagactcagaacaataaaataaattccgcactccccaaccatataaaaaaaaaa

SEQ ID NO: 658081 - DNA, 116 bp, Homo sapiens
caccctctgtgggtgtggatatcagcagggaggagaggctgcataagtgccggctctgctacaagcagcttaagagcatcagcggcctggtcaagagcaagtccagtgagcggccc

SEQ ID NO: 658082 - DNA, 147 bp, Homo sapiens
ggtcggaccacagatccggggcatgctcggtaactcatttccgtgcgtgaagcagtgcatcgcgaaagctacacggatttctaccgtccggccgtcagtcgtttccaactggtatcggaaaggatgcaagtggttgagcggaaagga

SEQ ID NO: 658083 - DNA, 766 bp, Homo sapiens
gggaaagatgagtaagctttccccactactctgccttcctcgtacagaaactctttacttttgcctgaagtaacagaactcttctagcttctccatctaggagatttgagtgtgtgtgccatcaaggcttgagcaaacgttctagtacggtagctctaacgacttgaagatagacatgctactcgattcagtcttacaacctaataaattccagagtttattttcggttctcctctgtctggccttcctaagagaatatgagtctgaagcagtgacagtcattgtttctttagcatgcttggcttatgacttttaaagttttcatttagagataaatgtcgaagctcaagtttacagaagcgttgcagaggcccacggtctcctgggtcccggccacctgctccatattccacattctgctgacatgtgctccctgcactccactcaagttgagagtacaaatagtcttgaaggggaatcagcttcaggatggaaggacccaggagaggccccgaggtgggagggttctgtaccatacagactagctgcgagtgtccagagctctctgccatgatacttccttggggactgacttggctgagaactgtgttctgtcagaggattcgttgagaactctgccctttggtctgaaactcaaggcccatggagaactgataggagacttaggacagagctgaccctttgcaccaggctgggaggctgcagcccttttagatgccacttactgtaagttggacagaatacc

SEQ ID NO: 658084 - DNA, 110 bp, Homo sapiens
caaacttcgacaaataccacccatgctactttgtgaaagtaggtatgaaacataaccacgttaaagaggaaccagagcgttctgcccaactgtcaacctagacaaattgt

SEQ ID NO: 658085 - DNA, 514 bp, Homo sapiens
  misc_feature (113)..(113): n is a, c, g, or t
  misc_feature (235)..(235): n is a, c, g, or t
gtgctgggattacaggcgtgagctactgcacccaacctgcccacaatttttattgtctcttctcatcaaccatctgtctccccatcttgaaaatgaaatgagccaggcgtggntgcacgcctgtactcccagcactttgggaggctgaggtgggtggatcacttgaacttgaggtcgggagttacagaccagcctggccaacatggtgaaatccctgtctctggccggacacagntgctcatgcctgtggtcccagcacagtgggaggctgaggtggcggatcgcctgaggttgggagttcgagatgagcgtgtccaacgtggtgaaatcctgtctctactaaaaacacaaaaatcggcctggcttggtgcaggcgcctgtaattccagttgcttgggaggctgaggcaggagaatcgcttggacccgggaggcggaggttgcagtgagccgaagtcatgccactgcactccagcctgggtgacagagcgagactctgtctcaaaacaacaaaa

SEQ ID NO: 658086 - DNA, 1465 bp, Homo sapiens
  misc_feature (948)..(948): n is a, c, g, or t
  misc_feature (1465)..(1465): n is a, c, g, or t
gtgctgccgcggcaagcagacacaccccggcacctcctctgcggcatggtgctgcctcgcaatgcgcatgtgccgcatgcgcactgcctggagtggctgtagctgcccggctgcggctgcctgccctgctgcgggcttgtgggcttgcgtggcttggcccccggtgcttggccatgtctgcacgggcttgcggggctctgccggctgccccgggtgctcttgcaaacagcttgcgtgcgtgagcgggcattgggagctaaacggcgggaccattgggttgcgccagaggaatcggccttccggcagggatggagggcgacgtggtggggtcccaggggtgtggggccttgtatgggaccggttgcccccttggcattgggcctggagttactctggacaaaatttttcccagagagcacacgcctttcaagggcgttactcccacactgggcgcgcctttacaacatttcatttggggaccagggtcctataccagggagccagagagattatattaccagcactttaaccgaactgtggggacctcgttgctcgtttaattctgttgtccgtacgccaaaagaaaccttccttggtaggacgcgataggtacgggcatttggcgacaacggtccccaggacatcgaattacggtctatgtgtggagcatatttataacgcatgcgggggtattagattcgcagaaaagctattttcactatgatctaaacagaacttgttgtgtataacgaaaaggaaagttgtgggagaaaaaggggtatcttgaatcgccattttgacaatggttatgtccacgtagcaggggggatttgggacatatggcccccctttgtgggtatttatcacttgagcagggcattagtgggggcgtttacaaggagtgaagaagataggcacggaaggacagccaacgcaatatgagaaganaaagattgagcagagaatcaattatgatggaaggacaagagatggtccaagtgatcagttgatgtgagggaaaagacgcgaccattattgggcgcgagagacaaattcatgtggggggagctgcacaaaaaaaccctggtgagacgataaattacaacggagatgttcctttattgctacaatgtgacggttatgtggacgcaacataaatgaggatgggatcaacgggagaaggctatatcttattaagaagggggttagcgaagcacgcgaggagaaaagtctcggaatcctatgggttgaggggatttaacccacttttacaaggagtgtctcttgtggcctatgtacacagactgggagacggagtaacttcttacggcagttgaagaactttcagctcagtaccgagcgtacagttagtatgcaagaggaagggttaagatcagaaaagagttggacgagtgtgtgtagcatgtgagaacgacaaatcactgccagcgataggagattggtn

SEQ ID NO: 658087 - DNA, 281 bp, Homo sapiens
aatttcatttcaggccgcaatgcatggttgtctattggcatcatattcaccagcgcatggctattgcatcagtcacctgcaggcatgggggtcaggggttgaggtcttggtgagtgtattagtggggtcagcgatggaggtaggattggtgctgtgggtgaaagagtatgatggggtggtggttgtggtaaacttcaatcagtgtagggagctgaataatttctgaaggagaggggtccaggttttgcatccgggaggatcctattggtgcgggggctttg

SEQ ID NO: 658088 - DNA, 349 bp, Homo sapiens
gcgcccccctcccgacgtggacggcatgatcaccctcaaggtggacaacctgacctaggcgcacctctcccgacagcttgaggcgcgtgttcgagaagtacgggcgcgtggtgcgacgtgtacatccctgcgggagccccacgaccaatggcgcccctggggcttcgctttctgtcctgctttcacagaccaggcgcgacagcccaagacgccgagggccgccatggacggggcggagctggacggacgcgagctgcgtggatgcagagtgtgctgctgctatgtgcctgcctgggaccatgccccgacaagccgccaggtgagagccacgcaggcagggtccacaagg

SEQ ID NO: 658089 - DNA, 660 bp, Homo sapiens
ctgcgtgctagcctgttgggcctgcctcggaggaggctgtctgcctgcctgacgctgcctgctgctggcgcctgttgcctgctgcctgggaaacacaaggaaagggaaccagctgcagctgtggcgatgggctggggtgtagagcccctgcggaagtgctgggctgtgtgccggtgacagacgtgtgccctgtccacggtgcctcctgcatgtcctgctgccctgagcttgtcccgagctaggtgacagcgtaccacgctgacaccatgaatgacgtgtctgtcatcgagagcaaggctgtctccacaagcgtggtgaatacatcactgagctggagggccacggtacattcctgctgaacgagcgacggctccttcattgggtacacggagagtgccctgagggcccctgatccaaactctagcccaccttaagcaggcttctcacgtaggcatgactgccagctgcactgaaggacccgagagcgccagacgagacgcgaacgagcgtatagtcgagacccgctccccttccagcgcgaacaacacggcaatccgaccagtgacccgcaacccacgatggatacatcaaagacggaaaggcgcgcactagcactccccgcaccgctccagactgcccccacagagccacaaggccaga

SEQ ID NO: 658090 - DNA, 250 bp, Homo sapiens
  misc_feature (27)..(27): n is a, c, g, or t
  misc_feature (216)..(216): n is a, c, g, or t
  misc_feature (232)..(232): n is a, c, g, or t
cggcgactctacgaggatcccccaggnccacacttgcgcaatatttctgaacgtcttgtacaacgtgttgttacgtgtacccgtgacttactacgtaccttcaccttttttccttggacttacctgggttaacactgacactgacgacacgtgttactgttttttacctaaacacacgtactacacacttacaacttttggaccacgaccaacggncactacttactctggnctccccaacttaaacgtt

SEQ ID NO: 658091 - DNA, 752 bp, Homo sapiens
  misc_feature (471)..(471): n is a, c, g, or t
caacttaacaagttattcttttatcagttgtgttttggtgtactagctaagaaatctttgcctaagcccaagtcacaaaggttttcacttacgttttcttttacaatttcatagttcgatatttaagtctataatctttttgagcaaatgtttatatatagtgtgaatgttgattgaagttgttgtttttacatgtgaatatacaattgttgaaaagactagtgctatttgttgaaaagactatctctttacactaatgaccattacactttgtcacaaatcagttatccatgtatatatgggtccatttctgggctatctagtctgtttcattgagctatttgtcagtctttatacaaataccacagtgttttgattactgtagctttacaaataaatcttgaaattagtaaaaaaaaaaacaaaaaaaaaattggggggcacttgggactctggaaaaagatttttttngaaacccattctcggttgggggcgcggcgcggcacgctcagatggtgtttaatggtcgaacaactgggcgcccaaacagccggtccccgcaaggaaaacaccgcggcgcgcaaggaccactagggtgtcgggtttttcctcccccaatgaaaaaaaaggcccgcggggggcaaccgcgagcgttttgtgaacacacatcgccaaatgggagttccggagggcccgatcaccgggtctctccaaccacagggattccagggggagcgcgaatataaatggcc

SEQ ID NO: 658092 - DNA, 537 bp, Homo sapiens
gagaataaaagaacttgactggaaagagaggaccagaaagcttttggcacaattttcaacagagcctattctaaaaccaaaaaaggccaggtaaagaggagatttcgcttgacagaagagtgactggtaagtcggagtacgacctgggaatactgataacctatgacacagttcaagaacctctaaatacaatgtaggcatttgatgcctaataatcagaaaaactgaggattcattgtgctggcttacatgacctggcaccttatattctctaaagagaatgtaaggctaggagtagcggaaccatggatcaattgggggctgaggaaatgaacggagaaaatgattcgataactggattcattaacttctcatatagaccacgtcctcaagttgtgataagcactttgagagctgttatcagacttaatgatatgacttctatataggccactaaccatgatgactttggagtgaacttgatttcagagcttgactgaaatacttgcattaatgacaccagcaaaaccaccgtaa

SEQ ID NO: 658093 - DNA, 465 bp, Homo sapiens
actgaatatgatatcttctggaaccaacatatatttgaaaaagtggttatattcttgcatcaggacacagtccggcatcaagttactgaatcttatattttagatttgttgtgatacctgtacatcaattagtaatggtactttttttttttattttgttctattagtggtgatttactcagaataggaagaaaagccctgtattcaattttagatgaagttattctcaagcttttttcaactcctagtccagttataagaagtactgctacaaaactcctactgttgatggctgaatcccatcaggaaatcttgattttactgagacaaagtacctgctacaaaggtagtacatccactctttcttttcttgggattctcaaaaagaaaatttctcttcatcgtttatgaaaaaccacattctcatatcttaaagagctcatcaccgacccatgtagatcacac

SEQ ID NO: 658094 - DNA, 364 bp, Homo sapiens
ggttcgtgccggtcaggatgctgtgatgccaatgggaggcccagggctcaggagatggctgagccgtggatcttcctccatggctctgccatttccagtgctctgggggtcgcggttgtggcccgtctcctgtccccgcaagaacctacaacactttgggccggtcagatgcagcggcatccttctggaaagactgtgcggaagagaggaaggaatggacagctgtgtcagtacatagtcgtcgagagggagaatgatcatggacgaaatgcccatgatgggtgtgcattgattcttgcacagccttgcctttcttccaagtcatactcacttccaacctggaccctaaaaggccgggccaagt

SEQ ID NO: 658095 - DNA, 350 bp, Homo sapiens
tttttttaaaaaaaaggcccccccccccctttttatttgggggggggccggggtttttcccttttttcccccccctttgggggggttggggggggggttccccgggggggggggttgggccccttttgggttccccgggggacccccctttttttttaaaaaaccaaaaatttttgggggggggggggggcccccctgggtccccccccccccggggggtgttttgggggcggggttttctttttccccgggggggggggggttgggggggccgggggggccccccccccccccccccccggggccggggggggcccccttttcccattttttttttttttttttccgca

SEQ ID NO: 658096 - DNA, 142 bp, Homo sapiens
gaagcagtagtcaccgtgcaggaaattaaggaggggtccgtgaaatattacgatacgtcttaaatatgagacttgattacaggttcgaggtctgagagatagcagtagtgggggaagatagagttgggaaacataattggat

SEQ ID NO: 658097 - DNA, 429 bp, Homo sapiens
  misc_feature (283)..(283): n is a, c, g, or t
ccctaaggatacaaggcaatcctattttatagccatataacaataaggtttacgaccttgtggtggatcaagacattccgaggggcaacccctataaagggtcggttggtaacgataaaggccaccggatctgagttcaaaccggagaatccaggcggttttatctacttaaattcctcctgtccaaaggcaagaaaataagggctcttacaaagcgcctttccccgtaatgatatcatctaacttagattatacccacacccacccagaacagggttgtttnaaaaaaaaaaaaaaaaaaaaaacctgtcggccgcttggccaatcgatttagattgacaaggttatgatgcggccgaattcgagctacttggccattcgcctataggaggtgattcaattcatggcggcgtttaaacgccggactgg

SEQ ID NO: 658098 - DNA, 412 bp, Homo sapiens
  misc_feature (336)..(336): n is a, c, g, or t
ggatttccagctttgccatgaaccctcagtaatgagaacctatctgttcctgtgcctggacttcctaatatatagaactgtgagataatgggtcacattggctggatgtggtggctcatacctgtaaatcccagcactttgggaggccgaggcaggcagatcacctgaggtcaggagttcaggaacggcctggccgacatggtgaagccccgtctctactaaaaatacaaaaattagacgagcgtggtggtggacacctgtggtcccagctgcttgggaggctgaggcaggagactagctggaaccagggaggtagaggttgcagtgagctgagantggccactgcactccagcctgggtgacagagtgagactccatcataaataaataaataaataaatgggtcacatta

SEQ ID NO: 658099 - DNA, 666 bp, Homo sapiens
gggcgcctgaggcggccaccctgagacgctggcgcgcactgctcctggcctgcgccctggccctggccatggctggccccccgccctgtctccctgctgatctcctgtttctggtctctggctccggctttttactgcccctgcagaagaagttcggccctgtgtgtggccccaaagcccaaagtgaatcccttcctggcccggggacagctgagcctccccctggcaccctggggcccaagcgctgcacagcatgggcctgggtgtggcgagattccccacggacggcccccggaaggactttcccctgccttccaacctcgcccttgctggggcgattggcgacgaatgcagagcggtagctctgcggaagagtgccttcccggcacgaaccaactccaccgcggatcggaggaaatcaaagaggaccacgccgctgacggaccgacgaggagaacgacgaaggcggaccagaccacaattcaacaccatatatcacgccgcggaggccgggacgcatcaacatcacccggaagcaacggcgcagagagcacagcaggaaagcgggacgaccagtcgcacgcagcacccgccccccgagatacagcctggaaccgacccgccgagcccaagcaccagggcgcacaaagagcggaagagaacact

SEQ ID NO: 658100 - DNA, 784 bp, Homo sapiens
ctcccattcagctgaggtccgcaaaggccaagtggggccccggtgcctgtcatggtcgaggctagggaatgggtgctggaagggcgcttggctatcactgaggccacttgctctggaagacggggaactggaggctcgcttatcccattcgctcgcagccgtccctgtaccccagcacagtgcttctgagaggtttgagcggtggtggtgtggtggctggctcgcgcgatttccacggcctgtgcctccgcaagactgaacttacgatagacgagggggaggggtgcccgtatcgtcgttctcccaagaaggtaggcagtaggcgccttccatgatgcagatgcgtgggctttttgcatttgtgccataaatcggcgaagcaggtgcccttcggcagattcgggcacccattctctggggaggatggtgtcccggaagctgtacgcgggtgaggaagtgaagaacaagaaatacttcactgagggaacacagctgtacgtatatgtggaaatctttcttttgaggagcaactgaagaacaaatctatgaactcttcagcaagagtggtgacataaagaaaatcattgtgggtctggataaaaatgaggaacacaggatgtggattctgtttgtgggatattactcacgcgcagatgcggaaaacgcatgcggaccataaatgggacgcgtctggtgacggatcattcggacagactgggacgcaagctttaaggaagggacggcatacgggccggggcgaattgggggcccacgtcgcgctgga

SEQ ID NO: 658101 - DNA, 205 bp, Homo sapiens
ggtcgacgtctagtaggactcccctgcaagtaggtttcgagagccatcttgagtcatacatccgagtagtgcggcggcgttattaacagggtcgttagcttgggaagaaccctgcgggtagtgatctgaggttcagaccggagtaatccaggtcggtttctatctacttcaaattcctccctgtacgaaaggacacgaatgttca

SEQ ID NO: 658102 - DNA, 746 bp, Homo sapiens
gccgtttcctctggctggtagtgcgaagtctgagcgatgcttggagttactgtaatagatggtgacccagcagtagttcatctgagttctgaaagtcttgctcaacaacaggtctggaaagctgggagtccccgaatgggtggataccgtcaagctggtcaagcacaaagagcttgctccctacgatgagaactgttctacaggcgagctgttccacagcgcggacctgtacctccgggtgcgctggagttggctccatgaccaaagatctatgggggacgtcagagaaacgggtcattgccaagccatttcagccgaggctcccaagagtgtgggcctgccggtcctccaaggccctgagggggcttgacacatgggtggaaaacggaccaagatggggccgaaaattgagacctcaggaccaagagatctggaccagaatcgccggacaggtggcagttgccaacaagaagcattagaacaaaccatggtggggtttaataaattcgcctcattcggccaaaaacgaaaccaaaaacaaaaaaattttgtgggcggcctgcgtcactagaaagatttttaaacaacattctgttgtggccaggggcccaggtgtttggtgaacctgtgattaagtgtcaaaagaccaggggaggcacaggcgtgggtctacccaaaaacgcccggaccagacgttttagaacctcagtgggtcggaggcaaggatcataagggcacgggcatta

SEQ ID NO: 658103 - DNA, 367 bp, Homo sapiens
gtccttccgccagggggcctgggtggtgacgggcagtaaggaaatgtgggtgcactttttttatgtggagcgggcggccaaggctgctgtcaacaaactgcagggccccagtgcacctgtgctttatgtcagtttcaattgcgacgaaagcccattggcctcccattaccccaaccggaattttttttttttggaggcgggagcaaaaatagggtcctgttggccctggtgttgtcctccatccccccccttttactccacccttgtgttgtaaataaagtttcggtggtcatgtttagggccggctcccagttttgccggggacggacagggcaaagggcagcgggcagctccaggaacccggtta

SEQ ID NO: 658104 - DNA, 163 bp, Homo sapiens
gcgagtagcggggggatcaggagcaggacgcgctcagacttgcagcacattgtgattgggtgttcggaatatttaaattactgatcagaagatgaaagtagcttttctcttgggaagtcttgcagcccgtgtggagtgataccagtgagcaaacacagagctc

SEQ ID NO: 658105 - DNA, 125 bp, Homo sapiens
cgctttttcttcagcttcctcatcatcaaaatcatcatcatcatcatcttcatcatcatcctcttcatcatcatcgcatcatcttcgcagcagcagtttacttttttctgggccttgctaccacc

SEQ ID NO: 658106 - DNA, 254 bp, Homo sapiens
ccccccctttggggggcccaggggggggggtcccggggtcaaaatttttagacccccctggcccccctggttgaaccccgttttttcttaaaataccaaccctttgcccggggtggttgggggggcctgttatcccccccccttgggggggttgggccggggaatcccttttacccggggggccagggtttccgggggcccagttggggccctttccccccctcttgggcccccaggggggatttccctttcca

SEQ ID NO: 658107 - DNA, 100 bp, Homo sapiens
aattttttataaaaggggtccttgttttggaacccacccttggatatgtgaagccaactctaaaattaaaaaagcccccccgaatttttttttttctcca

SEQ ID NO: 658108 - DNA, 101 bp, Homo sapiens
gttctgtggggggggcctctgacgcttgctcttgagtgcgtcacctcgcggccatggctcgttgtctccgtggcctcatccagctcccgttgcagcttcct

SEQ ID NO: 658109 - DNA, 329 bp, Homo sapiens
gcgtaccacagaaagggccgcttttgaaaatgcacccaagcctcagaagcgaccagcgcgaacacagcgcagcgtccagaaaaacacacttgagatcggcatttctaggatatgcacagcgtcttctcctctccacagatctgaaccactataaccctcttttttgctctagggcattgccaacacgaacggtatgacagggcctttgaccataacgcaccgatacggcagcggcagatacctgagaggacctacagaagcttggactgccagaccacacacacagcatttgctcctacagcagcgctggagtgaagaccaacagcgag

SEQ ID NO: 658110 - DNA, 1117 bp, Homo sapiens
ttccgcgccgtctttcaaatgctgtctgtgctcggaaaatacactaatatacaagtaccctatactgaaccccctacagatagtcgttcataaaggtagactatacactagctgtaggtctaccataggcctactgttatgtactcctgactcatttactgtggccttcattcaagtagtaatagattatttacctattaagagtatagggtggagcgtggctggctcatgtaatctccagcactattggcgaagccacagatgggctggatcacttgaagatcaggagtttgagaccagcactgggcaacatgatgaaaccccatctctactaaaaatacaaaagttagctggatgtggtggcagcctcctgtaatcccaactactcggcaggctgaggcaggagaatcgcttgaacccaggaggtggaggttacagtgagctgagatcatgctacagcaccccagcctgggcgacagaactagagacactgtctcaaaaaaaacacaaaaacaacggtgtatacacggagcgggctaccaatttctcaaaccattataaccccaatagaaaacataaacaccagccttccaggaacacacacccactacacaagcaggaattggacagaatcaccaaggaaaaggacaaggaaaaaatatcacaggtaacaaagaacaaaaagacccacagaaacacagaaaacagaacaaagagaaatcaaacacgggaacccctcagagcaaactcatatacaagaatattgtacaccctttgtgccctttttcaacaaaatattttatcaagccctgtgaacaaaattatgggtcaccatgttgtgacacataaagagcatacaagtataacaatagcgagaagaacaaacaaagcaatgagatgtacaccgccaccaaaggcacaagaataagcaacgacgagccaaaacaacacaaacaccagacaacacaccacaggaaacagcccaatgagaaaaggcaaaaacacaacacacacaaccacgcaggacagcgaacaacaaaaccggcaacacacactaatgatagcaacagcataacacacacgaaacaaaacagagcaagaacaacagtcggacaaa

SEQ ID NO: 658111 - DNA, 921 bp, Homo sapiens
gacccccgagctgtgctgctcgcggccgccaccgccgggccccggacgtccctggctcccctcctgcctcgagaagggcagggcttctcagaggcttggctgggaaacaccgaacggaggtgagggatcgcgctgcagtataaacagccggttttcggcggctttatctaactcgctgtaagtaattccagcgagcaggcacgagcggagcgagccgggcggccggctagcggtggacagagccgggcgagcagagctgcgctgcgggcgtcctgggaccgggagatccggagcgaactagcggggcttccgcctctggaccagccctcccgctggatcccccagacaagccggtccgcaaccccttgaccaggccatcccaacgaaaacttttgccccataagaccaggcggggcggggccacttattgcactggaacttcaacaaacaacccagaaccaatggaccgcgactcttccccgaaccgcagcgtgacgcgctatctctgcccattctgggggaccactttcacccagcacagcgcttggccagcgaaaccactgcattacttcttgtaaaccggcttcatcacatttgccaagcctcggctacagcaccgcctgggaaattcgagtataccgagagcttagactgcacagccaccacagccagacctaccccgagccgaccgaaattgcccccctacaaaggctaagccttgccacccaaacacgggacactcatcaaacctctcggactctacagaacctaccgagttgcaagcccgcgctcgcctacattggcgcaccggacgcgacggaagacaccttccgtagcccgaaccgggcaggcagcgccggctgccggccgtctgtgagacccacgggagcccccagcaaagccacaccctcggacacagca

SEQ ID NO: 658112 - DNA, 100 bp, Homo sapiens
aagatggctgctgtaagatcatcctgccactcagagaggtggtgagcatcgagaagatggaggacacgagcctgctgccgcatcccatcattgtcagtat

SEQ ID NO: 658113 - DNA, 1622 bp, Homo sapiens
  misc_feature (1112)..(1112): n is a, c, g, or t
tttcacgctcggtaattttctttgttgctcccccttagtcggttcttgggtctgtttttttcttgtgtgggtggttgctcctcatccttgttgtgagtgagtgctctttctgttgggcccgagctgcttgtgtcccttttgttacgccttgttgggaaaatggtgtttctctcgtcagtccgtggctatctgttccttcttgatgaagtcctttgttcgcccctcgtttgcccgtttgccacgcggggggaacctcacaaagggggctcttgttgttgacgcacccacgccgcgctgttgttgtgggctccctcccgcccgttcccacacagttgtgtctcgctgcgggcccctgtttgtggatattctccaaacccaaaatttgctttgtgttgttggccgccaccagatatagttctgttccccacacccccgggatttatcaacgaagggtggcaaattaagggattgatagccccacaacacctttatggggtgtccacaaatttttggggagacttcttataaagactgttgttgtggtttcccctcggcgtctcccccgtgggtaaaaaagaagggcccaacagatggtgtttttgttgttgtgttttgcccaaagcacaggcccccctttggggaaaatatggtgaaaccagtcctggtgctttccacaatgtttggttttttggggggatatctcttggggcccacaccccacaaaagtttctccaccggagcatttggaagtatatcaccctgcgattatccacgcgtggccaaaggaaaaaagttgttctacttacaagaggcgtcctttctcggggacccccctctaaggggggcttctgttttggggagagaaaaagggcctttttccaatagtcactcgcacaggagatcctttgaatttgcgttgtgacaaaggcgctctctgttggttgtgttctcgcccacttgtctcctgcacgaactgttgtttctctgttggcctctctctgaggtgtccactaagacaccccacacggagataaacacactcttttgtgggagaagggcccacacaaaaaattgagaccaacctcgtgtcgtgttcacattgggcacagccncgctggtgtgtgtgtttgagagacacacacagagagggcaccacagtttctctgtctctgtgggagaagagccctctttctgtctctcacaaatggggcactttttcggggagagtgtccactgcccacagagatcacatgtggtgcttctacatgaggaggactgtagcacgctatatcacaggggttgttgcgcacacttaagtgaggggaactcttctcctccccccacggtgttgttgtcgtgaggtgagacacacaataacacacacaccctgagcaataggcttgagatctttcttcgtggttcccttttacatctggtagcccaacaataacacaccatggattttaaaccccttttgtaaataatcttatccatgggttctatacccttgtcccaaaagccaggagatcagaagactatttgtacttcattattatttccacaggcgaatagattggctttctttttgccaaaaataattaaagtttttgtatgttgccaca

SEQ ID NO: 658114 - DNA, 181 bp, Homo sapiens
gggggggggtttaaaaaaaaatttttttcccccccccccccccggggggggggggccccctttttttcccccccccccccctaaagggggggggggggtttttttttttaggggggccccccccttttttttttttggttttcccggggttttttttccccttttttcccctgggggagga

SEQ ID NO: 658115 - DNA, 488 bp, Homo sapiens
atatgtgatgggttaatataacacaagtaagggggtgtgggaaaggtcctcaattcatttgatttccttaaaaaagcgattccagggtgtgcaattaatccatgaccacatacaaggatccaatgaactaaataaggtaaaatctctcaggtaacggtaaaatttggaggataggataaaaaaatactccaggggttcatactctgaccacgttccttaacggattctgtggcccttgggcttgggggtcaggggaagaaaagagggagaaattgtcgagggagaaggatagggggatgagaggagttccccttagaagtggagcccatggggtgggaacttttcttcccccattcacggaagcggtagtacgagcaattcatggtcactttcacagtcatctctgggtaagccacactattggagctaagcaaaatggggaccttgccaaagggatcttatcggacttggacgtgcttcaggtgact

SEQ ID NO: 658116 - DNA, 258 bp, Homo sapiens
cttttatggtgatctgatgagcgtcgagcatcgagcgacatataccccggcgtacggatacatcccagaagcgccagtatctgctataccacaagtggcccactaagacacacgcattccaagcacggcaccacgccagacaagccgagctactatacccatttaaagtatgagactaggttgagatcgtatcggccccaacacctctcactcattacgctttaccggatcacactgctggagggggccgcgcgagaa

SEQ ID NO: 658117 - DNA, 366 bp, Homo sapiens
  misc_feature (232)..(232): n is a, c, g, or t
ggggaagattactcagggacattggttttaacatctacagggggccaggaaagggggtgctgggccgatacaaggttacatattagaactgagatgcctgctaaaagtactctagagaagcacaaccttaataagatgatggactaaaaaaaataaaaacaaattttaaaaaatcaccagtggcatagaaaaatttgcccctgcctagtttctaggaggaaaaaaaaaagtnttcaccaaagaaattgaaacattagttgtgcccctcaggcttaaggtttgattttaaacaccatcactgtggtccaagaacttccaaacttgaggaaacttaacatgaaaattgggcccaaaggcatcctgttt

SEQ ID NO: 658118 - DNA, 271 bp, Homo sapiens
gcccctcccccccaggggggcccttttttggggggcccccccccccatttgggaaaaggccccggggttttggggtttttttcccccccgggttggtttggcccccaattttttggccccttcggggcaaggaaatttttaaggggaagattttaagggtttttttttttaaaggggggggtttaaaaaaagggggggattttttttccccctttttccccccctccggttttttttttttttgggggccaaaaaattttgggttttttga

SEQ ID NO: 658119 - DNA, 334 bp, Homo sapiens
tgaagattgcccatgtagcatgtctcaaaagttaattccttttttatggctgaatattccatcgtgtgaataaatcacatttggttatctccattcttctgtcgatggacacttgggttgttcctacttttgggttgttgtgaattgtgctgccatgaacaagtctgtctgagtccttgttcagttcttgtggggctacgcctaggaagagaattgctgggctgtatggtaagtctaggtttaactttgtgaggaaccagatgttttccacagcagctgcaccgttatatgttcccaccaacagtgcatgaggctgccactttttctgtatcct

SEQ ID NO: 658120 - DNA, 916 bp, Homo sapiens
  misc_feature (173)..(173): n is a, c, g, or t
  misc_feature (205)..(205): n is a, c, g, or t
  misc_feature (207)..(208): n is a, c, g, or t
  misc_feature (221)..(221): n is a, c, g, or t
  misc_feature (247)..(247): n is a, c, g, or t
  misc_feature (269)..(269): n is a, c, g, or t
  misc_feature (275)..(275): n is a, c, g, or t
  misc_feature (280)..(280): n is a, c, g, or t
  misc_feature (286)..(286): n is a, c, g, or t
  misc_feature (294)..(294): n is a, c, g, or t
  misc_feature (314)..(314): n is a, c, g, or t
  misc_feature (343)..(343): n is a, c, g, or t
  misc_feature (357)..(357): n is a, c, g, or t
gccccccggtccgaccaggaaggtgggatgctctgatggccgggcctgcggcgctgagcgctggcggcggcggctgctctggcggccgccctgctcctgctgcgtcgtgaggacccggggccgggggctggccccagcatggccgaaaacagagctggcaaaagctggagggngcaaacatttcaacttgctatcctctaaaggngnngataaatcaagcnattttttatatctacaagttaagggngaagtagaagccaaggttgaanaattanaattngatcgntactctgnatttaggcctggagttctgntatgtgataggcaagaatctcgcccaggngaatggctggttanaaagttctttggctccttaccagactcttgggccagggggcattctgtgccttgtggtgaccgtggttagagcaatgctgaacaatgtgtgtgagaccaagagacaagcagatgggaactggctgggagaaacaaggccatccatgaccttgggggaaagcgcaatggtctctcaaagccattgacacaactgggagaacatggttttcatgtgtcaaccttaaacacccaattcagcaaatcggtaatttccagggtcttaaagaaaaatgtcagcatgttttaacctttgtggttatactattcctcaaggcatccattccaatcaagaaatgatgggtgctcctgcatcaagtggttcagagccggggtgtattcatttagatcccctcacggagcttgggacaaattaacgatctggtcagcctatctcaaatttggatcacaattcctgggtgtgggccccataatctgtactttccttgtatatagctcccttgatgccactggttccgatgcactggtggggggccgctttgaaatggtgtcttgagagtcc

SEQ ID NO: 658121 - DNA, 455 bp, Homo sapiens
  misc_feature (2)..(2): n is a, c, g, or t
  misc_feature (29)..(29): n is a, c, g, or t
  misc_feature (40)..(40): n is a, c, g, or t
angtacattcataccgtgagtgctactcngcaataaaaangaacaaactatgggtacaggcagcaacttataattcccagagaattatgctggatgaaaaaagccaatttaaaaaggtttttgtacccaaaaagattccatttatataacgttcttgaagtgacataattatagaaatggagaacagattagtggtggctgtgttaaggagggggtgaggatgggagagaattgggcgtggctgtgagaaacatgagggatccttgtgatgatggaaatgttctgtatcacagctatcaatgtcagtatcccagttgtgatattgtgctatagttttgcaagatgttaccactgggggaaattgggtgaagggcacatggaatctctgtattatttcaactgcatgtaaatctacaattatctcaaaataaaaataaaagttaaaaaaacacaaa

SEQ ID NO: 658122 - DNA, 383 bp, Homo sapiens
agactgctttaaaaaaaatccttctaatctgctatgcgtgaatgccacgcgcggccaaggaaaaagtgtcttggggatattatgcgaatttccagatttgaagaccaaaatactcttattctaacacaagccaggctttttattttttatacagggggatattttattccagggaaaattttaaataaaaaataaatggtttttatcttttctacagccaatttataattttaagattccctttcttgtttatcagcaggtggtattacatccttgtggcacattttttttttaattttgtaaaggtgaaaaaagcttttatgagctcatgtagcaatcagattttcctgtggattgataataaatgaatatgatatatagtt

SEQ ID NO: 658123 - DNA, 920 bp, Homo sapiens
  misc_feature (41)..(41): n is a, c, g, or t
  misc_feature (70)..(70): n is a, c, g, or t
  misc_feature (76)..(76): n is a, c, g, or t
  misc_feature (79)..(79): n is a, c, g, or t
  misc_feature (94)..(94): n is a, c, g, or t
  misc_feature (120)..(120): n is a, c, g, or t
  misc_feature (124)..(124): n is a, c, g, or t
  misc_feature (177)..(177): n is a, c, g, or t
  misc_feature (209)..(209): n is a, c, g, or t
  misc_feature (211)..(212): n is a, c, g, or t
  misc_feature (225)..(225): n is a, c, g, or t
  misc_feature (251)..(251): n is a, c, g, or t
  misc_feature (273)..(273): n is a, c, g, or t
  misc_feature (279)..(279): n is a, c, g, or t
  misc_feature (284)..(284): n is a, c, g, or t
  misc_feature (290)..(290): n is a, c, g, or t
  misc_feature (298)..(298): n is a, c, g, or t
  misc_feature (318)..(318): n is a, c, g, or t
  misc_feature (347)..(347): n is a, c, g, or t
  misc_feature (361)..(361): n is a, c, g, or t
aatcaagaagtgggggactttgaaaagttggatgactaccncctctggggtgggggggggataatattanattctnttncctgggtaccaccanagggaaagctggggcggagggatttnttcntgtggaccgagattatgtgctgaagtctgcaaagctggcaaaagctggagggngcaaacatttcaacttgctatcctctaaaggngnngataaatcaagcnattttttatatctacaagttaagggngaagtagaagccaaggttgaanaattanaattngatcgntactctgnatttaggcctggagttctgntatgtgataggcaagaatctcgcccaggngaatggctggttanaaagttctttggctccttaccagactcttgggccagggggcattctgtgccttgtggtgaccgtggttagagcaatgctgaacaatgtgtgtgagaccaagagacaagcagatgggaactggctgggagaaacaaggccatccatgaccttgggggaaagcgcaatggtctctcaaagccattgacacaactgggagaacatggttttcatgtgtcaaccttaaacacccaattcagcaaatcggtaatttccagggtcttaaagaaaaatgtcagcatgttttaacctttgtggttatactattcctcaaggcatccattccaatcaagaaatgatgggtgctcctgcatcaagtggttcagagccggggtgtattcatttagatcccctcacggagcttgggacaaattaacgatctggtcagcctatctcaaatttggatcacaattcctgggtgtgggccccataatctgtactttccttgtatatagctcccttgatgccactggttccgatgcactggtggggggccgctttgaaatggtgtcttgagagtcc

SEQ ID NO: 658124 - DNA, 1371 bp, Homo sapiens
  misc_feature (599)..(599): n is a, c, g, or t
ggagaactagtctcgagttttttttttgttgggttttcattggccgtcctctctaggctgtcttgggcgaggagggccccgggggaatcggggtctaatattcccgcgaatacatatttcgtgcctcagcgggctctaccgtgggtcctcctgtggacccgtggttgtgtcagcacccctccatcatattctcccgtgcacaggagggtgggaaatacgtggtggtcgaggcccaatgagggcttctcgcgacatgtgttagtctacaggggtggagaaccccttatcagcgctgtgggcgtatagagcgccaggacagtgtgtgagtgtggcgcctggtggcctatctcgaggagaaggcactctctctcgcggatgtccactctcgtgtatctttttctcccccaactttcttacaacgatattgttgcgtgggtataaagactgtgtgggcgtgggtataaagtgtggcgtgtgtggagggtacccccacttaaggagaacgcgtgtggagatatgaggggggtgttatatatatacaaggtggttatacgcgggagctcgtgggcgtgcacatatatctttaatagtcgtgggcncttttgagaagatctggggtggacaacacagcgcgagcgcagagggggactccttgtgtggtcaaccaattttctgtgtcgggtggctctactctgcgagagaccccccgatgatatatctctcgctttttcgagagagcaaagactatgtcgaaagcagcctccccacagaaaggtgatcttgtctcatccacaagtgcgttccctataaacaagcgtgtgcagaacaggggattcacaatatcgcggggcggggggataacaagtcccgtatccctctataagggggcgcgaaggctcccgggggtgctgtgttcaccaaaaactattaacgttttctgtcgtcccatggtgggggtggatcacaaataccccctgtgtgttgtggacgatggtagcaccacacacatgtatatttccgcggggatatcccccttattaccacactgttgtggacacccgcacatttgttttacaactgtgtgtgcccccgccacaaaagagaagctcttgctcaaccggtattgcggccagaaagtagagacccgccttgcttacttggtggttgcccccccgagcgagcgggtgacagagggggtgcagcaccggacactggatataggtaagaaaggggcacgcctgcggaggaggcacaaaccgcggggtacaccctgggaggagcccgtcgttagagccccagataaatgtgccccgggggctactgggagtgcgtcacgaggcagggacacataaacagtggcctggcggtccg

SEQ ID NO: 658125 - DNA, 400 bp, Homo sapiens
gtcatttctacctgacctcagcctcccaagtagctggaactacaggcacacactgccgcgcccagctaattttttgtattttttagtagaaacaggatttcactgtgttgcccaggctggtctcaaactcctgagatcaggcaatctgcccaccttggtctcccaaagtgctaggattacaggtgtgagccaccatgcccggctggcagttgtattttataaagcccttctagataattccaatgtgttggaaagtttaccttgtactacagatataactaggtaaaaggctgatttctaaatattctagtaaactgcagcaacctaactctcctgtctacccttaaagtaaactgtatgccatgtattagttttggttaacattgaaagaaagttattt

SEQ ID NO: 658126 - DNA, 709 bp, Homo sapiens
aacaaaaaaaaaaaagaaatataggcattaggatcatgatcctgagtgctgcacttggacagaggtggtttagtccaatgtggaaagtgatgcgtggagcgttccctgataaaggcaccttgtgaggcttcccattgccgcatcctctcccctcaggaaggggactgacctgggcattgggggaagggactgtcagcaatggatggctctgaccctccacagtgtgactctgccaagcagatgtggaccccagggcataccctacacaactgccctccccagtgaccaccacctaagctgctctcccattggaaacatgcacagctctctgaaatggggcataatagtatgggaccagtgacccctgagcatggggaccacacacctggagcccagagtgcaagggagaacatcactgtgaaaccactgtcacttcaatccatttgcacccagaggaccacaagagactcaatgctcttgaactctgagatgagagagatgctgcttcaggagacaaaacagagacaacaaaggataagaaggaaaaagaatgttgaccattgtagtagcgttaagtggacaataaggatatactgtatagaattgaattggaaagggtgaagtgtgaatagagattaaaatataatgttgagtgttagataattgggatctgtggtgaagagatgtatggtggaatgagaggtgaaaa

SEQ ID NO: 658127 - DNA, 331 bp, Homo sapiens
ggccccccccccctaaagggggggtttccaatgtttttgggatgaacccccaagtttggcccccttcccccttggaacggaaaattttttgccctttgtttttttttgaacccaaaggggggcccccctttttaaaaaaaaaatggccccgggggccccaaggggttggttgtttgggggcccccccggccccccggtttttggggggtttggttccccaaggacctttccattttttttttttttgacccaggggggaccggggttttgggggttttttttcccccgcccccattttccctccttttttataaggggggttttttcccca

SEQ ID NO: 658128 - DNA, 940 bp, Homo sapiens
  misc_feature (17)..(17): n is a, c, g, or t
  misc_feature (940)..(940): n is a, c, g, or t
aggctggtactggtccnaggtcgtaatgatcagctggatgcattcggcagccgcaaccgagctggacaggctaaagaaggactggtgaacgaggcagagcttcatgctaaacaatcctccccaaagcagagaggcagactctgattcagcacttccaagccatggttacagcttgagagaaggacagcagccagtgtagaagcaggcagctggtggagacccagcctgtgcccgaggtggcaagctatgctgaatgaccggcggtcggatgagctcttggagaactaccgtggctgccttgcgagtctgacgccgccacgggccgtcgatcgactattctccgagagctcttacgggacggtttagtgtccggtgctgaagcaagcgaacatgatcagctgtacataagccatcccgtgcattgtaccaggctatgtagttcgagcgttgctaacgtaaccctaggagaacagggctgggacccctagggattggacaatccgccatgggtcggattgaacataacaatctttcccaacggtttgaatgggaaacggacccaggggatggtcaaaaccgctaaagaggtgagcttccatgcgtttcttagtcctacgtgaacaacaacggttaaaccgccctatagagataggttaaggacccccaaaaggaataagagttctaccagagcggacaggggagaccacttatcgaaggcggaatggccttacgcattaatacaaaaggaggaatcggcgaaagacgccgggaatgtccatggaaaagtaagtttgcggcaatcgccgaaggggagtatccgaagccttttgcgccccggttccgagaatattcccgttccgacggtaaaagaaaaagccgcaccacatggaatttgaggaaacagaggattcccacaggtggtagactttgaaaagaaccn

SEQ ID NO: 658129 - DNA, 256 bp, Homo sapiens
acttgcatcccactatcttccttcaccaacatgcaagttctttccttccctgccagccagatagatgacagatgggaaaggcaggcgcggccttcgttgtcagtagtttctttgaatgtgaaagggggcagcacaggtcttttaaaccttgatccaaccctctttgcatcttacaaagtgtagccagctaaaagaagtaaaataagaagggccattgcttgtggaatgtacagtgcatatggattgcaccctggga

SEQ ID NO: 658130 - DNA, 975 bp, Homo sapiens
gatgaaatttttttttttctcgagacagagtctcgctctgaactccagcctgggcgacagagcgagactccatctcattaaaaaaaaaaaaaaaaaaattcgggggtggaaggacaccccagggggggaaaaatcttttcacattttatacttccaacaaagggattattttttagattctacaaggaacttcaaaacaaattcggttagggaaaaaaccaaattagggtctctccagccgggggggacagaacggaagaattccttcttctttaaaaaaaagaacaacaataaacaaaacaacacaaaattgtgtggggggggtctgggggacatgaaaaagagtttttaaaacaaccattggctgggggggggggggccgcacgatgtgtttgactgcaaaccgtggcgtcacaaacacgtgcctcccccagagaaacacatccggtgccgaacgaaaccaggcggggcgtgggcttctccccccacaataaaaaagccggcggccgggcaaacacgcggcgtgcctcttcggaaaacacaactccgaaccgggccagctgcggggcgacaaggcggggtcctcacaccaggggacgtcccagggcgagactcgaatataaaattagcccgccgcgccgcggggagcagcaaacaactccaaagatcagaaactaggacaccaaacagaacaaaaaccaccccgaccctaagccaaacacctgatagagacactagctatagcccactaactcgcgccataatctacgcaagcaaaaacactacaaccacgcaagaagcaccgcacacaccacggtcatgcccacccagcacacaaaaagacaaaggacgaacgcaacgacaacaacacacaagaatacaagacaccggacccgatacacgaagactacagagcacatcatccacacagacaaaaacagccaagagaccaccacccaacaatccaacagcacc

SEQ ID NO: 658131 - DNA, 924 bp, Homo sapiens
gttgttatgcatttagggaaaatcttacagtatttttacattattttttatacattatttccccccttgtatattcaaagtttgaaaacaaaagtttagaattgaatatcaagttagagaaacacagaagaaatatttggaagtgttgataatgaaactacgctctctattcttagagacaatttttaggaaatagctttaacataaaggctcagtatttattttgactggtatgtggtacattgtaatgtgtttagaaatcgtatctagtttaatattttgggtgtttttcttccgagatagatcattattcatatcaatggacagaatagtggattgaaatgtaccttgcgatcttgaagtgtttttccttgatcctccactccccttcttttgcgtattattattggatgtttattagttgcaatgcttaactctttgaaaatagtataatgattgatgtaaaaatggggaggaattaaattttatctttattattctctaagtagtagtattcctagagtaccatgctagtttctgtggatttaacatatagttattctgtcttgaattatggactataataatgttgcctggtttattggacgacacagaaacatttcaaattgcaccagtttaattagatgctctaactctaacatcaaacaacgaaatctacactgtgtaaacttcaagttaaccgaacaagtttaaatgctcaatttgaaattaagccacaaaattacacggttgtaactgtaaattaacacactctgacttcaacggttaaacttggaatgtaagcaaaaaatttgaattgtgacattgttattgcacgtgtaaggaagaacacagggtggactgactgtaatggagagggaatagatatcgttcagtatacatgcatgtggcatagataagaag

SEQ ID NO: 658132 - DNA, 257 bp, Homo sapiens
ggatagaggtggagaggaaacgggatggagacggtctaggaagcctcctgatgtgattgatacttgtaccgcgttagcaagtgaatgcttacataattcagatttactttccagaaaatccaaaatattaggttgctgcaaaagtaattgcagttttcaattacttctcaaaaaccgcagttactttggcaccaacctaatagtacttgggtaacaaacatctgcccatgacaattagttaagccacagtcaaacca

SEQ ID NO: 658133 - DNA, 266 bp, Homo sapiens
gtggtgttctccgagttcttctttgtggtggaggaacatggccggatggtggacggaccgttcgcgagttacggcagtgcgaccggtgagttgactaggagaaattagcggaacctcggctcccccattcgctccggctgtaacgacgaaccccgtactagtgactctaacacccgtgagcaccctaccaaacctgcacaaccctcgaccgcgacccgcccctcaaacccggcggtgtcagcaaaaaccgaactctccagactcca

SEQ ID NO: 658134 - DNA, 639 bp, Homo sapiens
cctttaaagaagccagacaaaatgttgctgaagtagagtcatcaacagcaatgcttcagcaggaccatcattctgagcaatactctgtattccacatgcataatggaagtaatttacagcgtgaagcaactgtcatcagtgcaagcacacacaagtcccaagcaaacccaaacatattggcgcaagcaaacccaatacataattcccaaggcacaaaacatagcacaagcatggcaacatggacctcaaagcagtgactattgcaaattctcccctcaaagcccttcagcaaaaggattctgtagttatccttgcagtacccgcaagacacctgctgaccccaacactgaaaactctaagtcaaaccaaaaaaaacaaaggatctgatagctcactctctggtaacagtgatggcggagaagcaatttcgtgcacagcaggcagcacaggcactattttgcatgcatagcacagcaagcaaaggtttttacaagccagtcttccactgtctgacagatagtgatagcggtgacgacttcttcatgggcacagtcagcacggacacgcacagcacggcaaagtagttgtcattctttcggttcaaggaacaaaaaaccactagaaaaagtgtttcttcaa

SEQ ID NO: 658135 - DNA, 442 bp, Homo sapiens
tgagaactgttcatccttcttcaagaagaagcttgccaggccgggcacggtggctcacgcctataatcccagcacttgggaggccgaggcaggcggatcacaaggtcaggaattcgagaccagcctgaccaacatggtgaaaccccatctctactaaaaatacaacaattagccaggcatggtggtgcatgcctgtaatcccagctactcagaggctgaggcaggagaattgcttgaacctgggaggcagagggtgcagtgagccgagatcgtgccattgcactccagcctgggcgacattctgtctcaaaaaaaaaaaaaaagaagctggtctaatggatttgcctaaaaaatgcggggactccaaacaacaattggacctgtcttcctcaataaaagtcagtgtctcctggaattcttttacacaaaaaaaaaaacacag

SEQ ID NO: 658136 - DNA, 885 bp, Homo sapiens
ggcccgctggcgggtggtcctgggctccaggtaaccactgcaactctggggagttggatatcacttctgattgaattcactcctggtatgaatgtggatgttcacattcaggccaatctggaggatgagcttagtaaaggaagctcttatgacgggtgtagatctccgtcactattccaatgctagttgagctggagctacatgcatgattgaccagaagatccattcgtggattatattcaagagagtgagaagtactagcatctctacagcaacctagatcactagctctgtgactgtctgtcctggacgccgtaatggattgctatgatgcttgggagcttttcagagtgacctcatgtatccatcagctctgagatccggacactgacaggaacagtcacggagccatgatcattcgatttcgacatcgccaggcagttcgggggaagacttggggacgcttgttgatggtctggtggtgccttctgctctggtcctcggcgttctggcaggctctctgtgtcggatccacgttctcggcgcactctgcgggtagctcggattggccctgcggagccagcagtccagagcaactgtgcatgctagagtgaccgctaagccatggcacaaatgtacacgaagcgtagtacgatccgtgtccccgggtcaagcgcagcaaccccattcatcccgaagtatgttccttccatgtaagattcaaccccgcgtcaaggatgaccccattgagccactgtatttcagaatcaccctacaacgaggtcctgtacgatgaacgatccaggatcacccctttcgaacttgctggatgaggcgatgtccgacgcaaattcagggtctaccaggataacatcgtggagccct

SEQ ID NO: 658137 - DNA, 218 bp, Homo sapiens
ttccaagctatcacagagaaggtcgtttatggtgaaccacatgggacacgaggaatgatacggtgctaggtgtagatatgttatatttgccatgagagtaagtatggtgtcagcagctggggatggctttggaatgcttagttggaaacaatatgttatatatgtcctatatatacctagtcattggcattggaccttaatcctgtctgtaatggata

SEQ ID NO: 658138 - DNA, 80 bp, Homo sapiens
gcggccgcctactactactactgctcgaattcaagcttctatgtacggggacatggaggggatgtagttgcatttttgcc

SEQ ID NO: 658139 - DNA, 145 bp, Homo sapiens
  misc_feature (22)..(22): n is a, c, g, or t
gggaaggaggcgccgtgctgtngctggcggcgggagctgctcggaagctacacctcgcaagggctccccctttcctactgtagcgaaaaatcaacacagacccaaccactccaaatcagcgacacatgctgaacggtaatagaca

SEQ ID NO: 658140 - DNA, 104 bp, Homo sapiens
ctagaggaccccgcacttgctaggactcagacggcctgcttcactgcggtcacttcctaggactcagacgggccttctcccactgcggtcacttcctaggactc

SEQ ID NO: 658141 - DNA, 443 bp, Homo sapiens
ccctcgatcgaggtttcagctggacagagcaatcgtctcaacaaaagaatatatatgagtcgagacagctgacacatgggaacccatttgtaaagtacaaatggcggcatgtgcgcatgctgtaatccagctattgggggtgaggaggagatcacttgaactgggaggggaggtgcgggagcgagagcatgcattgactgagcctgggcataagagcgaaaactccgtctcaagaagaaagaaagaaagaaagaatattatatgacattagtcgtagatggatgcaggaagaaacctaaggcaagacaaaagttatgccctggttcaatattcatacctcattcaacactttccagttcatatttgggaaggaatgtggtatactggaaagaccataagttttataactaggtgtcctgagaaaccgtcgaattcgaggggta

SEQ ID NO: 658142 - DNA, 1206 bp, Homo sapiens
cttctcagcccttcaacaagcggtgtacccacatgaaagcacagataatacgacgtgtggtgcacgaggagtagcttgagccgagaacgaggcgagaaagctgtgagaccgaggagaatcctgctctagagtcggagttgaagcagggggacgggtggtacccgatgagagtgaaccgtgcgttgtatcagtgactgctgagacatccgttgcatacgcaacgcaggcaagtctttcaggctaacgagaaggttggcaagtgatgctgcgcaagttagaagaaacggcacctccgcatgcgctgatggtggcttgcgtcacatggcgatgccttagtctctcgagcgtggacgtgaatctgtggactccgctgtggctgggttggatgcacgtgcaaagcgacgatagctgcgccagtacccccaaggtgatgcctcgcgcttgaaatggcgggccttctctcatgaagtggagtgaacttaagcatgatagaacatccgaaggcttatctagttgagagaagtatctcacaatgctcagagtgacatggaaagagtgcaagtccaagatgctgtggcaggaggctgggcctactcccataccttgtcatctatcatctttgtaccggcatggctgtcgagctctactgctggaagcgcatgtgcccatttgtcgtcgttgagtcactattggaggcaagtctgcttgtcatcgcacgtctgtctcctgtcgcgtgggcgatcttgtcctacttgctcacgtcacttaccaggggttgtatcgaaatcttgcgaatttggcttgacggaccattgcgtaacatttgacattccccacatgttgttggctctgacctaagctggaaactggtgaacaccgcattgctggggggaaaaggatgcggagatggccccaatgaggaggagagcgtgtttcaaggtgcaggatttagccagattgcctcgttgataaccgtcttggagcaaaaagctagtattcaccttgtttggttgtgaagaatcctggtgacttctcttgtgcaaaatgcatgtgggtcctaaacacaagggttggggaacgctggagatcgaagaaagccgtgccttaacctggaaaggggagattcctaacttaaaaggccaggacattgggtgccatttcgtccggtgaacaagaaaggctgggagtattaacccttgggaaaag

SEQ ID NO: 658143 - DNA, 127 bp, Homo sapiens
  misc_feature (65)..(65): n is a, c, g, or t
  misc_feature (67)..(67): n is a, c, g, or t
tttcaaaaacccccgtttttttttggggaaaacaagaatcccaaagggaagggtgctttattggncncccgggaggagggggtggcccccaaaattatttttcttaaggaagggttaaaaaagggaa

SEQ ID NO: 658144 - DNA, 699 bp, Homo sapiens
  misc_feature (539)..(539): n is a, c, g, or t
  misc_feature (583)..(584): n is a, c, g, or t
  misc_feature (631)..(631): n is a, c, g, or t
tgattattccttagatactaagtcagtgagctgattatcactgcaattacattaccagtgtcaacagatgccgcgtgtaggcaacgagttaacaattaagtgggctcctggccctgagacctcactccacagcaaagcctgtgtaaactcttccactttagatacctgcatggacgaatctgatgcctgaaaacagaggaaggtgtttcctgaccacggtgtagctgacagacaggcttctctgctttcagggcggggatctccccttcagatgaggcgattctgcactccaagatctgactttattgacatctgtaaattaattgagttacaaaataagaaggtaaatgtggccacatgcaaatgcgcatactcattcttccagaaaaaagtcacatgatgatgaccatttgcgtttttgaataaaatggtgtttcttatttctttaagaagcttccataccagcagaacacatttcccaacaagggatagtgagtttcactgtgagtgtgtgtttctggataaaacacaatgctctncctagaaggcccttgagggctgtttggttccagctaacaatgcnntgggtgggggtggtcccgttctttgctgtcagaagcacatgcgcttngccctggcttcctttcctgggtctgctgggcaacgtgcactttgtataggtgagtgcgtctctttttt

SEQ ID NO: 658145 - DNA, 316 bp, Homo sapiens
  misc_feature (205)..(205): n is a, c, g, or t
ccctgacagtatagagagtgaatatgagatctgcgaataagcataaaagatgtgactgatggagagatagacatgtgcagcgttaaattggatggagaggggggaaaatgcaatggcagtgtaattaatctggggaatcaccaggatggggagacgagaaatgtatctgaaaagaccgtagggaaatgggcaggtgcaccgtganagctgatatgagagtatatgtgtgaactgcggagtggtcggatatcaatacagatcgaggagacgttcaggatgtcatggaaatgggtgtgaggggaacatattgatatca

SEQ ID NO: 658146 - DNA, 148 bp, Homo sapiens
  misc_feature (123)..(123): n is a, c, g, or t
tctttctcttaagtttgtggtgggtttaaacttggaagaatcggaggttctgtgaaaattgttgggtgtaattatggggtatgtgagttgtgctgagtgttggcttttgtctttaggtcactngttcatggttggtagtcagtaactt

SEQ ID NO: 658147 - DNA, 693 bp, Homo sapiens
  misc_feature (324)..(324): n is a, c, g, or t
cgtgaacgctttcggtgactcatggcgtgcttatatcagatggttctgcatgacacacttagtagagaatacactgtgatagcttatgtaaatatgtctccagtgagaaccgaagtttcgtcgcgtgagcgcatatgcttgctgatcactaatacctgaggacactgaaacatagtcttatgagtaaccacatttgtctttttacttgcagtgccagtgtacatctgactacacattagcgactgtagtgtgcgcccgaaagggttgtcagcactgcagtgaccggatctacacaagactgactatggagaagactagagctantgcttacatatgtctatatatacgccatgctccgtttaccatgcccattcgaagcttatgccattgctctcgtagattaaacgacgagataatgctacatgtcttaagattgagcacctgaccctgggtgcttttactgggatatataatcataacctggtgacttagccattctgagcaatatagcggattgaagtctaagccggcttactgccttgccttcccagaattcataactgttggacccgaaccgtgacggtgacagccgtataggtaacctgtccattttgctttgatgccagcataaattgggtcatctagggaccacggaatttgcaatggaagcattgatcctttaccttggtacaa

SEQ ID NO: 658148 - DNA, 416 bp, Homo sapiens
  misc_feature (36)..(36): n is a, c, g, or t
  misc_feature (42)..(42): n is a, c, g, or t
  misc_feature (71)..(71): n is a, c, g, or t
  misc_feature (97)..(97): n is a, c, g, or t
  misc_feature (141)..(141): n is a, c, g, or t
  misc_feature (151)..(151): n is a, c, g, or t
  misc_feature (154)..(154): n is a, c, g, or t
  misc_feature (201)..(201): n is a, c, g, or t
  misc_feature (233)..(233): n is a, c, g, or t
  misc_feature (280)..(280): n is a, c, g, or t
  misc_feature (327)..(327): n is a, c, g, or t
gggcggattcaccctgaggccccaggagtttcgaanacccanccctggcccaaacatggtgaaacccccanctcctacctaaaaatataaaaatcanctgggcgtggtggcacgtgcctgtagttcctagctactcggganactgaggcanaanaatcgcttgaaccctgggaggtggaggttacagtgagccaagaatcngccattgcactcaggcctggatacagagcaanaaattgtctcaaaaaaaaaaaaaaaaaagggaggccgggtgccaagngcacgcctgtaatcccagcactttgggaggccgaggtgggtggatcnccaggtcaggtgatctagaaattaaaatttttgttttttttcaagacagggtatcactcaggcctggatacagagcaagaaattgtctc

SEQ ID NO: 658149 - DNA, 139 bp, Homo sapiens
aggtggcaggtgtagttttcttctgctgtttatgtattatctggtttcgtgtagtctttcttctaaatgggagagttatcagttagttctctgtacatttattattttcttgtatacatatgcaatgaatgtttattgg

SEQ ID NO: 658150 - DNA, 101 bp, Homo sapiens
gcagctggtcgcttcgagttttgtcacgccactgctttgggcacccccggtacccatccaatctcacaccttgccatgcaaatcaaggatcaaatggcccc

SEQ ID NO: 658151 - DNA, 381 bp, Homo sapiens
  misc_feature (57)..(57): n is a, c, g, or t
  misc_feature (64)..(64): n is a, c, g, or t
  misc_feature (183)..(183): n is a, c, g, or t
  misc_feature (191)..(191): n is a, c, g, or t
  misc_feature (223)..(223): n is a, c, g, or t
  misc_feature (249)..(250): n is a, c, g, or t
  misc_feature (252)..(252): n is a, c, g, or t
  misc_feature (306)..(306): n is a, c, g, or t
gcggtccaagagcgagtggaaagatttgggcgagaacttgcgcgggaccggactaancggtgcnagcgcacaggcgacacagacaggggcgggctgctactccggaatctgctaatcccagtcggtgccgcatccccagcccgccgccatggccagcctacaaactggtgctgatccggcacngcagagangcatggaacctggagaaccagcttcaggcatnggtacgacgccgacctgagcccggcnncnacgaggaggcgaacgccggcgggcaggcgctacgagatgctggctatgagtttnacatctgctttacctcagtgcagaagagagccgattcggaccctcttggacaagttgctaagatgcccatttgat

SEQ ID NO: 658152 - DNA, 160 bp, Homo sapiens
tttgttttggagaacagagtcttgctctgttaccaggctggagtgcaggggttaaatcttgcctcacggcagcgtccaattccagaagttcaagcgatcctctagcctcagccaccaagcagctgggactacaggcatgtgccaacacacccaggaaggg

SEQ ID NO: 658153 - DNA, 331 bp, Homo sapiens
  misc_feature (3)..(3): n is a, c, g, or t
  misc_feature (65)..(65): n is a, c, g, or t
  misc_feature (330)..(330): n is a, c, g, or t
cgncgcacacacatgcacgtacgcgcgtatgtacagtcatgcacgcacgcacgcgcacacgcacncatgtgtgtgtgtgtgtgtgtgtgtgtgtgtgtgtgtgtgtgtgtgtgtgtgtgtgtgtgtgtgtgtgtgtgtgtgtgtgtgtgtgtgtgtgtgtgtgtgtgtgtgtgtgtgtgtgtgtgtgtgtgtgtgtgtgtgtgtgtgtgtgtgtgtgtgtgtgtgtgtgtgtgtgtgtgtgtgtgtgtgtgtgtgtgtgtgtgtgtgtgtgtgtgtgtgtgtgtgtgtgtgtgtgtgtgtgtgtgtgtgtgtgtgtgtgtgtgtgtgtgng

SEQ ID NO: 658154 - DNA, 314 bp, Homo sapiens
cttggtaattatttcattcctttgttatggctgaataatatccactgtatggatttaccagatttgctttattcattctaatgttctctctcagggttcactaagggttttttgtgtgtgtgtggcttttttttttttttttttttttggaaagggggttcttttttttccccccggttgggggccgggggggtaattttaatttaatgaaacccccccccccggggttccccccttttttttttttaggcccccaaggggggggggcccaaggggccccaaaacccccccgggtttttttttttgtttttttg

SEQ ID NO: 658155 - DNA, 360 bp, Homo sapiens
  misc_feature (134)..(134): n is a, c, g, or t
acaatccgttatgattactcattatcgctttgacagctggctgtacacagtagatgctgaaacttgatatcacacatcagtatgtattctatctctcttacatttggtctctatactacataattaatgggttngtgtactgtacagaattagctgtatcaactagtgcatgaatagattctctcctgattatatatcacatagtcccttagccagttgtatattattcttgtggtttgagacccaaattagtcctactttacatattgcttaagaatcgatgggggatgcttcactgtgaacgtgggcgttcaagctgcttctcttgcctaagtatacctttccagatcactatgcatt

SEQ ID NO: 658156 - DNA, 188 bp, Homo sapiens
ggtcagacacagacatggaacatgagggcagacagcatgactgatgatactcctttgctgaagattaacacagagcttaacaaaactgaagcacgaaactgtagagatggacattagaatcggcatcgtggaacacacactactccaatcaaagttgaaggagaagtccaacatgactagagtgggga

SEQ ID NO: 658157 - DNA, 679 bp, Homo sapiens
  misc_feature (465)..(465): n is a, c, g, or t
ggccaccatggctggctggtttttaaacttttgtagagacagggtctccctatgtgcctggactagtctcaaactcctaggttcaagtgatcctcctgcctcagcctcccaaagtgtgggattacacgcatgagctgctatgcctggccctctttttcttgcttaaagcaggggtccccaacccccgggccacagactcatactggtctgttaggaactgggccacacagcaggaggtgagcagtaggagagcgagcaaagttcatttgtatttacagccactcctcatcactcacattactgactaaggtcccccttctgtcagatcagtggaggcattagattgccatagtagcatgaaccctattgtgaactgtgcatgcaagagttctaggttgtgcattccttatgagaatctaatgctgatgatctgtcagtgtctcccatcaccccagatgggactgnctatttgtgaggaaatcaagctcagggctcccactgattctacaaaataatgagttgtataataatttaatttatatattctaatgtaacaataatagaaataaagtgcacaatacatgtaatgtgttgagtcaagcagataagtctttcctataaaaactatccaaatatgtggaagatgtgagttcactaggatgctagaaatcacttaggg

SEQ ID NO: 658158 - DNA, 272 bp, Homo sapiens
atacggcaggccataaattatggagtgtatcgtagggacgggcttccagtcctctcggaggatgtggaggcagacgtggccctcgaggtcaaggtgggggtgatagaccatggtctcacacttcacctgggggggatcatgcgggtaacccgggcccaccttaaaactgaacataaacttcccactctggtagaagccctcatcaggacagatgaccagcttgaagtggaggaggtcgtcgggatctgagaagctgatatcacaggggtacc

SEQ ID NO: 658159 - DNA, 877 bp, Homo sapiens
  misc_feature (309)..(309): n is a, c, g, or t
gatgggactgacgccaagtgttcgcaagatggttgtctctgttacccaggctggattgcaaggtcgcaatcttgatccctgctggttactgacttccggagattcaggctcttctcccgattcgagccttcgtagagtagctgtgggatgtaccggggtcgcatgtcatcactgcctaggttggtatggctgtatgtttgggtgagatgccgtgatatcccgcggatgttaggaccattgtgctggtttgctgtgcagacgtctttgtagtctcatggtgattctgtccaggctcgaggacaatccganagaagtcggtgggtgcattcccaagggacgtagaagcacaacatagcgtcggtgtggccttagtattgtgtctggcattggagaccccttgaaggtacggacgcaattcccttaacagtgtctatcacacgtgagctaattcttcatcattcattctcattcatccgtagttcacatccattcggcatcttgggaggagtgaagcgaagcgatggggtcgtccaacgttattagtttggtcccaagtgactcgccacttttgaaaacatcgcatattgggctcgaaagactaaatactttcttttaaacgtgcaagccttatcttgaaaattagcctgggttgatataaccggcggtagtgcaacctaccttctaacacctgttcggcgtcactactggcaactacgttaaacggaaggccctaaaattatgtaaaatctatcttctcgaagcacgggacagtcctcattatgtctgagtgagacctgcacgaggtcacctgaggtgcagaacattctatacgtacaaaggccattggaaaaataaaaggcatgtgttgacctttggg

SEQ ID NO: 658160 - DNA, 187 bp, Homo sapiens
tgttattataggtgctggggacttcaatggtgaacaaagtagataaatgtttttctcccttgaagtttattttggaagatggaggtcatgtggtcctagccagtcagctactttgggaggctgaagcaggaggatcccttgagccccagaagtttgaggctgcagtgagctatgatacatggccact

SEQ ID NO: 658161 - DNA, 162 bp, Homo sapiens
atgcccccattgcttgtggtgtcaggttgtcaaaggatcagatggttgtagacgtatggattatttctgaggcctctgttctgttccattggtctatatctctgttgtggtaccagtaccatgctgttttggttactgtagccttgtattatagtccaaagg

SEQ ID NO: 658162 - DNA, 302 bp, Homo sapiens
gcccccccccccccccccccctgttctttgaaattgggggggggggggaggcccccctttggggggtcctccccccccccgggtggggccccccgttccggggggtcttcccggttttttgcgccaccaggcccacggcttttattttttttttttttggcttccctgggcccgccgggaccaaaaaattttttttttgggtttttcccccttgggcccttttaaagccccttgggtttgtcctttgtgggggggggggggagaattgggttgaataccccccgggcggggaggccatttta

SEQ ID NO: 658163 - DNA, 1254 bp, Homo sapiens
attgccccttttgctcgttatgcccgggtttgtccgagtcttcggtccgttgtggtggtatctattttggtgggatgtctgtttccctcgtgctttggtcggccctacctcttgggcgagcggccctcgtaatccgtggcgcacggcagtcgcgactgtgaccccttgcgtggggtaaccggtgatcgtcgtggcgtggctcgtctctttttgttgcccttggcttatcagcttactttcttttggctctcctcggtaaatgcgtttgttactgtggggttctcattgttcccgtctcgtcgcctgttcgtccgcagttctcttgtctccttccgttcggttcgtggtcacacttggtgtctgtgcccttcttgttgccgtcaggttgccctatcttccctgttcgtcccctgtggggtcacggtcccgtgggcaggatgcgacacgtgtcgacccctggagtatgagtccatctcccgaccttaccaccagtttattggaccttttgaggccctctgaagtcactcgatagacctgcgtgctcccaaagcgtgggtccgttgacgtctcacgtattaatctcttagaacgcactctcttgttttgcacttcagtgatcagtcaggttgggagcctgaactgaccatgacgcttcctcacagcaatatgcagtcgccccagtcgtactcttacccatgggtaggaggaatgccttctgccagcctcccgtcctgagccctgctggtacattcttacactgacccctgcctcatcttgtctacttcacctgctcctttgacccctggactgtggtataccctccatcgtcggagttcccttgggccgacgaggtgttctcctgtgctgtcgaattcagtcgagggagctgtatgcggcggtgggggtctacggttcctccccccttgggccgagggccccttccccttggtgctctgtccccatccacctcctttgcagctgctcctgggcctcagctctgcccagggccagccacggttctgctagggaagggaagggaatcggggagaagggagaagcaagcagtgtgctgagcctcaggagcttccccctctcccctttgcctatcccctccctctctgcttgagaccttgagcgtccacctgggagctgaaaggagttcgcagctgttggcatgagacctccttctccccgtcttggggaggtggggaccagcagataaatcccataaccccggagcgtcgctagatcgtt

SEQ ID NO: 658164 - DNA, 145 bp, Homo sapiens
tactattgatacgggagtgctgggaagggaagagctggtctctttaaaagatagggaagcagggaagggaagtgctgggtagaggagggcgtggaccctggctaaaggccccacccccacagacttaagtgaatggcccgcattt

SEQ ID NO: 658165 - DNA, 215 bp, Homo sapiens
tgcccggtagacgtaggactcagtagcttgagtaccatcgctggattattggaacgacgacacttgagcctcagtagacgttaccagatgccaaaagtacacatctaattgtgagttcctgcccgagctctaaagctatgtagctgcaaacatacgatatctctacttgggcgtcttactatgatctcacactcagaaacaccgtagtagctaga

SEQ ID NO: 658166 - DNA, 584 bp, Homo sapiens
tgcccaggccagactgttgaggaacgacctgcgatgactacaacctgcgcctcctgggttcatgcaaacgaccttcctaaacctgccaagactctaggcgcacacgtgggtgcgccaccatgcccagatattttttgtacttggagttaagacgcgttgtcaccttgctggccaggctgatatgaaactgcggtgctcaagtgatccgaacacccgtgcctccagaagtgctctgctgactgacatgagccacggcgcctggccccttcttcaaaagttatgctaggcgggcatatgaagtagagccggtgctttttcttattcaacatacacgaagccctctgtttgcacgaactttaccgaaaatgcatcgcagatggcccactcaggtgagtaacacggatgtcttcattgtgacttaccttcttcagacatgtgattgatgggatcttccttagcattgaaaacatatcgacactgcgtgacctaggggggagcatcttgcggatttttggacctacgaatgttgcattctctagcataaacaattggaccccttttgcagccctatggaatcattccgg

SEQ ID NO: 658167 - DNA, 109 bp, Homo sapiens
atattagccctgagggagcggtacttctcagggctaatatatacgtactctggcctcttctgcgtggtggtcaacccctataaacacctgcccatctactcggagaaga

SEQ ID NO: 658168 - DNA, 354 bp, Homo sapiens
ctggatcttctcctttactgaaattgatatcagaaatgttgttcagttacttatagatttgacaagaacaagtagattaaatcctcaggccaagaattcctaagattatcaggccttaacagcacatgacaatttggctatgaaaatttgcaatgagatcttaagaagtccatgctcaccagaaattcgggtctctataaaagccttgagttctacttttacactgttggtgggactgtaaactagttcaaccattgtggaagtcagtgtggcgattcctcagggatctagaactagaaataccatttgacccagccatcccattactgggtatatacccaaaggattataaat

SEQ ID NO: 658169 - DNA, 120 bp, Homo sapiens
tcgatacgactttttttttctttctttctttctttctttctttctttctttctttctttctttctttctttcttccttccttccttcctttcctttctttctctctctctctttgtcttt

SEQ ID NO: 658170 - DNA, 477 bp, Homo sapiens
gataagttgccttaagtccacatgggttttggctccttggcaacaatggctgttttttaaaattagtttaggcccaacattgaagaggaggaaacccaaaattttgttaaccaaaccattgcaactggcattttcaacgaccttggctccggaaacaacctttacctttgggttatcaacaaaaaccaagtggattttttccggccaaacccagtgccccacaaaaaaggggccagggttggccgggacaggtgttaaaaaagggcttctgcagtcctcccttaaaaaatccctcctttggaaatttagggggtggaaaaaacagttccaaccatggacccttccttaaaggcatcaatgggtggctggccccggttttggaaagtggttagcatttaggcccagtaaaaccctcatgtgggtagtgtttgccgaattaaactccactccattaaaaaccaaaacccaattgggaaa

SEQ ID NO: 658171 - DNA, 493 bp, Homo sapiens
gacgcctttttttgggggggcaggatcggtggctaacatctgcaatcccagcactttgagaagctgaggtgggaggagtgcttgaggccaggagttcagaccagcctgggcaacatagggagaccccatctttactaaaaacacaaaaaattgccaggcgtggtggtgggcacctgtaatcctagctacttgggaggctgaggcaggagaatggcttcaacctgggaggcagagcttgcagtgagccgagatcgcgccactgcactccagcgtgggtgacagagcaagactccgtctcaaaaaatacgacaagaaaaaagaagtatattttcacctgaatcctttggataattctttgtttctaccatgagttgtctgagaacacactatttcaaggtactgtgtttaacaaggaccgaagagatttacaagttgagtcctttctcctaaagagcctactgtccaaaacaaagggcggccgctgggtacccga

SEQ ID NO: 658172 - DNA, 454 bp, Homo sapiens
  misc_feature (88)..(88): n is a, c, g, or t
gggcaaaaaaaaatttttgtttcctccgggtattttccaaaaaagggaccccattgtgtcttaacgaaaggggatagtttaagtcaanaaggtcaccccgagaggtgctgcccacaaaagtgattctgaagaatggttctttttaagataatgactttccaatagatcaatgtttcatgttacttgccccaaaaaactttaattaggttgaaactgggaacgtttgtttctcatattagctacttctctattaggagcacaagaaccatagttaaatgcaacatgagctactttagtcctgtttgtttaaatttgtgttgtccatgtattatgatttattaacttgttgatgcatgtaaattgggtgcattttgttgccatgtatgttaaatggtgaccaatgtttttacaaaggaattgaacaaaaaaagtattttttaagaaaaaaaaaaaa

SEQ ID NO: 658173 - DNA, 1177 bp, Homo sapiens
caagacgagcctgggcaacatagcgagaacttgtctctacaaaaaaaaaaaaaaaggccaggcattggtggcgtggcgccttgtagtctcctagtttacctcaggaggctgaggcaggaattactttgaccccaggagtttagacgccttgcagttgagctaatgaccacaccaccacacttacagccctgggtgacagagcaagacccttgccgctaattaaattaagggaacattctttcttatttaaacggggtgcccttttaaattgaccagacttttagaagattgatcccattcccagaagaatttctcaaattaagattattccattattaattgtgctgaacagggcaatttgcgagcactattaagggaaatatctcctatattttatgggaacactggtgtcatcttgcgcaacattgtggtgcgcacatttcggcgaatttttcaccaccaaaaaaaactccccacaatatgggccaccacttttccaaagaggttccccaatgtttggtgtattctcctcactaaaaaacaccttttcaccacattctggtgcggcatccctaaatgcttttttataacctctatatttatatttcacatcttttgggtccccctggaagaaatcgtgcgcgggtctgtttctcaaaaacaccaccaattattccctgggaaaatacacgcgggatgcgtccttaatattttttgtatatcccccaagacactttattttttcccaagactgggcccttaaaattttacaatttacagccagggcccacctctttgggggggtttttctcccccactttttacgcttagcggagtttgtgggcgcccccctataggttccaacccttttacaaacgggtttttttctcccaagagtcgttgtaatcccctcttcttcaacaccgtgaaaatttctaaccctcgggtcatataaaatcttttgagagcaatgtggacacctcttccagcaagaaacttttcccaaagggcttttccccccataaagtttgtgttaggacacacataaattgttgtcccaaggggcgcccaatattttacagggcccaccctccaggagagaaaggggccccgcggtctcttttaagggccacaaaaaacatttttctgacgcggaaacgaaaaaaaaaccccattg

SEQ ID NO: 658174 - DNA, 97 bp, Homo sapiens
  misc_feature (14)..(14): n is a, c, g, or t
ctaccctctccccnttttgtgcctagagttgctctgtgaaggggcagctctggccgcagtgccctcctgaggggaagagggcaggcctgtggggggc

SEQ ID NO: 658175 - DNA, 230 bp, Homo sapiens
gtagcatcagttggaacagatattgtgtgacatcagccaccttaccaaccaaattaattgacagcatgtatacttcgcatactctggtaccaccagagctcagggcccttggaaagtcaggtgcagaaaggtgccatcatcattcatgctgcccatacgcctgcagagatagtgtacctgcttactgtttagctacactcacatccctaccacaaatactagtgacccaa

SEQ ID NO: 658176 - DNA, 202 bp, Homo sapiens
gcaggtcgacatctagagactcccctctccgctcatccgaacaggctcaggcaaaggcagtcctcccacctcggcctccagagatagctagggtctacatggaacatgccaccacaaccggttaaattgtatagccaggatttcaccatatatgtccagtggtggtctcacaattcccgagactcaagatgatactgcccac

SEQ ID NO: 658177 - DNA, 226 bp, Homo sapiens
atagacttacgttaaataatgtgttcatattggttcattcattgtaacaaatgtatcatactaatgtaagatgttaataatagggaaactgggtacaaattatatgtgaactctgtactatcttctcaatttttctgtgaatccaaaactattctaaaaataaagtctattaataaaagtattaggcaaagtatttcagagaacatttatccatagaaaatatctg

SEQ ID NO: 658178 - DNA, 627 bp, Homo sapiens
  misc_feature (566)..(566): n is a, c, g, or t
  misc_feature (581)..(582): n is a, c, g, or t
  misc_feature (603)..(603): n is a, c, g, or t
  misc_feature (615)..(615): n is a, c, g, or t
ctttcccaaagaagcgccctacctttatttccgccacttatttatccaacattaattcctccaataaacccttgttttgcccaattctccccttcttcatatcccaacaaaatgccatactcaaccaccttgttggtgaataaaccatatgtccctcctgcattctctaataacaaattcatttcccataagtatctgtcccaagctcagggtatacccctccaaacaattaaccaaaatattctcattaaccttgtaaatcaaaatccacaaataacaaagaaccaacttaaggctgtcattccagatttctcaggcctgttgaaaaaattctgccaatgccaccaacattaactctactttcctcaaaacacacaaaaactgatttcaaaaactcgtactactttcggacttaaattacttcaccggaaaacaacccaaaacaactctttcattctgtctgccttttctctttaattttaactcatttaaccctttttttaaccccaccccttaaaacacttaattcattttccataccaaaataacttttcaattttcccagnccgtttccaaccagnnccgtccagtcatcactcaacncccgccgccggnatccagaacccc

SEQ ID NO: 658179 - DNA, 265 bp, Homo sapiens
atcccggccctgtacatttcagcagcgcaaaagctcgataacaactgctggacgccaggcagcacaatgccacgatgggaccgtggatggaagacggtccatctcatgtgaggggtccggagcccctcatgctgtacatgtcatgtgtatctctgctcttctccagaaggcaacaacacagcttgccacttcttggaatgttctatctcctgctgggtctggtctccacaagctcagtgtcctgagtttggtccttgccataccg

SEQ ID NO: 658180 - DNA, 174 bp, Homo sapiens
ttttattttattttatttttaaattaaggtcgggagcctggctattttgcttttgggattgggaatgttgggtgggtgtttggtccattttaaggtttttaccaacaggtgtgtgtgtgtgtgtgtaaaggttatgcacccaaaatcccttttggccagaggggccccccccca

SEQ ID NO: 658181 - DNA, 309 bp, Homo sapiens
ccaccccttttttttcccccgggggggccggttttgggggtttaaaaaaaaacgccgtccttttccccggggttgggcccccccggggtttttgggggaagggcccccccccgaggtttaccccccggggggtggggggttttttttttttttttttttttggccccccatttcccccaattttttttgggcttttaaaaaccccggggggggggggatttttggcgggtttttgcccccccttttccccccctttttttggcgggggcccattttttttggggttttttaccccggggccctttttta

SEQ ID NO: 658182 - DNA, 798 bp, Homo sapiens
cagttcagctggctttccatttgacacacaggaagtgtccaactatacacaacgaacggaacgaaactgcttgaaccaaaactttagaaactgccatgttaacagagcactctgctgacggttcgttgcattctggagcagatcaggtgtaaactagtgaactagtgaagaggatcttgaatttcttaatgcatccaaagccttctggcaaaccattgccgaaatctaaaaaaacttgtagcaaaggcagtaaaacaggaacggaacagttctggaatggcaaggcaaggctaagcgaaccaaatgtcctgacaattctgtcagatgaactctagctagtgcatgaagatgaaacagcacaaaacaaggcaagagtcttcagatgatgacagataacagaaagtgacagacggagccaccaaccaaaagacagtccaaaacgagcaaaaacctaaaaccagaaagctactatctacaaagtacacacatcctgtgaacaagtgcccaatgttcactccacagcagcattagccagccaccacccaaagaagcaatcaacaaccaggtacccacaacaaaggacacgtgacgtctgagcgcactacgtcccagactgaatcgaaaaccttccacatcaccccaaccgccgaacgaaaaaccccccatatcacgaacgcaacgcacgtcaacacacgaaccaaccaccaccaagaaacacccacctggcccaacgtgccctacctcggccaaagaacccccacaacggcaaaccagaaccaggccaacacacggccctag

SEQ ID NO: 658183 - DNA, 350 bp, Homo sapiens
atgttcctttattaaaaaaaaaattataggggggggtttctcccttctcttcatcctgtgggcaatatcccagttattttcaggttttgccatgcccccacccctctaaaaagataatattattccctttattattttcccggctctccctctccccttgtgattaaggcccaaggctgtggaccccctggggccccactgcccagattgcagccaccggccctgggtcccttcctttatatacctttatattaacccttcccaagccggacttctctttatatactcctattttttctggttttttttggttttttggtttttttttttttttgggatggggtctccga

SEQ ID NO: 658184 - DNA, 143 bp, Homo sapiens
gcgcgcgcagctccctcacgtcgcgttcgtgggccgcgtcgaggcctcggcgctgcctgcagccggcccagcagccctcgagggcggcgcgcccagcgcctcctagactcggctgcgcacccagctcgcgtccaggcggccgc

SEQ ID NO: 658185 - DNA, 858 bp, Homo sapiens
aagccggcccttggcttatggcggtggcggagctgctgtctgagcagcggttgcggaccgatgcgaacttggcccaggacgcccgggcctagggatgaggcgcggcggcggcgggagcgcgaacggctggagctggccttcttcgccttctcctcggctgtggagccctggtggggggtctgcgcccggtctaccatgactagcgccggcagaatgcccagaatgccagcaacaacgtgggaactgagtctgtatgagctgcaccggaccccgcaggaagccataatggatggcaacgagagattgcgtgtttcgcccctcggacacatgcagttcaagaactctatgtgccctatctgcctggacatgcgtgaagaatacgatgacacacacaaggagtgcctccacagattctgcttctgagcgtgcaattgtcacatgccctacggagcgggaacatagggagtgtcctactctggccgaaagaagctggtgtccaagcgatcccctacggaccatgagccccaagcatttgtagttgccctgtatctctaaagagtctatccgtagccggggaggaataccgaagggccctatcaatgaccgagtgcttaattcctgcctgatgcctgctgtcgcaaaccatgcgagggcattgaggctccagtcattgaggatggggcctccgcttgctggccatgcacagggtccagcgtgtgaggcggccgataccagggtcagatcagaccacagatgatgagtggggggtgaaggagagccgcgggagggagcaacgggatggcccaagaatgtgagctccagatccgccctggtctgcccgggcctgtcccggcgacc

SEQ ID NO: 658186 - DNA, 611 bp, Homo sapiens
cactctaagatcccctgagctcgatcctggaaccgcctgtcgtcactgctgatcacggcatggttgacatccccgacgaccaccgcgtcatggtggaggacgagggtggactgctcgctgacgttgccttgttggctggtgagcctcggttccgccacatttacactcgtcgtcccgatgaggtcgcgcaacgatggcgacgcgtactcggggatcgtgctcaggttgtcattggcgacgatgctgttgcggctgacctgtttggaccagttgacgtgtctacccgttcccgtttcggtgacgtactagcgattactcgtggtgattgggccatcatgagccgcgctacccccaaggaactcaccctcgtgggcatgcacggatcgctcactccgtgtgaaatgcggatcccattgctggcccagatctgtgaaggatgaggatggctgagcttgttttccacaccggtccgatggactctggcaagtccaccctcgcactgcagatggaccatgcgcagtccgctcacgaccgccaaggggtgcgatacacgatgcacgaccgctctggtggagatcggatcacctcgcggattggtttgagtgtcgaag

SEQ ID NO: 658187 - DNA, 369 bp, Homo sapiens
  misc_feature (26)..(26): n is a, c, g, or t
  misc_feature (56)..(56): n is a, c, g, or t
gaaagaccccaagtctcgcctctgtnaacccccaggctggaagtgcaagtggcccnaatctcggcccgctgcaacctccaacctccctgggctcaagcgatcctgaaactgcctcagcctctctagtagctgggactgcaggcatgcaccaccacacccagctaattttgtgtgtgtgtgtgtgtgtgtgtgtgtgtgtgtgtgtgtgtgtgtgtgtgtatttttggtagaggtggggtttcaccatgttggcagggctggtctcgaactcctatcttcaggtgaactgcctgccttggcctccgaagtgctggggttacagctgtgagccaccattcccagccaacaatgacttttgaagatgcttgc

SEQ ID NO: 658188 - DNA, 159 bp, Homo sapiens
ggatttacgggagtagtccaagaagcacatattagtgaccaaagatagcatcaactgtatttgaaggaactgtagtattgcgcattttatgacatttttataaagtactgtaactactttcatttgagggtgctatgttgatggggacagactaactca

SEQ ID NO: 658189 - DNA, 127 bp, Homo sapiens
cgctatgcggctgctttcctactgtgtactgtagcatcttcacagtggttacagcttcttttggattagagggggatttgatgggagaaagctggagatctgaacccagccatttgcacactataag

SEQ ID NO: 658190 - DNA, 988 bp, Homo sapiens
gtatggttagtggcatgctaggcctcaggtgtttctgctgagtgtggcaggcggatctcgatggtagatacctgcgatgatacacgtttttttttctctgtgaagtataaaaacttaatacaatttagttatccaatatatggcgagatagggttacataggataattgattagtcgttaacgttgtttaaatgtcattaatataatatggctgtagagattgtaatgagcacacttatgaagaggttaagaagaggttgcaattgatggaagtgaaaagggatataaggttgctaatacttgacgtgtgttatagatgtgatgttttttcattggtcgtgacattaatgtatttatatgcaaaagtggaatgtatggactaatcgtagccctcgtaatttaactgccatataccatatgctccaatgcgttaagaattactatgtctgagtgacttaaaacgatggctttagaggtttagtttaatagtcgtaggtgataaaatatgaactttgaaaggcgatcttttataacagagattataatcgcacgtgaattagaaagacctttgagaatccattggacgccaggtaggattagcttcattatggcctatgttaacgcgatctactaagtgtcacacgataaatgtacatcttagttgggcagcggtatgaggtccctattgggagccagataagatgtgtggtgggtaactggaagactgaagtatgggatgcgagataagatagagagctagggaaatcgcagatctaccactatagaggcaaggcgttattttgactgaaagtggactcctcataaagacagctcggcacaagctcatgcaacttcattttaagacatggcatgaaaccgcacagaatttacggtcggttaatgccccctcacgttgcataacgacacaacttcccgcgcgaaaaacaatgggccaaaacactctgcgaatgtccaagccaacgtggat

SEQ ID NO: 658191 - DNA, 867 bp, Homo sapiens
  misc_feature (767)..(767): n is a, c, g, or t
  misc_feature (867)..(867): n is a, c, g, or t
ggaaaagacattcgcccgcgtccgcacgcgctgcttgcaaaggggtggggttgtggagtggatgcttggcaagatggcgggagcggcgtccgccaaagtattctaccgccagcaccttcgtgaagcccattttcagtcgggacatgaacgaggcaagcggagggtgccgcgagctctaccgcgcctgtatcgggaggtaccgaacacttgtgcaccatttccagtcgtgacatcactgtgaaacatgggacgggataaagtccgagaaatgtttatgagagaatgcccatgtcacagaccccagggtgttgatctcctgtcataagggaaagatcgaatgaaagaaacacttacggtatggaacgcagcggacacatgttatgcggttcttccatgaaacagaagcgccagggccaaaggatttcctatccaagttctatgtggcgccacgatccatgaagtcattcagtggaaagatgcacgtgatactatttaagagcacaaataatcactatacaatcaaaaaaaaaacaaaaaaaaaaaaaattgggcggcgcggcggggccaagaaaaagtttcaagaccatcggttggggggcggggaccgagggtttgtggaacgtggcccacacggtgccaaggaacacgcggcagacacagtgcgtggttttcccccacaaaagccgggggaacgcggttgcgaaccatcccgaggttggagcaagggtcaacagggccaggcgctatccccccgcgcgggtgagacnacacacaaacaaaagaagacgcacgacgaatgagaaaaacaagcgaaagacacaagaagaacacgaaaagagaacgacgaaacaagaacgctacaaatan

SEQ ID NO: 658192 - DNA, 2313 bp, Homo sapiens
  misc_feature (2)..(2): n is a, c, g, or t
tnttccagaagcgagatgctgttccaaagcggagatgctgggtggtatactgtgtcagccaagaatgaagcagggattgtgtcctgtactgccaggctggacgtttacacccagtggcatcagcagtcacagagcaccaagccaaaaaaagtacggccctcagccagtcgctatgcagcactttcggaccagggactagacatcaaagcagcgttccaacctgaggccaacccatctcacctgacactgaatactgccttggtagaaagtgaggacctgtaatccagcattcttgttaaagctgaaacactgaaacagccattgccttgaccaacatattcctttgtcacattatgtaaaaggcagaaacatacctttgactataagaaattaaaaaaaaacaccaaaataatatttttcttacttgatataccaaacttagtttaagtagataatgctaatacaaatatacacattgcacagaaaatacacatttactgtccaatttaaaactttggaattgctgtgattaaagtgatcaaaatgccaaaatactaaaggaaatcaattgttcacaggtaactacaatttgtattatctacaagtgcctttaaacacaagatataggtgctgtgtagcctgatagtgtgaaatgtttaatgagggagttgtaccacaaacagtactacaatgattctgaagcacagtgtattcagacagatacagtgaaccaagtgcaatatgtaaggatgaaagaagaagagatgacaaagaaatccaagtaaatgccttgtctttgcaaatgtttttatattaaatcataaggaaggaactacttgccttaaatgttaatatcaaaagagttttctaacaaggttaataccttagttcttaacattttttttctttatgtgtagtgttttcatgctaccttggtaggaaacttatttacaaaccatattaaaaggctaatttaaatataaataatataaagtgctctgaataaagcagaaatatattacagttcattccacagaaagcatccaaaccacccaaatgaccaaggcatatatagtatttggaggaatcaggggtttggaaggagtagggaggagaatgaaggaaaatgcaaccagcatgattatagtgtgttcatttagataaaagtagaaggcacaggagaggtagcaaaggccaggcttttctttggttttcttcaaacataggtgaaaaaaacactgccattcacaagtcaaggaacccagggccagctggaagtgtggagcacacatgctgtggagcacacatgctgtggagattgcagtgtgtctgaggtttgtgtagtagtggaagattttaggtatgtagagcaagttgaaaatggattgagactgcatggtggcataaatgagaaattgcctgtagcatctagtctacttgaaggaagtggagacataaggagagacaaaaacaggtttgtgccataaagtattttttcaaagacaccaagatgtggtaaatgaaaattattagttcacttccctgctgccatgaaactttgccttaagaaggtgctggattccaaggtttgtaaaggcatctcggtaaagactgctttttgaatgcatatgattttgcatcagctagactgagttgattctgaccagacttgatggttttaagtcggaaccgataaattttaaaaaggagaaaaaataatttgacctagtagtataaaacatgaggctttaatggtactttgctatgaaaagaaaacactgtattccttatgcaaaacacatgtatctttcattatttataagtggcctctcttagctcagttactcaattcatacgtagtattttttaaaataattttatatctgtgtaccaccccatatatttcatattactgtttcacatgtacagctttctacttctttgtaagaacaccaaccaaccaaggtttaagtgattaataggcttgagcaccgggtggcagatgttctatgcagtgtggttcaagtttctttgaccgcacttatatgcattgctaatatggaatttaagataccatacacagtctctcatggacctatctctattgtagaattatgacttatgtcttacttggcaaatttttctgaatgtgacctttttttgctgatttgctgggtttgggattaactagcattattttgccacctttatattgtatttataaaaaaaaaagtactatcaatcaatcatactactttggattgttgtgctggtgtaatgtggatttaacatcaataaatatttgacaaataa

SEQ ID NO: 658193 - DNA, 2335 bp, Homo sapiens
ttccatgtttctaccatggatgtgttcaggtgccttgcatctatctagacattctgtatttatttgaaatatctaaaggctttccaagtatatcttgattaaaaatcttaatttactctttttctttgtagcccagtggcatcagcagtcacagagcaccaagccaaaaaaagtacggccctcagccagtcgctatgcagcactttcggaccagggactagacatcaaagcagcgttccaacctgaggccaacccatctcacctgacactgaatactgccttggtagaaagtgaggacctgtaatccagcattcttgttaaagctgaaacactgaaacagccattgccttgaccaacatattcctttgtcacattatgtaaaaggcagaaacatacctttgactataagaaattaaaaaaaaacaccaaaataatatttttcttacttgatataccaaacttagtttaagtagataatgctaatacaaatatacacattgcacagaaaatacacatttactgtccaatttaaaactttggaattgctgtgattaaagtgatcaaaatgccaaaatactaaaggaaatcaattgttcacaggtaactacaatttgtattatctacaagtgcctttaaacacaagatataggtgctgtgtagcctgatagtgtgaaatgtttaatgagggagttgtaccacaaacagtactacaatgattctgaagcacagtgtattcagacagatacagtgaaccaagtgcaatatgtaaggatgaaagaagaagagatgacaaagaaatccaagtaaatgccttgtctttgcaaatgtttttatattaaatcataaggaaggaactacttgccttaaatgttaatatcaaaagagttttctaacaaggttaataccttagttcttaacattttttttctttatgtgtagtgttttcatgctaccttggtaggaaacttatttacaaaccatattaaaaggctaatttaaatataaataatataaagtgctctgaataaagcagaaatatattacagttcattccacagaaagcatccaaaccacccaaatgaccaaggcatatatagtatttggaggaatcaggggtttggaaggagtagggaggagaatgaaggaaaatgcaaccagcatgattatagtgtgttcatttagataaaagtagaaggcacaggagaggtagcaaaggccaggcttttctttggttttcttcaaacataggtgaaaaaaacactgccattcacaagtcaaggaacccagggccagctggaagtgtggagcacacatgctgtggagcacacatgctgtggagattgcagtgtgtctgaggtttgtgtagtagtggaagattttaggtatgtagagcaagttgaaaatggattgagactgcatggtggcataaatgagaaattgcctgtagcatctagtctacttgaaggaagtggagacataaggagagacaaaaacaggtttgtgccataaagtattttttcaaagacaccaagatgtggtaaatgaaaattattagttcacttccctgctgccatgaaactttgccttaagaaggtgctggattccaaggtttgtaaaggcatctcggtaaagactgctttttgaatgcatatgattttgcatcagctagactgagttgattctgaccagacttgatggttttaagtcggaaccgataaattttaaaaaggagaaaaaataatttgacctagtagtataaaacatgaggctttaatggtactttgctatgaaaagaaaacactgtattccttatgcaaaacacatgtatctttcattatttataagtggcctctcttagctcagttactcaattcatacgtagtattttttaaaataattttatatctgtgtaccaccccatatatttcatattactgtttcacatgtacagctttctacttctttgtaagaacaccaaccaaccaaggtttaagtgattaataggcttgagcaccgggtggcagatgttctatgcagtgtggttcaagtttctttgaccgcacttatatgcattgctaatatggaatttaagataccatacacagtctctcatggacctatctctattgtagaattatgacttatgtcttacttggcaaatttttctgaatgtgacctttttttgctgatttgctgggtttgggattaactagcattattttgccacctttatattgtatttataaaaaaaaaagtactatcaatcaatcatactactttggattgttgtgctggtgtaatgtggatttaacatcaataaatatttgacaaataa

SEQ ID NO: 658194 - DNA, 2144 bp, Homo sapiens
gctggtctagaggtatccctcccatatgagacatcaaagcagcgttccaacctgaggccaacccatctcacctgacactgaatactgccttggtagaaagtgaggacctgtaatccagcattcttgttaaagctgaaacactgaaacagccattgccttgaccaacatattcctttgtcacattatgtaaaaggcagaaacatacctttgactataagaaattaaaaaaaaacaccaaaataatatttttcttacttgatataccaaacttagtttaagtagataatgctaatacaaatatacacattgcacagaaaatacacatttactgtccaatttaaaactttggaattgctgtgattaaagtgatcaaaatgccaaaatactaaaggaaatcaattgttcacaggtaactacaatttgtattatctacaagtgcctttaaacacaagatataggtgctgtgtagcctgatagtgtgaaatgtttaatgagggagttgtaccacaaacagtactacaatgattctgaagcacagtgtattcagacagatacagtgaaccaagtgcaatatgtaaggatgaaagaagaagagatgacaaagaaatccaagtaaatgccttgtctttgcaaatgtttttatattaaatcataaggaaggaactacttgccttaaatgttaatatcaaaagagttttctaacaaggttaataccttagttcttaacattttttttctttatgtgtagtgttttcatgctaccttggtaggaaacttatttacaaaccatattaaaaggctaatttaaatataaataatataaagtgctctgaataaagcagaaatatattacagttcattccacagaaagcatccaaaccacccaaatgaccaaggcatatatagtatttggaggaatcaggggtttggaaggagtagggaggagaatgaaggaaaatgcaaccagcatgattatagtgtgttcatttagataaaagtagaaggcacaggagaggtagcaaaggccaggcttttctttggttttcttcaaacataggtgaaaaaaacactgccattcacaagtcaaggaacccagggccagctggaagtgtggagcacacatgctgtggagcacacatgctgtggagattgcagtgtgtctgaggtttgtgtagtagtggaagattttaggtatgtagagcaagttgaaaatggattgagactgcatggtggcataaatgagaaattgcctgtagcatctagtctacttgaaggaagtggagacataaggagagacaaaaacaggtttgtgccataaagtattttttcaaagacaccaagatgtggtaaatgaaaattattagttcacttccctgctgccatgaaactttgccttaagaaggtgctggattccaaggtttgtaaaggcatctcggtaaagactgctttttgaatgcatatgattttgcatcagctagactgagttgattctgaccagacttgatggttttaagtcggaaccgataaattttaaaaaggagaaaaaataatttgacctagtagtataaaacatgaggctttaatggtactttgctatgaaaagaaaacactgtattccttatgcaaaacacatgtatctttcattatttataagtggcctctcttagctcagttactcaattcatacgtagtattttttaaaataattttatatctgtgtaccaccccatatatttcatattactgtttcacatgtacagctttctacttctttgtaagaacaccaaccaaccaaggtttaagtgattaataggcttgagcaccgggtggcagatgttctatgcagtgtggttcaagtttctttgaccgcacttatatgcattgctaatatggaatttaagataccatacacagtctctcatggacctatctctattgtagaattatgacttatgtcttacttggcaaatttttctgaatgtgacctttttttgctgatttgctgggtttgggattaactagcattattttgccacctttatattgtatttataaaaaaaaaagtactatcaatcaatcatactactttggattgttgtgctggtgtaatgtggatttaacatcaataaatatttgacaaataa

SEQ ID NO: 658195 - DNA, 2363 bp, Homo sapiens
  misc_feature (2)..(2): n is a, c, g, or t
tnttccagaagcgagatgctgttccaaagcggagatgctgggtggtatactgtgtcagccaagaatgaagcagggattgtgtcctgtactgccaggctggacgtttacacccagtggcatcagcagtcacagagcaccaagccaaaaaaagtacggccctcagccagtcgctatgcagcactttcggaccagggactagacatcaaagcagcgttccaacctgaggccaacccatctcacctgacactgaatactgccttggtagaaagtgaggacctgtaatccagcattcttgttaaagctgaaacactgaaacagccattgccttgaccaacatattcctttgtcacattatgtaaaaggcagaaacatacctttgactataagaaattaaaaaaaaacaccaaaataatatttttcttacttgatataccaaacttagtttaagtagataatgctaatacaaatatacacattgcacagaaaatacacatttactgtccaatttaaaactttggaattgctgtgattaaagtgatcaaaatgccaaaatactaaaggaaatcaattgttcacaggtaactacaatttgtattatctacaagtgcctttaaacacaagatataggtgctgtgtagcctgatagtgtgaaatgtttaatgagggagttgtaccacaaacagtactacaatgattctgaagcacagtgtattcagacagatacagtgaaccaagtgcaatatgtaaggatgaaagaagaagagatgacaaagaaatccaagtaaatgccttgtctttgcaaatgtttttatattaaatcataaggaaggaactacttgccttaaatgttaatatcaaaagagttttctaacaaggttaataccttagttcttaacattttttttctttatgtgtagtgttttcatgctaccttggtaggaaacttatttacaaaccatattaaaaggctaatttaaatataaataatataaagtgctctgaataaagcagaaatatattacagttcattccacagaaagcatccaaaccacccaaatgaccaaggcatatatagtatttggaggaatcaggggtttggaaggagtagggaggagaatgaaggaaaatgcaaccagcatgattatagtgtgttcatttagataaaagtagaaggcacaggagaggtagcaaaggccaggcttttctttggttttcttcaaacataggtgaaaaaaacactgccattcacaagtcaaggaacccagggccagctggaagtgtggagcacacatgctgtggagcacacatgctgtggagattgcagtgtgtctgaggtttgtgtagtagtggaagattttaggtatgtagagcaagttgaaaatggattgagactgcatggtggcataaatgagaaattgcctgtagcatctagtctacttgaaggaagtggagacataaggagagacaaaaacaggtttgtgccataaagtattttttcaaagacaccaagatgtggtaaatgaaaattattagttcacttccctgctgccatgaaactttgccttaagaaggtgctggattccaaggtttgtaaaggcatctcggtaaagactgctttttgaatgcatatgattttgcatcagctagactgagttgattctgaccagacttgatggttttaagtcggaaccgataaattttaaaaaggagaaaaaataatttgacctagtagtataaaacatgaggctttaatggtactttgctatgaaaagaaaacactgtattccttatgcaaaacacatgtatctttcattatttataagtggcctctcttagctcagttactcaattcatacgtagtattttttaaaataattttatatctgtgtaccaccccatatatttcatattactgtttcacatgtacagctttctacttctttgtaagaacaccaaccaaccaaggtttaagtgattaataggcttgagcaccgggtggcagatgttctatgcagtgtggttcaagtttctttgaccgcacttatatgcattgctaatatggaatttaagataccatacacagtctctcatggacctatctctattgtagaattatgacttatgtcttacttggcaaatttttctgaatgtgacctttttttgctgatttgctgggtttgggattaactagcattattttgccacctttatattgtatttataaaaaaaaaagtactatcaatcaatcatactactttggattgttgtgctggtgtaatgtggatttaacatcaataaatatttgacaaataatagttgcagttttgtgaagcaaaataaatattcagttttaaaaaaaaaaa

SEQ ID NO: 658196 - DNA, 2368 bp, Homo sapiens
  misc_feature (2)..(2): n is a, c, g, or t
tnttccagaagcgagatgctgttccaaagcggagatgctgggtggtatactgtgtcagccaagaatgaagcagggattgtgtcctgtactgccaggctggacgtttacacccagtggcatcagcagtcacagagcaccaagccaaaaaaagtacggccctcagccagtcgctatgcagcactttcggaccagggactagacatcaaagcagcgttccaacctgaggccaacccatctcacctgacactgaatactgccttggtagaaagtgaggacctgtaatccagcattcttgttaaagctgaaacactgaaacagccattgccttgaccaacatattcctttgtcacattatgtaaaaggcagaaacatacctttgactataagaaattaaaaaaaaacaccaaaataatatttttcttacttgatataccaaacttagtttaagtagataatgctaatacaaatatacacattgcacagaaaatacacatttactgtccaatttaaaactttggaattgctgtgattaaagtgatcaaaatgccaaaatactaaaggaaatcaattgttcacaggtaactacaatttgtattatctacaagtgcctttaaacacaagatataggtgctgtgtagcctgatagtgtgaaatgtttaatgagggagttgtaccacaaacagtactacaatgattctgaagcacagtgtattcagacagatacagtgaaccaagtgcaatatgtaaggatgaaagaagaagagatgacaaagaaatccaagtaaatgccttgtctttgcaaatgtttttatattaaatcataaggaaggaactacttgccttaaatgttaatatcaaaagagttttctaacaaggttaataccttagttcttaacattttttttctttatgtgtagtgttttcatgctaccttggtaggaaacttatttacaaaccatattaaaaggctaatttaaatataaataatataaagtgctctgaataaagcagaaatatattacagttcattccacagaaagcatccaaaccacccaaatgaccaaggcatatatagtatttggaggaatcaggggtttggaaggagtagggaggagaatgaaggaaaatgcaaccagcatgattatagtgtgttcatttagataaaagtagaaggcacaggagaggtagcaaaggccaggcttttctttggttttcttcaaacataggtgaaaaaaacactgccattcacaagtcaaggaacccagggccagctggaagtgtggagcacacatgctgtggagcacacatgctgtggagattgcagtgtgtctgaggtttgtgtagtagtggaagattttaggtatgtagagcaagttgaaaatggattgagactgcatggtggcataaatgagaaattgcctgtagcatctagtctacttgaaggaagtggagacataaggagagacaaaaacaggtttgtgccataaagtattttttcaaagacaccaagatgtggtaaatgaaaattattagttcacttccctgctgccatgaaactttgccttaagaaggtgctggattccaaggtttgtaaaggcatctcggtaaagactgctttttgaatgcatatgattttgcatcagctagactgagttgattctgaccagacttgatggttttaagtcggaaccgataaattttaaaaaggagaaaaaataatttgacctagtagtataaaacatgaggctttaatggtactttgctatgaaaagaaaacactgtattccttatgcaaaacacatgtatctttcattatttataagtggcctctcttagctcagttactcaattcatacgtagtattttttaaaataattttatatctgtgtaccaccccatatatttcatattactgtttcacatgtacagctttctacttctttgtaagaacaccaaccaaccaaggtttaagtgattaataggcttgagcaccgggtggcagatgttctatgcagtgtggttcaagtttctttgaccgcacttatatgcattgctaatatggaatttaagataccatacacagtctctcatggacctatctctattgtagaattatgacttatgtcttacttggcaaatttttctgaatgtgacctttttttgctgatttgctgggtttgggattaactagcattattttgccacctttatattgtatttataaaaaaaaaagtactatcaatcaatcatactactttggattgttgtgctggtgtaatgtggatttaacatcaataaatatttgacaaataatattgtcagttttttgaagccaaataataaataataaaaaaaaaaataataaata

SEQ ID NO: 658197 - DNA, 952 bp, Homo sapiens
cccgtcacactccagagcggatgtgaggggcgccgatggcggagggaacggcggaggctcctctagtaagaatggtggtggtggcgactcgggagccggagctttggaacgaggagtggcgcccattaatgcgtcaatacctcaccaccaagggagcagtttcaccaattcctggaagccaaagggcaggagaagacttgccgggaaaccgaggtaggagaccctgctggcaatgagctggcgtgagcctgaggctaagcggatccgactggaggatggacagacggcggacgggcaggacggaggaggcagcagagcccggggagcagctacagactcagaagagggcccggggacaagacaagggccggccccatgtgaagcccacgaactaggacaaagaacaggctgtgtccctccctaatccaggagctcggcgttgtctaaggtgtttcttcgggtgatcggctgccgctttctgcacgacgttggggcgctacctggagaccaagccggcgaacgtgggcgccccgcgtgcgtgctcttcgagaccttcgtgccggtgcccctacgggtgacctggcgtttcgctggggcccagcctgtagggcccgttgggacgagcaacctggtgcaggaggagttggcgggcccgcgggaccagcccccgtccaattccgcaagtggctggacctgaagccctgcagcgatgcagctgcggaaaccggcgaggtccgttcgagcgagctgcgcagggcctgtgccgggttcagccagggtcccacacccggctgcctgctgtccccggggggcacggcaggcgaggcggtccaggccgacacttgtgtgccacgaggtccgcagggcgggggatacgcctccagcgcccgtggcggcttgtggcctgtaggttacgcttttcggttcgcccttaaaaaacgtgggccctgca

SEQ ID NO: 658198 - DNA, 742 bp, Homo sapiens
  misc_feature (20)..(20): n is a, c, g, or t
cctcggcaatatcggacagngaagacattctcggtaaagactgctttttgaatgcatatgattttgcatcagctagactgagttgattctgaccagacttgatggttttaagtcggaaccgataaattttaaaaaggagaaaaaataatttgacctagtagtataaaacatgaggctttaatggtactttgctatgaaaagaaaacactgtattccttatgcaaaacacatgtatctttcattatttataagtggcctctcttagctcagttactcaattcatacgtagtattttttaaaataattttatatctgtgtaccaccccatatatttcatattactgtttcacatgtacagctttctacttctttgtaagaacaccaaccaaccaaggtttaagtgattaataggcttgagcaccgggtggcagatgttctatgcagtgtggttcaagtttctttgaccgcacttatatgcattgctaatatggaatttaagataccatacacagtctctcatggacctatctctattgtagaattatgacttatgtcttacttggcaaatttttctgaatgtgacctttttttgctgatttgctgggtttgggattaactagcattattttgccacctttatattgtatttataaaaaaaaaagtactatcaatcaatcatactactttggattgttgtgctggtgtaatgtggatttaacatcaataaatatttgacaaataa

SEQ ID NO: 658199 - DNA, 195 bp, Homo sapiens
gtaaaaagtaaaaatagatgctggtgaggttgcagagaaaagagaatgcatatacattgttgattggaatgtaaattagtttggccattgttgaagcagtataccaatttctcaaagagcttaaaacagaagtgccatttgacccagcaatcccattactgggatattttcaaaagaaatccaatcattctacca

SEQ ID NO: 658200 - DNA, 2306 bp, Homo sapiens
  misc_feature (2)..(2): n is a, c, g, or t
tnttccagaagcgagatgctgttccaaagcggagatgctgggtggtatactgtgtcagccaagaatgaagcagggattgtgtcctgtactgccaggctggacgtttacacccagtggcatcagcagtcacagagcaccaagccaaaaaaagtacggccctcagccagtcgctatgcagcactttcggaccagggactagacatcaaagcagcgttccaacctgaggccaacccatctcacctgacactgaatactgccttggtagaaagtgaggacctgtaatccagcattcttgttaaagctgaaacactgaaacagccattgccttgaccaacatattcctttgtcacattatgtaaaaggcagaaacatacctttgactataagaaattaaaaaaaaacaccaaaataatatttttcttacttgatataccaaacttagtttaagtagataatgctaatacaaatatacacattgcacagaaaatacacatttactgtccaatttaaaactttggaattgctgtgattaaagtgatcaaaatgccaaaatactaaaggaaatcaattgttcacaggtaactacaatttgtattatctacaagtgcctttaaacacaagatataggtgctgtgtagcctgatagtgtgaaatgtttaatgagggagttgtaccacaaacagtactacaatgattctgaagcacagtgtattcagacagatacagtgaaccaagtgcaatatgtaaggatgaaagaagaagagatgacaaagaaatccaagtaaatgccttgtctttgcaaatgtttttatattaaatcataaggaaggaactacttgccttaaatgttaatatcaaaagagttttctaacaaggttaataccttagttcttaacattttttttctttatgtgtagtgttttcatgctaccttggtaggaaacttatttacaaaccatattaaaaggctaatttaaatataaataatataaagtgctctgaataaagcagaaatatattacagttcattccacagaaagcatccaaaccacccaaatgaccaaggcatatatagtatttggaggaatcaggggtttggaaggagtagggaggagaatgaaggaaaatgcaaccagcatgattatagtgtgttcatttagataaaagtagaaggcacaggagaggtagcaaaggccaggcttttctttggttttcttcaaacataggtgaaaaaaacactgccattcacaagtcaaggaacccagggccagctggaagtgtggagcacacatgctgtggagcacacatgctgtggagattgcagtgtgtctgaggtttgtgtagtagtggaagattttaggtatgtagagcaagttgaaaatggattgagactgcatggtggcataaatgagaaattgcctgtagcatctagtctacttgaaggaagtggagacataaggagagacaaaaacaggtttgtgccataaagtattttttcaaagacaccaagatgtggtaaatgaaaattattagttcacttccctgctgccatgaaactttgccttaagaaggtgctggattccaaggtttgtaaaggcatctcggtaaagactgctttttgaatgcatatgattttgcatcagctagactgagttgattctgaccagacttgatggttttaagtcggaaccgataaattttaaaaaggagaaaaaataatttgacctagtagtataaaacatgaggctttaatggtactttgctatgaaaagaaaacactgtattccttatgcaaaacacatgtatctttcattatttataagtggcctctcttagctcagttactcaattcatacgtagtattttttaaaataattttatatctgtgtaccaccccatatatttcatattactgtttcacatgtacagctttctacttctttgtaagaacaccaaccaaccaaggtttaagtgattaataggcttgagcaccgggtggcagatgttctatgcagtgtggttcaagtttctttgaccgcacttatatgcattgctaatatggaatttaagataccatacacagtctctcatggacctatctctattgtagaattatgacttatgtcttacttggcaaatttttctgaatgtgacctttttttgctgatttgctgggtttgggattaactaccaatacccttcccccactataatgccctcatcaaaaccaaggactatcggtcattcaaaccacgtggggtcgtggtgctggtgttatgtgcatccaactacaatttatttttggc

SEQ ID NO: 658201 - DNA, 205 bp, Homo sapiens
gggatatttacacagtggcttctaagtatcttggcttcgtctctactaaaaatacgaaactagccaggtgtgatggtgcgtgcctgtggtcctagctgctcgggaggctgaggcgggagaatggcttgagcccaggaggggaggctgcagtgagccaggatggtgccactgcactcccccctgggtgacggagcaagaatctctc

SEQ ID NO: 658202 - DNA, 2321 bp, Homo sapiens
  misc_feature (2)..(2): n is a, c, g, or t
tnttccagaagcgagatgctgttccaaagcggagatgctgggtggtatactgtgtcagccaagaatgaagcagggattgtgtcctgtactgccaggctggacgtttacacccagtggcatcagcagtcacagagcaccaagccaaaaaaagtacggccctcagccagtcgctatgcagcactttcggaccagggactagacatcaaagcagcgttccaacctgaggccaacccatctcacctgacactgaatactgccttggtagaaagtgaggacctgtaatccagcattcttgttaaagctgaaacactgaaacagccattgccttgaccaacatattcctttgtcacattatgtaaaaggcagaaacatacctttgactataagaaattaaaaaaaaacaccaaaataatatttttcttacttgatataccaaacttagtttaagtagataatgctaatacaaatatacacattgcacagaaaatacacatttactgtccaatttaaaactttggaattgctgtgattaaagtgatcaaaatgccaaaatactaaaggaaatcaattgttcacaggtaactacaatttgtattatctacaagtgcctttaaacacaagatataggtgctgtgtagcctgatagtgtgaaatgtttaatgagggagttgtaccacaaacagtactacaatgattctgaagcacagtgtattcagacagatacagtgaaccaagtgcaatatgtaaggatgaaagaagaagagatgacaaagaaatccaagtaaatgccttgtctttgcaaatgtttttatattaaatcataaggaaggaactacttgccttaaatgttaatatcaaaagagttttctaacaaggttaataccttagttcttaacattttttttctttatgtgtagtgttttcatgctaccttggtaggaaacttatttacaaaccatattaaaaggctaatttaaatataaataatataaagtgctctgaataaagcagaaatatattacagttcattccacagaaagcatccaaaccacccaaatgaccaaggcatatatagtatttggaggaatcaggggtttggaaggagtagggaggagaatgaaggaaaatgcaaccagcatgattatagtgtgttcatttagataaaagtagaaggcacaggagaggtagcaaaggccaggcttttctttggttttcttcaaacataggtgaaaaaaacactgccattcacaagtcaaggaacccagggccagctggaagtgtggagcacacatgctgtggagcacacatgctgtggagattgcagtgtgtctgaggtttgtgtagtagtggaagattttaggtatgtagagcaagttgaaaatggattgagactgcatggtggcataaatgagaaattgcctgtagcatctagtctacttgaaggaagtggagacataaggagagacaaaaacaggtttgtgccataaagtattttttcaaagacaccaagatgtggtaaatgaaaattattagttcacttccctgctgccatgaaactttgccttaagaaggtgctggattccaaggtttgtaaaggcatctcggtaaagactgctttttgaatgcatatgattttgcatcagctagactgagttgattctgaccagacttgatggttttaagtcggaaccgataaattttaaaaaggagaaaaaataatttgacctagtagtataaaacatgaggctttaatggtactttgctatgaaaagaaaacactgtattccttatgcaaaacacatgtatctttcattatttataagtggcctctcttagctcagttactcaattcatacgtagtattttttaaaataattttatatctgtgtaccaccccatatatttcatattactgtttcacatgtacagctttctacttctttgtaagaacaccaaccaaccaaggtttaagtgattaataggcttgagcaccgggtggcagatgttctatgcagtgtggttcaagtttctttgaccgcacttatatgcattgctaatatggaatttaagataccatacacagtctctcatggacctatctctattgtagaattatgacttatgtcttacttggcaaatttttctgaatgtgacctttttttgctgatttgctgggtttgggattaactagtactatcaatcaatcatactactttggattgttgtgctggtgtaatgtggatttaacatcaataaatatttgacaaataatagttgcagttttgtgaagcaaaataaatattcagttttaaaaaaaaaaa

SEQ ID NO: 658203 - DNA, 328 bp, Homo sapiens
  misc_feature (18)..(18): n is a, c, g, or t
  misc_feature (24)..(24): n is a, c, g, or t
  misc_feature (214)..(214): n is a, c, g, or t
  misc_feature (223)..(223): n is a, c, g, or t
  misc_feature (225)..(225): n is a, c, g, or t
  misc_feature (236)..(236): n is a, c, g, or t
gaagccatgctgtccgcntcccgnagtcgcacagccatcacctcctccttgctcttgcaactcgcctcggcctgcttgcggcgctttcgctgagtgcgtctgcagccccttgttctgtgcagccaggtactgcagcttctcctgcaggccgcgcgtcgcctccacgcggttcagaaggttgcggtggatgtggtcctgcgtctcaagttccacncacgcgctngnagctcgcgccntgccaggcctgggcctgcgcagacgcacgctcatcagctcgtcctgcagctcgcccacgaccagcttccgtggggactccttccagcggccc

SEQ ID NO: 658204 - DNA, 389 bp, Homo sapiens
  misc_feature (10)..(10): n is a, c, g, or t
  misc_feature (57)..(57): n is a, c, g, or t
  misc_feature (71)..(71): n is a, c, g, or t
  misc_feature (105)..(105): n is a, c, g, or t
  misc_feature (143)..(143): n is a, c, g, or t
  misc_feature (312)..(313): n is a, c, g, or t
  misc_feature (334)..(335): n is a, c, g, or t
gggccctggnaatctaaaacccgtgtcaacctaactaacttggactgggatccaccnaactaatgtccccnaaaaaagccgtgaagtcaaggcctgggttggcancctgggtcactggaggaccaacccctgctgtccaaaanaccactgcttcctaccccaggtgcgactgccccccaaaccttccctgccccgtcctgagtgccccttcctgtcctaagccccctgctctcttctgagccccttcccctgcctgaggacccttccccatcctgagcccccttccctgtcctaagcctgacgcctgtcgannctccggccctcccctcccagnnagctggtggtgggcgctaatcctcctgagtgctggacctcattaaagtgcatga

SEQ ID NO: 658205 - DNA, 2343 bp, Homo sapiens
  misc_feature (2)..(2): n is a, c, g, or t
  misc_feature (2098)..(2098): n is a, c, g, or t
tnttccagaagcgagatgctgttccaaagcggagatgctgggtggtatactgtgtcagccaagaatgaagcagggattgtgtcctgtactgccaggctggacgtttacacccagtggcatcagcagtcacagagcaccaagccaaaaaaagtacggccctcagccagtcgctatgcagcactttcggaccagggactagacatcaaagcagcgttccaacctgaggccaacccatctcacctgacactgaatactgccttggtagaaagtgaggacctgtaatccagcattcttgttaaagctgaaacactgaaacagccattgccttgaccaacatattcctttgtcacattatgtaaaaggcagaaacatacctttgactataagaaattaaaaaaaaacaccaaaataatatttttcttacttgatataccaaacttagtttaagtagataatgctaatacaaatatacacattgcacagaaaatacacatttactgtccaatttaaaactttggaattgctgtgattaaagtgatcaaaatgccaaaatactaaaggaaatcaattgttcacaggtaactacaatttgtattatctacaagtgcctttaaacacaagatataggtgctgtgtagcctgatagtgtgaaatgtttaatgagggagttgtaccacaaacagtactacaatgattctgaagcacagtgtattcagacagatacagtgaaccaagtgcaatatgtaaggatgaaagaagaagagatgacaaagaaatccaagtaaatgccttgtctttgcaaatgtttttatattaaatcataaggaaggaactacttgccttaaatgttaatatcaaaagagttttctaacaaggttaataccttagttcttaacattttttttctttatgtgtagtgttttcatgctaccttggtaggaaacttatttacaaaccatattaaaaggctaatttaaatataaataatataaagtgctctgaataaagcagaaatatattacagttcattccacagaaagcatccaaaccacccaaatgaccaaggcatatatagtatttggaggaatcaggggtttggaaggagtagggaggagaatgaaggaaaatgcaaccagcatgattatagtgtgttcatttagataaaagtagaaggcacaggagaggtagcaaaggccaggcttttctttggttttcttcaaacataggtgaaaaaaacactgccattcacaagtcaaggaacccagggccagctggaagtgtggagcacacatgctgtggagcacacatgctgtggagattgcagtgtgtctgaggtttgtgtagtagtggaagattttaggtatgtagagcaagttgaaaatggattgagactgcatggtggcataaatgagaaattgcctgtagcatctagtctacttgaaggaagtggagacataaggagagacaaaaacaggtttgtgccataaagtattttttcaaagacaccaagatgtggtaaatgaaaattattagttcacttccctgctgccatgaaactttgccttaagaaggtgctggattccaaggtttgtaaaggcatctcggtaaagactgctttttgaatgcatatgattttgcatcagctagactgagttgattctgaccagacttgatggttttaagtcggaaccgataaattttaaaaaggagaaaaaataatttgacctagtagtataaaacatgaggctttaatggtactttgctatgaaaagaaaacactgtattccttatgcaaaacacatgtatctttcattatttataagtggcctctcttagctcagttactcaattcatacgtagtattttttaaaataattttatatctgtgtaccaccccatatatttcatattactgtttcacatgtacagctttctacttctttgtaagaacaccaaccaaccaaggtttaagtgattaataggcttgagcaccgggtggcagatgttctatgcagtgtggttcaagtttctttgaccgcacttatatgcattgctaatatggaatttaagataccataccacatgttcttcttacaantggagaaccccttattatctcctttagtgtcgttagggacactataatgacttatgtcttacttggcaaatttttctgaatgtgacctttttttgctgatttgctgggtttgggattaactagcattattttgccacctttatattgtatttataaaaaaaaaagtactatcaatcaatcatactactttggattgttgtgctggtgtaatgtggatttaacatcaataaatatttgacaaataa

SEQ ID NO: 658206 - DNA, 2130 bp, Homo sapiens
  misc_feature (2)..(2): n is a, c, g, or t
tnttccagaagcgagatgctgttccaaagcggagatgctgggtggtatactgtgtcagccaagaatgaagcagggattgtgtcctgtactgccaggctggacgtttacacccagtggcatcagcagtcacagagcaccaagccaaaaaaagtacggccctcagccagtcgctatgcagcactttcggaccagggactagacatcaaagcagcgttccaacctgaggccaacccatctcacctgacactgaatactgccttggtagaaagtgaggacctgtaatccagcattcttgttaaagctgaaacactgaaacagccattgccttgaccaacatattcctttgtcacattatgtaaaaggcagaaacatacctttgactataagaaattaaaaaaaaacaccaaaataatatttttcttacttgatataccaaacttagtttaagtagataatgctaatacaaatatacacattgcacagaaaatacacatttactgtccaatttaaaactttggaattgctgtgattaaagtgatcaaaatgccaaaatactaaaggaaatcaattgttcacaggtaactacaatttgtattatctacaagtgcctttaaacacaagatataggtgctgtgtagcctgatagtgtgaaatgtttaatgagggagttgtaccacaaacagtactacaatgattctgaagcacagtgtattcagacagatacagtgaaccaagtgcaatatgtaaggatgaaagaagaagagatgacaaagaaatccaagtaaatgccttgtctttgcaaatgtttttatattaaatcataaggaaggaactacttgccttaaatgttaatatcaaaagagttttctaacaaggttaataccttagttcttaacattttttttctttatgtgtagtgttttcatgctaccttggtaggaaacttatttacaaaccatattaaaaggctaatttaaatataaataatataaagtgctctgaataaagcagaaatatattacagttcattccacagaaagcatccaaaccacccaaatgaccaaggcatatatagtatttggaggaatcaggggtttggaaggagtagggaggagaatgaaggaaaatgcaaccagcatgattatagtgtgttcatttagataaaagtagaaggcacaggagaggtagcaaaggccaggcttttctttggttttcttcaaacataggtgaaaaaaacactgccattcacaagtcaaggaacccagggccagctggaagtgtggagcacacatgctgtggagcacacatgctgtggagattgcagtgtgtctgaggtttgtgtagtagtggaagattttaggtatgtagagcaagttgaaaatggattgagactgcatggtggcataaatgagaaattgcctgtagcatctagtctacttgaaggaagtggagacataaggagagacaaaaacaggtttgtgccataaagtattttttcaaagacaccaagatgtggtaaatgaaaattattagttcacttccctgctgccatgaaactttgccttaagaaggtgctggattccaaggtttgtaaaggcatctcggtaaagactgctttttgaatgcatatgattttgcatcagctagactgagttgattctgaccagacttgatggttttaagtcggaaccgataaattttaaaaaggagaaaaaataatttgacctagtagtataaaacatgaggctttaatggtactttgctatgaaaagaaaacactgtattccttatgcaaaacacatgtatctttcattatttataagtggcctctcttagctcagttactcaattcatacgtagtattttttaaaataattttatatctgtgtaccaccccatatatttcatattactgtttcacatgtacagctttctacttctttgtaagaacaccaaccaaccaaggtttaagtgattaataggcttgagcaccgggtggcagatgttgcattattttgccacctttatattgtatttataaaaaaaaaagtactatcaatcaatcatactactttggattgttgtgctggtgtaatgtggatttaacatcaataaatatttgacaaataa

SEQ ID NO: 658207 - DNA, 611 bp, Homo sapiens
  misc_feature (111)..(111): n is a, c, g, or t
  misc_feature (172)..(172): n is a, c, g, or t
  misc_feature (252)..(252): n is a, c, g, or t
  misc_feature (288)..(289): n is a, c, g, or t
  misc_feature (326)..(326): n is a, c, g, or t
  misc_feature (378)..(378): n is a, c, g, or t
  misc_feature (573)..(573): n is a, c, g, or t
gggaactaaaaaaaagtgtgtaactttgaagcctttttatggatcaacatgaagatgaggggatctcaaacagaaagggcatcctggtggcaaaggttaatcattaccagnctgcaagagtagtttcaatggcaagaaagcagcaacagaatcaatgaaaacaaagcaatgnttagaatgccctttccccttctcctcctgacttgtagacactgattgtcttccttggacttagggaaccccttaggttcntgaaaaattcaatgatcaggctatagtagatggtcnncagtacacagcacaagatttttgataaactgacattntgaacccaaataactaattagaaaaatcaaacatgtgaaactactttatccnatgcataggggttatactggaaataaaatgtacaacattggaattctgaaggagaaaagtcctaaaagtttcaatatcaagaatcctgcacctgctgctacttatctagccttttgcttgatttctggctgatgaacttgcacaactcttgaaaacttaaaaacttgaaaatttgtcacttcaaaactacttttnccaaactatgaaatctcacctgatatataagatgccgg

SEQ ID NO: 658208 - DNA, 327 bp, Homo sapiens
  misc_feature (23)..(23): n is a, c, g, or t
ggaggtggagtcctgagcttgtngctcaggctggagtgcagtggcgcgacctcggctcaccgcaacctccacctcccgggttcaagcaactctcctgcctcagcctccagagcagctgggatcacaggcacccgccaccatgccgggccaatttttgtactttaagtaaagacggatttcgccatgttggccaggctggtctcgaactccgacctcaggcgatccgcccgcctcagtctcccaaagtgctgggattacaggcacgagccaccatgtcccgcctggtttgttttttaaaaaatctctggccttggagtcttaagcccc

SEQ ID NO: 658209 - DNA, 126 bp, Homo sapiens
  misc_feature (26)..(26): n is a, c, g, or t
  misc_feature (33)..(33): n is a, c, g, or t
atcgaactgaactgccagactctgtntcctcangccaatgatttgactcacagtctttcctcatacctaaaagaaatttgtcctaagtgggtaaaacttaggaagaaccacagtgagaaagaaatc

SEQ ID NO: 658210 - DNA, 347 bp, Homo sapiens
  misc_feature (172)..(172): n is a, c, g, or t
attgagatgaggtcttgctatgttgcccaggctggtcttgaactcctaggctcaaacagtcctttcacttcagcctcccaaagtgctgggacatgatggatcctcagtaagtgctggcagatactgaccacaggaaagaagtttgggggttggagggtggaggggttcctanacaaatcactactgtggtgtaaagaaatccaagaacttgaggactatttcacaaattgcatggttgtgctcctatcagaggcatccttctggtgtaatggcagacaatttaacacctctgaagattaagggtgcccaggagtgaacactatgtaagatacacaaagggaagagac

SEQ ID NO: 658211 - DNA, 230 bp, Homo sapiens
tgtctgcctctgggctgaccccataagccaccagttagccaagtagatggagcttggagcaggccgtggcacacatcacaaagctcgctgaggcctctgcctctgctgcctataaggcatacttcgcagagtgccttggcccagaggacagggaccagcctgcacaccaagcaaggtgacaaatagctggctgtggccatcggctccatcatcaatgccctttctgggga

SEQ ID NO: 658212 - DNA, 335 bp, Homo sapiens
gacgttgtgtttttgagacagagtcgtggtgttcacccgggctggagtgcagtggtgtgatcgtggctcactgcaacctccacttcccaggttcaagcaattttcctgcctcagtctcccaagtagctgggattacaggcgcccactgctacgtttggctaattgtttgtatttttagtagagacggggttttaccatgttggccaggctggtctcaaactcccgacctcaggtgatccacgcacctcggcctcccaaagtgctgggattacagacgtgagccactgcgcccagccaccatcttggctttgtttatttcataaatgtcgacgcgg

SEQ ID NO: 658213 - DNA, 1364 bp, Homo sapiens
tggaaaaagtcttgggggccagggggttgggcttgaaaccagcttgggggggttgcgattccttccttttttgggtctagaattttagtgtttagcgggttcttcgaagtggtggtggtaggggtgggggggcattccatttagttcacctcgcgagggttaagtgggaggaggtctcttctataccatattagagcgaaccttttcgcgccttcgaaaggcgagagaggcttctcaaattcagtgaaaacatttattataaatattaagcgggcgtgtttagaagaaaatggtgcatagtagaccccctacaagaggatggtatagagggtatgtgtttcacagtgtggggtgtgtatatgcgcgtatcgcggggataaagtccgggagagtaaacggcgggggggctatcccgggtatgaggcgccggagaaacatgttgtttggtggggcgaacacacaaacgtgttcacatatttttccccgcgcgcgtattcgcatattcatgagataaagtgggcaaatggggatatctagggggcgtgtcaagggttcaggggccccaaaagggggtgagttacgccttggcacacaatagcggggggagacaactcaaagtagagcaactgagaaacccctcacactaatgagatgcgcggcaccaaataaacccgggctccactaaaatggggaaaagagagcacataaaagcggggaacacccgggggccaaaacaaaacggtaaaacacacctgtgggtaccgcgtaggacaccgccaaaccgaagcgctcccaacagtgagaaaccgaacagtaccgcgcgggaaaaaatacacaaaaatggcgcccaactgcacacagcggaccacccaaaaaccaggggatacaacaaatcgagacaaccacactgaggaaacatcccccaaacaggaacggacacacgacaaagaaacgttgggccagagaaaacactccaaatcacccaaacatatgggagaccccccgaggagaaagtcagctggcagaaagcaacacgaccataacaaatcactcttgggaaccaatcccgacagaggacaaaaatcgcgaggacggaacaaacacaggagaaaccacgggacgaatgaaaaacaaatccagcgcgagtgaatgacaacaacgagatactatcacccccaaaacgaggacacacacaatcatgcacgaagagaccccacacgagcaaacaacaccccaaggagatgacgaccacaaggaatacaaccacatgcgaagacacaacacacagaagtaataaacccagccaagagtacccaatcaacacggagaaaggaaaaaatagaacaacagagaagcacatacga

SEQ ID NO: 658214 - DNA, 111 bp, Homo sapiens
gacgtagcccaactgttgccagacggctaggtggaagccagtcagaaactgaagtcagacagaaacaacaactccagctgatgcaatctaaatacaagcaaaagctaaaaa

SEQ ID NO: 658215 - DNA, 158 bp, Homo sapiens
agtattcacgagtggaatcgagatagattaaagatctgaatgcaaagatggtacaaactacattaggctgggcgcagtggctcacacctgtgatcctagcattgtgggaggccaaggctctgtaaaaaaaaggtttctacattagtgttccgggctag

SEQ ID NO: 658216 - DNA, 333 bp, Homo sapiens
gtcagctagtggctgtactaccatgggagaagctatgaaatgacgacagaatagaatgggcctgtgaggctggaaggagatactttccttggtccaagaaccatttgccttgtgtgggaagagattgataggtggaagtttcagtgggggagtaggtgggagtgaccagataagaaggagaaaagctgctgtgagggatagaagttggaatgctagctgcttttttagctaccttatcagcataagcatagccctgaatgatgggatctgatgccttttgatggtgcttgcagtgaatgactccagcttcctttggaagtataaagcgttgag

SEQ ID NO: 658217 - DNA, 512 bp, Homo sapiens
gagacccttgactgtgactggcaggcaggtgagggcacagcacccctccccagcatctgccagctcagcacagaagacaccgaatgtgcatctggaggtgttgcggcagaggtttgagtgaaccctctgtcaaagacaatacatccccccaccttccacctcctcactcgcgacacgaatgagcacctacccctcttcctgaaccatattttaattgctgcctttattgtcccaaatttaccacttaaagaattctattttcatttctgtcctgtttgccacttcatttcatttccttgagtaaatgagctgaagtgtaaagcaaagaatagcagaagcagcttggtaggatggaaggcacgcagctgcatggcctggctccttccctgagtggccttgttgccttgggcgtgtgttcagcacctcccatcccatggatacagtggagattccatacaggccttacttagctccttgcgatactgtgagccagagagaaagtacaagcactt

SEQ ID NO: 658218 - DNA, 343 bp, Homo sapiens
agaacagttattaaagatatatttaatatattccagatttcttagttttgctcagcaggatggttggactgaagggggctggtttacttcttcagtggaagtgttcatttttgcaaatactagttactggaatacttgtgagtctgtagatttttcttttatagaaaatgtgttcaatctatatgtccttaagataaacaatttctgttagggcaaatgatattaccaaggagtgcatcatttgtatcattatacttaatttatttcaagttaaatatctgtaacttcagtacatttatcattgatctcagttatcatttaaataaataatagaaatcatatt

SEQ ID NO: 658219 - DNA, 421 bp, Homo sapiens
cgcctatgtaatacttttcctaaatttctaacctttaagttatttaaagcctatgtgtactgtgtatgcatgcactaaagtatgtatgtatgtatgtttctaattgaagtggaaagatggttagttaaaagtgtaattctaggatgggcgtggtggcttgtgtttataatcccagcattttggaagacccaagtgggaggattacttgagcccaggagttcgagaccatcctgggcagcataaggagactccatctctacaaaaaattaaaaatagcaaggtatggtggtgctctgtggtggcagctattctggaggctgaggcaggaagatcacttgagcctgggaggttgaggctgcagtgagccatgatcacgccactgcagcctgggggtcagaatgagactcagtcttaaaaaaaa

SEQ ID NO: 658220 - DNA, 621 bp, Homo sapiens
gcccgagaactgtactggtgaaaaggatgacagaccccgagaactgtgctggtgaaaaggacagaccccgacaactgtactgctgaacgaggaggacagaggcccgagaactgtgctggtgaagaggaccgatcccgacggactggtgtgtggctgatgaggaggggaggcctggataactgatagatggctggatggaggaagagaggaacggaggaagcaggtgagtagaatggtagacagaggcacaaagccccgatcatagaggcaagtgactgagggagtagtaccacgacaaccgtactaagtggacaaagggttgaaggagaggagaagagacttcgagcccagatagaatagacctcgagtcgagaaggccctagactttggagcaccattacactcacccacatctaaggttgaacacgggccaggaaaacctaggtcacgctcacagcaacgtacgtttgctagccctgacgagggcgaacaagaactcccctataggaaaagaggctcactcactagagaaccacaccgatagtagcaccctaccttagcccccaccttgcgatcgcccttgttgaccccgtgagacaaagctccgacacatccaacacg

SEQ ID NO: 658221 - DNA, 375 bp, Homo sapiens
aagtgattgctgagggagaacaagtcaagagagtgcagtcttcacatgttatatatacatcaggggcagcaagtgcagggtctatctgatctggatggacttttaacagatcagcagggaggagacttttgaagaggaaatccatcttgatacaaagccagatggtgagacagaacatggggaccgggaactcgcaggtgaatgtgttggacattggggactgggaaaaacagtaacaaagtcagggtgtgtaagacccacctcagtgcctgccacatggcaaatcattaccatcattgttgttatttccattgtgaaaacgtggttcagaattttatctaaataaacttggctcttctagctgaaagaaaaaaa

SEQ ID NO: 658222 - DNA, 401 bp, Homo sapiens
  misc_feature (262)..(262): n is a, c, g, or t
  misc_feature (387)..(387): n is a, c, g, or t
ggggttccatggacatacgatgggagagcactgccagcagcggacgtgggtacttggaagattttaaacgctgccccctccatctcaccaccttacaaactctcacatgtcctgtgaagatggggggaccctctccaccatcaccacttggctgaaggtggtccagacttgaacgccaaggattccaggccgcatagcctcgggcaggactaatggacttcaaaaacacaggctcagcaaaatccacttcacaacccagatngtccacatcacaccctctttcagggacccagagcagccactggaagagaaggagtaggaacgctctcttaaagtccacttatcctattccttcacattaagaccaaagtccaatgtatttaggtnaaaaataatttctt

SEQ ID NO: 658223 - DNA, 115 bp, Homo sapiens
tgaccggttcgcatgtgtccacccagcattacatgttcttgactgtatttctccacttactggtttacagtggttttagtcactggataagtattataatagagctacttagctg

SEQ ID NO: 658224 - DNA, 2557 bp, Homo sapiens
tgtcggtccggaatcttaggatggagctggtccctgcgctccctgcgccctggggatgcccctgccgccctgacgcccgccagcctgagccaccggcgcatgtgaccgcgcgtccgccccagtcccatccgtagcgcccggcgcccggccccgcagcggcctcgttgtccccgccggcccccgcccggtctcccgcgctgccacccgccgccggccctgccgccatgcaggcgcgagcgctgctcctggccgcgttggccgcgctggcgctggcccgggagccccctgcggcgccgtgtcccgcgcgctgcgacgtgtcgcggtgtcccagcccccgctgccccggcggctacgtgcccgacctctgcaactgctgcctggtgtgcgccgccagcgagggcgagccctgtggcggccctctggactcgccttgcggcgagagcctggagtgcgtgcgcggcctatgccgctgccgctggtcgcacgccgtgtgtggcaccgacgggcacacctatgccaacgtgtgcgcgctgcaggcggccagccgccgcgcgctgcagctctccgggacgcccgtgcgccagctgcagaagggcgcctgcccgttgggtctccaccagctgagcagcccgcgctacaagttcaacttcattgctgacgtggtggagaagatcgcaccagccgtggtccacatagagctcttcctgagacacccgctgtttggccgcaacgtgcccctgtccagcggttctggcttcatcatgtcagaggccggcctgatcatcaccaatgcccacgtggtgtccagcaacagtgctgccccgggcaggcagcagctcaaggtgcagctacagaatggggactcctatgaggccaccatcaaagacatcgacaagaagtcggacattgccaccatcaagatccatcccaagaaaaagctccctgtgttgttgctgggtcactcggccgacctgcggcgtggggagtttgtggtggccatcggcagtcccttcgccctacagaacacagtgacaacgggcatcgtcagcactgcccagcgggagggcagggagctgggcctccgggactccgacatggactacataccagacggatgccatcatcaactacgggaactccgggggaccactggtgaacctggatggcgaggtcattggcatcaacacgctcaaggtcacggctggcatctcctttgccatcccctcagaccgcatcacacggttcctcacagagttccaagacaagcagatcaaagactggaagaagcgcttcatcggcatacggatgcggacgatcacaccaagcctggtggatgagctgaaggccagcaacccggacttcccagaggtcagcagtggaatttatgtgcaagaggttgcgccgaattcaccttctcagagaggcggcatccaagatggtgacatcatcgtcaaggtcaacgggcgtcctctagtggactcgagtgagctgcaggaggccgtgctgaccgagtctcctctcctactggaggtgcggcgggggaacgacgacctcctcttcagcatcgcacctgaggtggtcatgtgaggggcgcattcctccagcgccaagcgtcagagcctgcagacaacggagggcagcgccccccgagatcaggacgaaggaccaccgtcggtcctcagcagggcggcagcctcctcctggctgtccggggcagagcggaggctgggcttggccaggggcccgaatttccgcctggggagtgttggatccacatcccggtgccggggagggaagcccaacatccccttgtacagatgatcctgaaagtcacttccaagttctccggatattcacaaaactgccttccatggaggtcccctcctctcctagcttcccgcctctgcccctgtgaacacccatctgcagtatcccctgctcctgcccctcctactgcaggtctgggctgccaagcttcttcccccctgacaaacgcccacctgacctgaggccccagcttccctctgccctaggacttaccaagctgtagggccagggctgctgcctgccagcctggggtccctggaggacaggtcacatctgatccctttggggtgcgggggtggggtccagcccagagcaggcactgagtgaatgccccctggctgcggagctgagccccgccctgccatgaggttttcctccccaggcaggcaggaggccgcggggagcacgtggaaagttggctgctgcctggggaagcttctcctccccaaggcggccatggggcagcctgcagaggacagtggacgtggagctgcggggtgtgaggactgagccggcttccccttcccacgcagctctgggatgcagcagccgctcgcatggaagtgccgcccagaggcatgcaggctgctgggcaccaccccctcatccagggaacgagtgtgtctcaaggggcatttgtgagctttgctgtaaatggattcccagtgttgcttgtactgtatgtttctctactgtatggaaaataaagtttacaagcacaaaaaaaaaa

SEQ ID NO: 658225 - DNA, 2123 bp, Homo sapiens
  misc_feature (2103)..(2104): n is a, c, g, or t
  misc_feature (2107)..(2107): n is a, c, g, or t
tgtcggtccggaatcttaggatggagctggtccctgcgctccctgcgccctggggatgcccctgccgccctgacgcccgccagcctgagccaccggcgcatgtgaccgcgcgtccgccccagtcccatccgtagcgcccggcgcccggccccgcagcggcctcgttgtccccgccggcccccgcccggtctcccgcgctgccacccgccgccggccctgccgccatgcaggcgcgagcgctgctcctggccgcgttggccgcgctggcgctggcccgggagccccctgcggcgccgtgtcccgcgcgctgcgacgtgtcgcggtgtcccagcccccgctgccccggcggctacgtgcccgacctctgcaactgctgcctggtgtgcgccgccagcgagggcgagccctgtggcggccctctggactcgccttgcggcgagagcctggagtgcgtgcgcggcctatgccgctgccgctggtcgcacgccgtgtgtggcaccgacgggcacacctatgccaacgtgtgcgcgctgcaggcggccagccgccgcgcgctgcagctctccgggacgcccgtgcgccagctgcagaagggcgcctgcccgttgggtctccaccagctgagcagcccgcgctacaagttcaacttcattgctgacgtggtggagaagatcgcaccagccgtggtccacatagagctcttcctgagacacccgctgtttggccgcaacgtgcccctgtccagcggttctggcttcatcatgtcagaggccggcctgatcatcaccaatgcccacgtggtgtccagcaacagtgctgccccgggcaggcagcagctcaaggtgcagctacagaatggggactcctatgaggccaccatcaaagacatcgacaagaagtcggacattgccaccatcaagatccatcccaagaaaaagctccctgtgttgttgctgggtcactcggccgacctgcggcgtggggagtttgtggtggccatcggcagtcccttcgccctacagaacacagtgacaacgggcatcgtcagcactgcccagcgggagggcagggagctgggcctccgggactccgacatggactacataccagacggatgccatcatcaactacgggaactccgggggaccactggtgaacctggatggcgaggtcattggcatcaacacgctcaaggtcacggctggcatctcctttgccatcccctcagaccgcatcacacggttcctcacagagttccaagacaagcagatcaaagccccctcactggcagttcattgagagcagggggcttcctcacgtttccccctcctccatgaccccgtcagccaagcacatggaccccagtgcagccaaggctggtgccatgagggctggtcacatgaagagctgctgttgaggatgccgccattgttcttctgtgtccattatgggaagacaatctggagccaggcagagcctgtctttcccaaagaagctgaagtcttcttctcttgaacagtggggaccatctaatctcttgagcccttttcctgttggcttctaggaagctcagagctagattcaggggtgcacccagacctgtcctagcatgctcctttccctaatgaccgagtctttcctgttgaattatcccattctccatgggtgcctttgactttggcctccttactggaaattagcggagctgctgtttgcacacactgagctgtgaggtggctttccttggaagtggatgatagtgtcctcttcccttcttgcctctctctttctcctgagacaggatccccctggggcctaggtttgctcctttgttgtacaggggctgtcccagttagtgctgacctcatcccagaaccccctgggaaatatcccctgtcctcagagctgtgtcccctccccaaggacagtgcagactaactgaggagcctgataaaccttagctgcatggcacacttgcaattttaaaatccttctgaagttgactggtgtttgtacttgcttctcttttttatttaataaaatccaatgatccaaacccagttaatctaaagttctttgaaatgaaccatctttttattaaannaangagatgttaaaaaaaa

SEQ ID NO: 658226 - DNA, 236 bp, Homo sapiens
ctttggtggtaatcgtgccgaaaggggtctgttccttcttgaagctgcctggcgggattggtctccttttaaagcaggttgtgtgcagcatacagtacactgaaggtaagctaaaccatcaacatctctggtgttttaagatgttattttattgaaacaactgaaccaaatgagggatgttagctttgtggcagaattccctgcatgtgtgataactgatcttgtattattttttg

SEQ ID NO: 658227 - DNA, 1371 bp, Homo sapiens
  misc_feature (1351)..(1352): n is a, c, g, or t
  misc_feature (1355)..(1355): n is a, c, g, or t
tgtcggtccggaatcttaggatggagctggtccctgcgctccctgcgccctggggatgcccctgccgccctgacgcccgccagcctgagccaccggcgcatgtgaccgcgcgtccgccccagtcccatccgtagcgcccggcgcccggccccgcagcggcctcgttgtccccgccggcccccgcccggtctcccgcgctgccacccgccgccggccctgccgccatgcaggcgcgagcgctgctcctggccgcgttggccgcgctggcgctggcccgggagccccctgcggcgccgtgtcccgcgcgctgcgacgtgtcgcggtgtcccagcccccgctgccccggcggctacgtgcccgacctctgcaactgctgcctggtgtgcgccgccagcgagggcgagccctgtggcggccctctggactcgccttgcggcgagagcctggagtgcgtgcgcggcctatgccgctgccgctggtcgcacgccgtgtgtggcaccgacgggcacacctatgccaacgtgtgcgcgctgcaggcggccagccgccgcgcgctgcagctctccgggacgcccgtgcgccagctgcagaagggcgcctgcccgttgggtctccaccagctgagcagcccgcgctacaagttcaacttcattgctgacgtggtggagaagatcgcaccagccgtggtccacatagagctcttcctgagacacccgctgtttggccgcaacgtgcccctgtccagcggttctggcttcatcatgtcagaggccggcctgatcatcaccaatgcccacgtggtgtccagcaacagtgctgccccgggcaggcagcagctcaaggtgcagctacagaatggggactcctatgaggccaccatcaaagacatcgacaagaagtcggacattgccaccatcaagatccatcccaagaaaaagctccctgtgttgttgctgggtcactcggccgacctgcggcgtggggagtttgtggtggccatcggcagtcccttcgcctcccttcttgcctctctctttctcctgagacaggatccccctggggcctaggtttgctcctttgttgtacaggggctgtcccagttagtgctgacctcatcccagaaccccctgggaaatatcccctgtcctcagagctgtgtcccctccccaaggacagtgcagactaactgaggagcctgataaaccttagctgcatggcacacttgcaattttaaaatccttctgaagttgactggtgtttgtacttgcttctcttttttatttaataaaatccaatgatccaaacccagttaatctaaagttctttgaaatgaaccatctttttattaaannaangagatgttaaaaaaaa

SEQ ID NO: 658228 - DNA, 3396 bp, Homo sapiens
tgtcggtccggaatcttaggatggagctggtccctgcgctccctgcgccctggggatgcccctgccgccctgacgcccgccagcctgagccaccggcgcatgtgaccgcgcgtccgccccagtcccatccgtagcgcccggcgcccggccccgcagcggcctcgttgtccccgccggcccccgcccggtctcccgcgctgccacccgccgccggccctgccgccatgcaggcgcgagcgctgctcctggccgcgttggccgcgctggcgctggcccgggagccccctgcggcgccgtgtcccgcgcgctgcgacgtgtcgcggtgtcccagcccccgctgccccggcggctacgtgcccgacctctgcaactgctgcctggtgtgcgccgccagcgagggcgagccctgtggcggccctctggactcgccttgcggcgagagcctggagtgcgtgcgcggcctatgccgctgccgctggtcgcacgccgtgtgtggcaccgacgggcacacctatgccaacgtgtgcgcgctgcaggcggccagccgccgcgcgctgcagctctccgggacgcccgtgcgccagctgcagaagggcgcctgcccgttgggtctccaccagctgagcagcccgcgctacaagttcaacttcattgctgacgtggtggagaagatcgcaccagccgtggtccacatagagctcttcctgagacacccgctgtttggccgcaacgtgcccctgtccagcggttctggcttcatcatgtcagaggccggcctgatcatcaccaatgcccacgtggtgtccagcaacagtgctgccccgggcaggcagcagctcaaggtgcagctacagaatggggactcctatgaggccaccatcaaagacatcgacaagaagtcggacattgccaccatcaagatccatcccaagaaaaagctccctgtgttgttgctgggtcactcggccgacctgcggcgtggggagtttgtggtggccatcggcagtcccttcgccctacagaacacagtgacaacgggcatcgtcagcactgcccagcgggagggcagggagctgggcctccgggactccgacatggactacataccagacggatgccatcatcaactacgggaactccgggggaccactggtgaacctggatggcgaggtcattggcatcaacacgctcaaggtcacggctggcatctcctttgccatcccctcagaccgcatcacacggttcctcacagagttccaagacaagcagatcaaagactggaagaagcgcttcatcggcatacggatgcggacgatcacaccaagcctggtggatgagctgaaggccagcaacccggacttcccagaggtcagcagtggaatttatgtgcaagaggttgcgccgaattcaccttctcagagaggcggcatccaagatggtgacatcatcgtcaaggtcaacgggcgtcctctagtggactcgagtgagctgcaggaggccgtgctgaccgagtctcctctcctactggaggtgcggcgggggaacgacgacctcctcttcagcatcgcacctgaggtggtcatgtgaggggcgcattcctccagcgccaagcgtcagagcctgcagacaacggagggcagcgccccccgagatcaggacgaaggaccaccgtcggtcctcagcagggcggcagcctcctcctggctgtccggggcagagcggaggctgggcttggccaggggcccgaatttccgcctggggagtgttggatccacatcccggtgccggggagggaagcccaacatccccttgtacagatgatcctgaaagtcacttccaagttctccggatattcacaaaactgccttccatggaggtcccctcctctcctagcttcccgcctctgcccctgtgaacacccatctgcagtatcccctgctcctgcccctcctactgcaggtctgggctgccaagcttcttcccccctgacaaacgcccacctgacctgaggccccagcttccctctgccctaggacttaccaagctgtagggccagggctgctgcctgccagcctggggtccctggaggacaggtcacatctgatccctttggggtgcgggggtggggtccagcccagagcaggcactgagtgaatgccccctggctgcggagctgagccccgccctgccatgaggttttcctccccaggcaggcaggaggccgcggggagcacgtggaaagttggctgctgcctggggaagcttctcctccccaaggcggccatggggcagcctgcagaggacagtggacgtggagctgcggggtgtgaggactgagccggcttccccttcccacgcagctctgggatgcagcagccgctcgcatggaagtgccgcccagaggcatgcaggctgctgggcaccaccccctcatccagggaacgagtgtgtctcaaggggcatttgtgagctttgctgtaaatggattcccagtgttgcttgtactgtatgtttctctactgtatggaaaataaagtttacaagcacaaaaaaaaaaaaaaaaaaaaaaaaaaaaaaaaaaaaaaaaaaaaaaaaaaaaaaaaaaaaaaaaaaggggggggggggcgccaagaaaaatcccccggagggggcgcgccaaacgaaatagggcgaccccaggatttttagaggacaagggggcgcgccacaaagggggagcagcagtataaaagcgagaaggacgggggcgcgggtaaaaaaacgggggcaggggggaacaaccaggagaaccgggggacacctctgggaggagaaaccccatacacgggggggggggcaccatggggggccaaaacccccagagggaaattaacagcccaagggggaaaataacacacccgacgggcacatggggggtccacccccacacggcctcagtgagcggtcgggagaaaaaaattgcgaccacggcgacacgtatcatatccagacaaacattttcagccccgagtcctcgatacacaccgcgagacacaagaagaaccaccaagaaaaacaaaagccaaggagtaggggaggaggcgaggagacacacacaggagagagcaacaggcgaacggggagcaggagggcaaaagcaagaaccaaagagggaaaaaccaaacagccaaggcgcacacaaacccacacagacatcgcaggacggggaaaaaaaaaaacaacggaggagcgacggatcaagcaaagacagacaaactgaacagacagaaagaagcaacacatgaggacagaagagacagaaagaagaaaaggtcaagggagggacagcgaagaagagagagcgaggacaaaacagggaaaaaaagaagagagagaagaaagaacaaaaaccgtctt

SEQ ID NO: 658229 - DNA, 659 bp, Homo sapiens
tctagcgtagccgtctgtgtggccaggtgggggacctgcggtcggagtgggagggccagtctgcacccaagaggtggaagacggacgggctttaggctggaagcgccttagaggagccatttttccagcaggatgcctggtttgcttttatgtgaaccgacagagctttacaacatcctgaatcaggccacaaaactctccagattaacagaccccaactatctctgtttattggactgtccgttccaaatggcgagctatgacgaacagccatgtgatacactgccccttcgcacgctgaacgacagacaacacacataactgaactactcttctacccgggacgctctgtggaccctggagctgtgctgaacgctactgccgctggctgtactgataacaacacgcagcaccctggagactcctccttaaaagatcgatgatgactgacttcacgactctgcatggtgcatggccaagatcttgctgcctcaagcagcacaatctcgcagtatcggccacggatccctgcaacccgactcaacccaacagacaccagctcttacatccatcaaaagggccgacacatcgaaccgccttctcaacacaacgtacccactttctccacaacccacaacacatctggatgcctcaccaag

SEQ ID NO: 658230 - DNA, 2689 bp, Homo sapiens
tgtcggtccggaatcttaggatggagctggtccctgcgctccctgcgccctggggatgcccctgccgccctgacgcccgccagcctgagccaccggcgcatgtgaccgcgcgtccgccccagtcccatccgtagcgcccggcgcccggccccgcagcggcctcgttgtccccgccggcccccgcccggtctcccgcgctgccacccgccgccggccctgccgccatgcaggcgcgagcgctgctcctggccgcgttggccgcgctggcgctggcccgggagccccctgcggcgccgtgtcccgcgcgctgcgacgtgtcgcggtgtcccagcccccgctgccccggcggctacgtgcccgacctctgcaactgctgcctggtgtgcgccgccagcgagggcgagccctgtggcggccctctggactcgccttgcggcgagagcctggagtgcgtgcgcggcctatgccgctgccgctggtcgcacgccgtgtgtggcaccgacgggcacacctatgccaacgtgtgcgcgctgcaggcggccagccgccgcgcgctgcagctctccgggacgcccgtgcgccagctgcagaagggcgcctgcccgttgggtctccaccagctgagcagcccgcgctacaagttcaacttcattgctgacgtggtggagaagatcgcaccagccgtggtccacatagagctcttcctgagacacccgctgtttggccgcaacgtgcccctgtccagcggttctggcttcatcatgtcagaggccggcctgatcatcaccaatgcccacgtggtgtccagcaacagtgctgccccgggcaggcagcagctcaaggtgcagctacagaatggggactcctatgaggccaccatcaaagacatcgacaagaagtcggacattgccaccatcaagatccatcccaagaaaaagctccctgtgttgttgctgggtcactcggccgacctgcggcgtggggagtttgtggtggccatcggcagtcccttcgccctacagaacacagtgacaacgggcatcgtcagcactgcccagcgggagggcagggagctgggcctccgggactccgacatggactacataccagacggatgccatcatcaactacgggaactccgggggaccactggtgaacctggatggcgaggtcattggcatcaacacgctcaaggtcacggctggcatctcctttgccatcccctcagaccgcatcacacggttcctcacagagttccaagacaagcagatcaaagactggaagaagcgcttcatcggcatacggatgcggacgatcacaccaagcctggtggatgagctgaaggccagcaacccggacttcccagaggtcagcagtggaatttatgtgcaagaggttgcgccgaattcaccttctcagagaggcggcatccaagatggtgacatcatcgtcaaggtcaacgggcgtcctctagtggactcgagtgagctgcaggaggccgtgctgaccgagtctcctctcctactggaggtgcggcgggggaacgacgacctcctcttcagcatcgcacctgaggtggtcatgtgaggggcgcattcctccagcgccaagcgtcagagcctgcagacaacggagggcagcgccccccgagatcaggacgaaggaccaccgtcggtcctcagcagggcggcagcctcctcctggctgtccggggcagagcggaggctgggcttggccaggggcccgaatttccgcctggggagtgttggatccacatcccggtgccggggagggaagcccaacatccccttgtacagatgatcctgaaagtcacttccaagttctccggatattcacaaaactgccttccatggaggtcccctcctctcctagcttcccgcctctgcccctgtgaacacccatctgcagtatcccctgctcctgcccctcctactgcaggtctgggctgccaagcttcttcccccctgacaaacgcccacctgacctgaggccccagcttccctctgccctaggacttaccaagctgtagggccagggctgctgcctgccagcctggggtccctggaggacaggtcacatctgatccctttggggtgcgggggtggggtccagcccagagcaggcactgagtgaatgccccctggctgcggagctgagccccgccctgccatgaggttttcctccccaggcaggcaggaggccgcggggagcacgtggaaagttggctgctgcctggggaagcttctcctccccaaggcggccatggggcagcctgcagaggacagtggacgtggagctgcggggtgtgaggactgagccggcttccccttcccacgcagctctgggatgcagcagccgctcgcatggaagtgccgcccagaggcatgcaggctgctgggcaccaccccctcatccagggaacgagtgtgtctcaaggggcatttgtgagctttgctgtaaatggattcccagtgttgcttgtactgtatgtttctctactgtatggaaaataaagtttacaagcacaaaaaaaaaagaagatttaactattgctgtttgtgtgagtgtctggtaccctacaaaatcttgctatgattgtatagattaagcggggaggaccttacacacttgacgactgggacttcctgggggagcccgagccccttag

SEQ ID NO: 658231 - DNA, 2490 bp, Homo sapiens
tgtcggtccggaatcttaggatggagctggtccctgcgctccctgcgccctggggatgcccctgccgccctgacgcccgccagcctgagccaccggcgcatgtgaccgcgcgtccgccccagtcccatccgtagcgcccggcgcccggccccgcagcggcctcgttgtccccgccggcccccgcccggtctcccgcgctgccacccgccgccggccctgccgccatgcaggcgcgagcgctgctcctggccgcgttggccgcgctggcgctggcccgggagccccctgcggcgccgtgtcccgcgcgctgcgacgtgtcgcggtgtcccagcccccgctgccccggcggctacgtgcccgacctctgcaactgctgcctggtgtgcgccgccagcgagggcgagccctgtggcggccctctggactcgccttgcggcgagagcctggagtgcgtgcgcggcctatgccgctgccgctggtcgcacgccgtgtgtggcaccgacgggcacacctatgccaacgtgtgcgcgctgcaggcggccagccgccgcgcgctgcagctctccgggacgcccgtgcgccagctgcagaagggcgcctgcccgttgggtctccaccagctgagcagcccgcgctacaagttcaacttcattgctgacgtggtggagaagatcgcaccagccgtggtccacatagagctcttcctgagacacccgctgtttggccgcaacgtgcccctgtccagcggttctggcttcatcatgtcagaggccggcctgatcatcaccaatgcccacgtggtgtccagcaacagtgctgccccgggcaggcagcagctcaaggtgcagctacagaatggggactcctatgaggccaccatcaaagacatcgacaagaagtcggacattgccaccatcaagatccatcccaagaaaaagctccctgtgttgttgctgggtcactcggccgacctgcggcgtggggagtttgtggtggccatcggcagtcccttcgccctacagaacacagtgacaacgggcatcgtcagcactgcccagcgggagggcagggagctgggcctccgggactccgacatggactacataccagacggatgccatcatcaactacgggaactccgggggaccactggtgaacctggatggcgaggtcattggcatcaacacgctcaaggtcacggctggcatctcctttgccatcccctcagaccgcatcacacggttcctcacagagttccaagacaagcagatcaaagactggaagaagcgcttcatcggcatacggatgcggacgatcacaccaagcctggtggatgagctgaaggccagcaacccggacttcccagaggtcagcagtggaatttatgtgcaagaggttgcgccgaattcaccttctcagagaggcggcatccaagatggtgacatcatcgtcaaggtcaacgggcgtcctctagtggactcgagtgagctgcaggaggccgtgctgaccgagtctcctctcctactggaggtgcggcgggggaacgacgacctcctcttcagcatcgcacctgaggtggtcatgtgaggggcgcattcctccagcgccaagcgtcagagcctgcagacaacggagggcagcgccccccgagatcaggacgaaggaccaccgtcggtcctcagcagggcggcagcctcctcctggctgtccggggcagagcggaggctgggcttggccaggggcccgaatttccgcctggggagtgttggatccacatcccggtgccggggagggaagcccaacatccccttgtacagatgatcctgaaagtcacttccaagttctccggatattcacaaaactgccttccatggaggtcccctcctctcctagcttcccgcctctgcccctgtgaacacccatctgcagtatcccctgctcctgcccctcctactgcaggtctgggctgccaagcttcttcccccctgacaaacgcccacctgacctgaggccccagcttccctctgccctaggacttaccaagctgtagggccagggctgctgcctgccagcctggggtccctggaggacaggtcacatctgatccctttggggtgcgggggtggggtccagcccagagcaggcactgagtgaatgccccctggctgcggagctgagccccgccctgccatgaggttttcctccccaaggcggccatggggcagcctgcagaggacagtggacgtggagctgcggggtgtgaggactgagccggcttccccttcccacgcagctctgggatgcagcagccgctcgcatggaagtgccgcccagaggcatgcaggctgctgggcaccaccccctcatccagggaacgagtgtgtctcaaggggcatttgtgagctttgctgtaaatggattcccagtgttgcttgtactgtatgtttctctactgtatggaaaataaagtttacaagcacaaaaaaaaaa

SEQ ID NO: 658232 - DNA, 2124 bp, Homo sapiens
  misc_feature (2104)..(2105): n is a, c, g, or t
  misc_feature (2108)..(2108): n is a, c, g, or t
tgtcggtccggaatcttaggatggagctggtccctgcgctccctgcgccctggggatgcccctgccgccctgacgcccgccagcctgagccaccggcgcatgtgaccgcgcgtccgccccagtcccatccgtagcgcccggcgcccggccccgcagcggcctcgttgtccccgccggcccccgcccggtctcccgcgctgccacccgccgccggccctgccgccatgcaggcgcgagcgctgctcctggccgcgttggccgcgctggcgctggcccgggagccccctgcggcgccgtgtcccgcgcgctgcgacgtgtcgcggtgtcccagcccccgctgccccggcggctacgtgcccgacctctgcaactgctgcctggtgtgcgccgccagcgagggcgagccctgtggcggccctctggactcgccttgcggcgagagcctggagtgcgtgcgcggcctatgccgctgccgctggtcgcacgccgtgtgtggcaccgacgggcacacctatgccaacgtgtgcgcgctgcaggcggccagccgccgcgcgctgcagctctccgggacgcccgtgcgccagctgcagaagggcgcctgcccgttgggtctccaccagctgagcagcccgcgctacaagttcaacttcattgctgacgtggtggagaagatcgcaccagccgtggtccacatagagctcttcctgagacacccgctgtttggccgcaacgtgcccctgtccagcggttctggcttcatcatgtcagaggccggcctgatcatcaccaatgcccacgtggtgtccagcaacagtgctgccccgggcaggcagcagctcaaggtgcagctacagaatggggactcctatgaggccaccatcaaagacatcgacaagaagtcggacattgccaccatcaagatccatcccaagaaaaagctccctgtgttgttgctgggtcactcggccgacctgcggcgtggggagtttgtggtggccatcggcagtcccttcgccctacagaacacagtgacaacgggcatcgtcagcactgcccagcgggagggcagggagctgggcctccgggactccgacatggactacataccagacggatgccatcatcaactacgggaactccgggggaccactggtgaacctggatggcgaggtcattggcatcaacacgctcaaggtcacggctggcatctcctttgccatcccctcagaccgcatcacacggttcctcacagagttccaagacaagcagatcaaagccccctcactggcagttcattgagagcagggggcttcctcacgtttccccctcctccatgaccccgtcagccaagcacatggaccccagtgcagccaaggctggtgccatgagggctggtcacatgaagagctgctgttgaggatgccgccattgttcttctgtgtccattatgggaagacaatctggagccaggcagagcctgtctttcccaaagaagctgaagtcttcttctcttgaacagtggggaccatctaatctcttgagcccttttcctgttggcttctaggaagctcagagctagattcaggggtgcacccagacctgtcctagcatgctcctttccctaatgaccgagtctttcctgttgaattatcccattctccatgggtgcctttgactttggcctccttactggaaattagcggagctgctgtttgcacacactgagctgtgaggtggctttccttggaagtggatgatagtgtcctcttcttttctttcttttgtgggggggagggggggagggggggggtggggcctaggtttgctcctttgttgtacaggggctgtcccagttagtgctgacctcatcccagaaccccctgggaaatatcccctgtcctcagagctgtgtcccctccccaaggacagtgcagactaactgaggagcctgataaaccttagctgcatggcacacttgcaattttaaaatccttctgaagttgactggtgtttgtacttgcttctcttttttatttaataaaatccaatgatccaaacccagttaatctaaagttctttgaaatgaaccatctttttattaaannaangagatgttaaaaaaaa

SEQ ID NO: 658233 - DNA, 725 bp, Homo sapiens
gctcctatttattctagccacctctgagcctagccgtttactcaagtcctctgatcagggtgagcatcaaactcgaaactacgcccttgatcggcgcaactggcgagcagtagccgccaaaaaatctcatatgaagtcaccctagccatcatcctagtatcaacatataactaataacgtggtcctttaaacctctccagccttatcacgacagaagaacaacctctgattactgctgtcatcatgagcgcgtaggccataatatgattcatcttccacactagcagagaccaaccgagcccccttcgaccttgccgaaggggagtccgaactagtctcaggcttcaccatcgaatacgccgcaggccccgttctgctcctatgcttcatagccgaatacactaaacattgattataataaactggccctcaccattacaaatcttcctagtgaacaatcatgtgacagcatgtctcccctgaaaatctagcatcaacactatattgtcaggcaaaggaggcctacgtgtgcgtaaccgtccctgttctctatgaattcgaagcaggagtataccccgatgtccgcataccgatgcaagtcatagagctcctatgaaaaaacttcctaccgaggtcaccctagtgagttactgtgatatgacatgtctccatacccggttacaatctccaggattgccccctgcaactagtgtaaacaaaaggaa

SEQ ID NO: 658234 - DNA, 308 bp, Homo sapiens
  misc_feature (156)..(156): n is a, c, g, or t
ccgaggtgtgtggtgtgactgtactggggtgggacgtgctgatgcgggagcaagaggtacacgacgcgggtctgacagcacagccaggcagcgtgactcggaagcgaaggtggtcgatggaggtgagcgcagtatcatttcagcatttcatctttncactcagtcactctcttcaaaagaaagaactagagcaaaccaaagttaaatatctcaacgagaagggacacctcacgtcgctgacagctcggcacgtggctggtcccagggcccagagatactgcgtagtgaactgggcgctggaacgcagt

SEQ ID NO: 658235 - DNA, 381 bp, Homo sapiens
ggcatggtagtgtgtgcctgtagtcccagctacttgggaggccaaggcaggagaattgtttgaatctgggaggcagaggttgcagggagccaagatcatgccactgcactccagcctgggtgacagagtgagactccatctctcccagctacttaggaggccaaggcaggagaattgtttgaacctgggaggcagaggttgcagcgagccaagatcgtgccactgcactccaacctgggtgacatagtgagactgtctcaaaaaaagaaaaagaaaagcaatagttgtgttgtgggattcaggagactggagagaccaatgggtgagacaggagaatttcattggtggccactggctcagtggattctccggctgagcccc

SEQ ID NO: 658236 - DNA, 414 bp, Homo sapiens
ttgaggatcccaagtctaggaaagaggggaggccccggcctctccggtatcattcctatgacacaggctcatccatcaggtttgatggcgggattaagtgtgctcccggcggcctgtctcctgcacggcgagctccgacggaagtcccagatacactctcacacgctactaaatgtctaggtttgcccgctgtgtcctgctctcaagtaggctaactgatagtgccaccatgcagagtgcgttggagctgaggatggagccgcccccagccgactccaagcccgcagagggcagacgccaccctggactgctctccctgcccagctgggcctctctggcctattcctgccttccaggcccactgcactcctgtctgggaggcccttatgagggcagcccagcccccgcacccaa

SEQ ID NO: 658237 - DNA, 217 bp, Homo sapiens
cggcccagagcccagacccaaaaggagtgtcaaaaagtccaactaaaaaaatcctttcaaaaagggatgggccgggggccagttccctttggactcaaagtgtccagtgtctcaaagggtaaatgtgtccaaggaatgacgggcagtttttgactatttccctcccctgacctctgccccttttacataaagcaggttggagtttttctcctttcca

SEQ ID NO: 658238 - DNA, 1439 bp, Homo sapiens
gtagaacaagcaaagagaaccagacatacaatagagaaaccaaacaagaagacacagaggacaagaagacagtaagaaacccagaagagactaccaccagagaaaaccaaagatacacacaatacgatagacatacacatactatacgcaatagacgcacgaactagccatactagagacccgatacgctatgggcgtaactcctgaatctacttatgagctcagaatttgactcgtaagttgctccgtttgcgctgcggcgtgcacgagacataggtacatataccgaggcataatagcagggacgaaatcacaactacactatacaccagacgcacgggataagcctatatagaagacctatacttacatataccagaagagtactagcagtatatagccattaccgctaggtaccgtagtatactacgcctacgcagagggggtacctatacacgcgcaaagactctagtagagagagaagcctagaggtactaagtatactagaagctagaatattaccctatatatactaccaggtatactaactagctaggggatagaaagacaagtttagggacactacgagtagggagaaccaagctagccagcgtagggtatatacacctaggtagtaacaaccaaggcagcaagtaaccacacaataacaatagcactactaacaaaggaggagacctagcaaagcctagggaaacttaagggcactacgtatggggccaagcacggatagacggcagcaaaaggggtactagaggcaccaggggtagggccctagtactagctatggtagtagctaccatagcacaagaacatagccccaacgcccaatagcgcagcccagcgggcttttataaggcagcaggcgaccacgtagactatcccagaagtctcccatcccgtacagttgcagcgcgtgactaggggcgctaggcgggcattaggggatagaagggatctataacgcaggctaccccccagggtatccggcgacaaattctaaacccccatcctaagagacttagggcagggcccttcttactaacgccacgcaagcgcatagaggaaatgggcagacgaaccaccgtatgatggattgacgacctaaacgcgacacagcacactgtccccaactatattactacatctatagcccctcactgggctaaattgaggcacactgggaagccacgggctggcttgcgaaacaaaattcacctggtaacacagcaacgagcacaatatacttgagcaaattagttgggcctgggaacccacataatatgacaagcgctagtagaaacaagtgagaacagtggaccacattggtccaccagctagactagtgtagtggccataagggcacacatgcatgcccactatttcattatacccatatacatgacagcatgttatgcaac

SEQ ID NO: 658239 - DNA, 361 bp, Homo sapiens
  misc_feature (283)..(283): n is a, c, g, or t
gagattgtggcactgcactccagcctggccaacaaagcgggattctgtttcaaaaaaaaaaaaacaaaaaaaaccacacttagagtagtatacgggtgtcattgagtattaggtaattgttagaagaaacagccaaaggattggatgagggcttgggggaagcagaattcaagagggggtgtccccataattttccttgataagttgggaagtactgtgggacatcttaaagtatgtgcatgcatcactttgataaactttagttgaaagggcgtatcagtgnccaccaaaaacagacaagtagggtggatcggtgaaaggatcttcaggaaagcacattttagacaatttcccagtatcg

SEQ ID NO: 658240 - DNA, 329 bp, Homo sapiens
tctagaggatcccggtcgacggtaccaacacaggagcacccagatttataaaggcaagttcttaaaagacctaggaagagacttagataaggacacaataatagggagagaattcaaggctcggatgaggtatcatacataaaggccgagcatataaatttaaatctttaaggaacagactatataatccaaagtcatgatcataggggccatctacgtgatctttccgcgcataagtagaggcattcatctcaagaggcatctgttctatcttcccattcatgacgttcggcatttccatgtgccaaatcaacagactgtcacctccg

SEQ ID NO: 658241 - DNA, 909 bp, Homo sapiens
aataatagtgtaggagatttctatagctagaagtgtggatatgttttgtctctgttgcgtgttgtggtgggtgagttagttttttcagtgtgtggcattgtacgtatatcaattggacgctcccgtttcgggtcccgccggagtgttttcacaccaaagcggttctccccacctgtaggcccgccccagttttttgtgcgagaccctcccgaaacttttgttcgcacaaaataaggggttctgctgctcggctcccgaaatttccgggggctttcgcccttcgccccggggccctcttttcatgtgcttgccgccaaacagggtgtcccaaacaaagttctcgcgaggcgcctttctcactcggggtgttcccattgggaacggacggcctcccccctgggggtgagaaagtgttcaaattccgcccgttgtatggccgccattttcccgcctcgggcccaggagggcgcgcctattccctgtctccccaagcacggggtgtatctccgtaggcgattttcaaccacgggctgccacaaataacaagttttgtggcaggagcaccaatcaagttgaagcaagtttcctattcctcataggcttcgtccttgatttttcccgaaatgctctgtcccctaacatactaaagccactccatgtgcaaacaacatgtttgacggcccactcatatgaaataagaaaggtcaatcccgcccaggttttataaataagaggcgccggttttccccccgttctggacgtctcaaaacattacaatacaccctcagcggactctttccctccccccatttgggaaaattatcattgctaatcatgaccccttcccgcccgggtgcaaaaaatttttgggggcccccaaccacaaaaaaatgtttttacccccaaaac

SEQ ID NO: 658242 - DNA, 929 bp, Homo sapiens
actaaacaccgtatgaagcagaatcgctacagaaagagtttgcttgtctgtagtaatataggatcctgagagaaaagcgtgtcgaataacccaggtagtgtgactggattgcggagcaattgtccagtccatctgcatctctattgaaagcatcagcaggtgaggtaggatagcgctgatgtgagaccgcttaggggtctataattaacataccattaacatgtaggtttggacataacaagacagggattgagaggggataccgacacgtagtgagaagtcatatctgtgaccgtagtaccgctactgtttagcctgggtgtggacggtagcttgaattatatatactgatgctagtaaagcaggacttcgtcagttgtgacactgatacgcgacggggtgctttgtccccacgggctgtactgacagtactgtgttcctgcaaaatattggagaggttgattgctgacaaatataaaacgtattttattgaaataactcgaggttaactggtctgaatgtgcagtgcaagcagcagttagaaaaactccttgaggactgcttgtgggagggataaaggggcccgggcattattccctaacattgttggaaacctgtggtcgataccatttgttgtccaccggtctctgaaagctcggggataatgaatttccgtcgctcatgttgaaagtcggtctagcggtaactatgtggcttaaaagtactcggtatactaacccagtctggtacctatgcacggaagcatgtgcatgcttcatgaggctttgtgcatgttatcccaaatctcgtcttgaacccccatatttggggccccgctctgggcaaaagagcctgaggggcagtctccaccaatggggtgtgccctatccttttatgggccccggccctggtgtccggcgtacacgaac

SEQ ID NO: 658243 - DNA, 363 bp, Homo sapiens
gaggtatctcaagcagcatttcgactaaaccgaactcattttgacccactgtgtctatgcacagatgcacctctgatccagtctaaatccatccttttaaagtacagcaccgccacgtacagtggaggacacgtcagaaatccattgccagtcaccttctgaagtggcggtaattgaaagagctgaaatgtcagtgaatgacaaagcagaagcatgtggctgcagaagatggtaaatgtcgagaagaactggttctcaggtgtctgtatggatggcgtcatagctctctctaccaactgtaggtccaattctcttctttcaattcagtagcgtaaaaataaaaaacagtgtcattgtcattca

SEQ ID NO: 658244 - DNA, 375 bp, Homo sapiens
tgagcggacagtcttgtctaggtaccactgctcatccaaggttataacctttagatctatgttgcctttttatagttgtatatttttagctcttatctttaaaacttttatccataatgagtcattttatatatcgtgtgaggtagaggtccatcatatttttttgcacaggaatgtctagctgtcccatcaccaccgacggaaaagactattctactgacaactattatcaagcctagttggcttgaagttgagaaggctacgatttttttgatatcattttgtgtgattgcacatagtgctgtaaataaggtggtgatagctcctaggcatagtgttatagtttgaactagtttgttagtttctattaagggg

SEQ ID NO: 658245 - DNA, 205 bp, Homo sapiens
  misc_feature (13)..(13): n is a, c, g, or t
gtcctctgaggtngagctgcaagacctgaggaaggagctggagagagtgcgcaagagagctccaggctcaaggtgggaaacaaatcagtgcatcagtctcctgaaccgtgggcaaacggagaggcttcgcgagcaggaagagaggcttcaagagcagcaggagaagctttgggaaccggagaaagagtgcttcagcagattgccc

SEQ ID NO: 658246 - DNA, 1310 bp, Homo sapiens
ggctccttgtactcccgtcgtactactgccgtgtgtccaacccctcgccccggtgtcttgctcggcggctcccacaaccctcgtggccgtggtacgtcgcttctgaccatcgtgccgtgccacgaagaacatgttagcaagacacgcaagagtagcagggggtctccacggatctcgcgacaggaccgagaggtgggagtaatgaatggctggcctatgtatggatgagaactcagtgtgccccggattctgtcgtcgtcaagggagtggctccgaccatatgcgacgaggcaggccattgagattgcccgggcgtagggtaaagcgaaggtgcgcgctcgtatgaggcgccagacacatctcgcactgactagagggcagctgtacagggcccttaaggggcggtcaccagagtggtcctttgggccaaacggtgttggccacagtggccttaaacactgtgcctggggctatgcccatccggagacacggcgttgggtctgcgcacgattgtgttgccaacattctcgcgtaccttgtggctaaagaaacgtagaaattgacatgcacggggatgttcgcccaatgccaattagcggcctcggtgacagaaacggataggataggataacggctctggttcagtggacgcatcctttgggaccgggacatgtgcttcgatagcgccaccggcggacctatttcgagtcgtgcccaaaggggaggcccggggcagagaaggacaccttagtagacaggggcatagttcgttcatactcgaagggggtggctcttggaccgtcgtttgaagaaacccacggctttctgggacacgtcggacgaatggtcagaacacatatcggaccgttttactcactttcccatctgaaacttcccaaacgcccaagaaactttgaaatatcacgccttttctcttgggataagggacatcgaaacggggaacgacggagcggagaaccgcgcgcatttccatagcggcgaccagaagtacgaagtcgtgcagcccaaagaaaattctcggtaaagacaatatgctttaagttgtgagcctatgcattccgcgtattgtgggcaccgttttaccctcgttatttagatagattgcaccaaggtagactataggcccagcacagagagtggacacaggtgtcccccaagttggctctttaagggcaaatgaatagttcttggcaggcaacgatgtaaagggtggagacgttggcacaatacacctggatccaaacaaacgtaactcgcatttatactatgcctatatgtggggaccttcg

SEQ ID NO: 658247 - DNA, 848 bp, Homo sapiens
  misc_feature (12)..(12): n is a, c, g, or t
  misc_feature (21)..(21): n is a, c, g, or t
  misc_feature (31)..(31): n is a, c, g, or t
agaaggaacggngaggggaanagggggtggnaggaagaggggggatgagtgtaatgaaacatggcccactaggctgtgctcgtcaaaataatccatacagtggaaggaacgtacaagtaaataacaaaagcccccatactcttctgactccctggagacagctcctttttaggagtttcatttgccttcttcaagagagctttcttccactgacataaaatgccagcttgatcgcacaataaatctgtctatctacctgggtccaattccaggatctctcttctgtttcatcgacctctttgcttggcttggcaccagccttgtactctactatttattgtacactgagcatgcgatctaaattgcatgtgctggaggatcggtccatgtctctctgcacgtcccaacaggtgcacggtagggacagagagtagtccctccgcgtcttcaccttccccgattccctcctacccgtccccgtcccccacatccgtcgatcgtccatctcatcgcaacttcctccaacccacccctctccctccttctccagtccccgcgtccttccacctgtccctctccagcccccccacactcgtatttttctcctttcctcctacttcttcccccttctcacttcacatcgcccaccggccactctccacctacatccgcccattctggactcgcgctcgtaccgaccgcgtctgtccgccttcctttcccccctcccaccctactgttcagctcacctatccgtcagccaggctctcgcttacgcccgggttttttgtccccttagactcgcttatgctgttgtcccattcggtaactgcactaccctcccgatc

SEQ ID NO: 658248 - DNA, 122 bp, Homo sapiens
gttgtagcatcatagctcatgcagcccccaatcctggatagagaaatccttttgcctcagcctcccaagtagctggtctagaggcatgtaccaccatgcctggttacccactaacacttttt

SEQ ID NO: 658249 - DNA, 190 bp, Homo sapiens
cagataatgtcttacaattagctgtagttatgacattttcctgctcactgataactgttcaaagcaaaaggaaactcccaggcactaagtagtagggtccttctccatcccactgtacacacatctcttccacctcccaccatgtattcctgtggagccaaccgagcgctccactgtgaacacgtacttg

SEQ ID NO: 658250 - DNA, 745 bp, Homo sapiens
  misc_feature (38)..(38): n is a, c, g, or t
  misc_feature (63)..(63): n is a, c, g, or t
  misc_feature (68)..(68): n is a, c, g, or t
  misc_feature (71)..(72): n is a, c, g, or t
  misc_feature (88)..(88): n is a, c, g, or t
  misc_feature (96)..(96): n is a, c, g, or t
  misc_feature (134)..(134): n is a, c, g, or t
  misc_feature (183)..(183): n is a, c, g, or t
  misc_feature (218)..(218): n is a, c, g, or t
  misc_feature (241)..(241): n is a, c, g, or t
  misc_feature (248)..(248): n is a, c, g, or t
  misc_feature (255)..(255): n is a, c, g, or t
  misc_feature (264)..(264): n is a, c, g, or t
  misc_feature (329)..(329): n is a, c, g, or t
  misc_feature (391)..(391): n is a, c, g, or t
  misc_feature (408)..(408): n is a, c, g, or t
  misc_feature (411)..(411): n is a, c, g, or t
  misc_feature (418)..(418): n is a, c, g, or t
  misc_feature (434)..(434): n is a, c, g, or t
  misc_feature (438)..(438): n is a, c, g, or t
  misc_feature (448)..(448): n is a, c, g, or t
  misc_feature (450)..(450): n is a, c, g, or t
  misc_feature (540)..(540): n is a, c, g, or t
  misc_feature (586)..(586): n is a, c, g, or t
  misc_feature (602)..(602): n is a, c, g, or t
  misc_feature (615)..(615): n is a, c, g, or t
  misc_feature (633)..(633): n is a, c, g, or t
  misc_feature (736)..(736): n is a, c, g, or t
acagttacagccacatgccatcagcctatcaggaaatnaaaagggagggagagaaccagaagnaaaanaanntcctctctcaccaggnagcaactntagctccaaaccagatgggtgattcagcgccacatggngaaagataattcagccattgtgtttttaggatttagaagcactcattcnctcgcgggagcctttaaatgtcactggtgcctggnaccaaatgtagtcttcccaagcngtggttnggatggnaggtctgcnacatggcagggtcacagtcagtttatggccccggctgggcactcggtagttgagcttgggtcggnacctatcttctcctcagttgcggtgtccctgtgccatgacgacggtgcccgtgggtgggggngcctggagctcgctaanggnatctgcnatgaatatggctcggnaganacggcgcaancnagctgctgtgctcaggctctggtccacgctgtagggggccagcagagacaagtcgagttcatagatctccttggggcttagggcattgcncccaaggagaatcagcactcgcggtactagtgtccgtgcaaagatntcctccaggtggctgnggacactctccanttctgccagggcttgttngcatttcctgctgctcacctcagtggtggcccgaggtttcttcttctgcatctcctctgcctggggagaaggttttcggtaaaagtgcttaagctgttcatanggcagaggg

SEQ ID NO: 658251 - DNA, 149 bp, Homo sapiens
  misc_feature (100)..(100): n is a, c, g, or t
caagggtcagatggcaatatattttaggctttaagggccatacattctctgtcacaactatcacactcggtggttgtagtgcagaagcagcccgtggatnatacctcaatgaataagcatagctgttgtactccagcgtgctgatacaa

SEQ ID NO: 658252 - DNA, 580 bp, Homo sapiens
  misc_feature (306)..(306): n is a, c, g, or t
gtcgggagagcgagcagagagctggctggatcgccgagtcgcgagtgagggagccgagccgaccagcctgcgatcgatctccgcctcccactccgagaacaggagcccgggccggggcccggtacgccgtcccagtcacagtcctctacggcgtcaaggccgctgagggtagcgctgctgcgagcgagcgagggggagaggagagcgagacgacgcgccggggacggacggccgcgtcgcgacctgacgtcgggtgccgccctgcggcgttggtggaccgctgatgcgcggaaacgcctgcattgnacacgaggggtcaaaaacgaaatacacaccacccgcctgtaaacaactcaagagatcaaagccacgggaacaacgccagaatggcgcacaccgtaggaaaccgcgcatcaccagaaggattacgagccccgggagcagcaacagcggccgcgacaccctaacgtgcgctgcccaaaaacgtccctgaggcaggtaaacgtgatcccaccccccaagtcacacgttggagacttagggaagagacacaggggcccgcacacacctggacggcagc

SEQ ID NO: 658253 - DNA, 177 bp, Homo sapiens
  misc_feature (116)..(117): n is a, c, g, or t
  misc_feature (137)..(138): n is a, c, g, or t
taggtagacacacgggcatagccagcccaacctactgtcacaggcgccccgccattcaaccttccgggaggtcaggcaccttctatatgaggcgagtgggtctcagtctgcttganntggtgatgagattctgctgnnatctcacgcacgctgcagcgtgtcttattgatgagcatt

SEQ ID NO: 658254 - DNA, 419 bp, Homo sapiens
  misc_feature (373)..(373): n is a, c, g, or t
aatactctgggtcttttattacaagccaacccgtagtattcccattatacacttccttcttgttgtaaataagttgggttaatctccattcaggattctgttgcttaggattttttccttctgaagtgtttcacgacgagcccggagagctgctgccctagcggccccgatctggtggctttcagccatctgcggtctgagctcattggccggtgtgggcgatggtgctgagagggaggacagcgctgccctggccagtaaaacggatgttcaactgctggactccagacagaccagtgggggagaaagtactcctgacgtcttccttccccagagcccattgggcacggccaaacatccatgctccacgggncctcccatgagtgaacggccggtgcaagtcgtcagaaacacatcaa

SEQ ID NO: 658255 - DNA, 207 bp, Homo sapiens
gctgcctacccctgggtagacctaacaacaacaagccatttagcgtgccccaaccattgccttccggaccccctagacaagcgccccggctaagtactaactacctggacgtgcctacccctcgacaatgcatggcaggccaacggccaggtatccagtgaagcactatcgacgaacaagaactctacctgggttaggtctagctgg

SEQ ID NO: 658256 - DNA, 406 bp, Homo sapiens
  misc_feature (46)..(46): n is a, c, g, or t
  misc_feature (86)..(86): n is a, c, g, or t
tagagcactctactgcgggctctgcaggcctacagcagagcacaangcgagatcatcactgtcagcgatggccgagcgtcagttcnctagcagggactgtctccctttatttcttactcccaactttccagggctttcaaaaggagacagacccagtgtcccccaaagactggatctgtgactccaccagactcaaaaggactccagtcctgaaggctgggacctggggatgggtttctcacaccccatatgtctgtcccttggatagggtgaggctgaagcaccagggagaaaatatgtgcttcttctcgccctacctcctttcccatcctagactgtccttgagccagggtctgtaaacctgacactttatatgtgttcacacatgtaagtacatacacacatg

SEQ ID NO: 658257 - DNA, 127 bp, Homo sapiens
agcggggtcgcgcctcctgcttccagcgaacctgttccctctccccacatccccgcctccatctcccccggtctggggacccttccctgctgggttgggcggttcgggcggggccggtgtggggctg

SEQ ID NO: 658258 - DNA, 319 bp, Homo sapiens
gactgaatccaacgccgcgttctggtgaaacttcaggcaacttccacccatgccagaaagggaaggggagtaggcatcacatggcaagagagaaacccagagagaagaggaggaaatgccaaggtcttttaacaaccagttctctagagaactcaagagtaagaactcactcatctctgcaagaatggcaccaagccattcatgagggatgcaccccaatattcccaacacctcccaccaagccccacctccaacactggttatcaaattacaatatgagactcggtggggcttggtgggcggcgttggatgcagtcgg

SEQ ID NO: 658259 - DNA, 156 bp, Homo sapiens
gacttagtttgagtaggacatttcccaccaagggctggaggagttgcggcttcagcctgaatcgaatgtcagaacccatgccagcggtgcttcaccctcttggggataacttgcttagttttttactaaatgttcctgtgcttggtttacacaggt

SEQ ID NO: 658260 - DNA, 354 bp, Homo sapiens
acgacggtgtcatggtaggctgtatagataggatcttgctcctggcatcgcagattctcttcgtcatttaaaggtgtggatagagaaaccccttccgtccctggatggaagtggtccttatacccatgacaggaaaaccaagtctgtacccaggattgttcctttttaccactccttgtagactggtacggcctgtgcagaacttagcattgggcaaagaagagctaattggaactatggaacagatcttcatgaatgtcgctatctttgaggatgaagtttttgctggagttaccacacaccaggaactctttccacacagcctgctgagtgtgattgccaacttcatccctt

SEQ ID NO: 658261 - DNA, 257 bp, Homo sapiens
tgatgggcaccagatggcgtgaaggagcggagcacactggcagcctagaaccatctgggcactgaagggactgagagcgagcagcccaggagcatgtgtccgacagagctcgtagtgactgtctgagggcatccatgggacagaaagttcattcctccagggctccacctggcctccagccgcctggcaaggcactcacgtaggcattgatgttgctgcagagaatgctcaggttcccaccacaatggcacgtggat

SEQ ID NO: 658262 - DNA, 103 bp, Homo sapiens
ctgtatccggggagagagaagataaattgggttaaattttaaaaagcacaccaggctaccatattgaggaactatttgtgaggacaagcatgggcacagggag

SEQ ID NO: 658263 - DNA, 270 bp, Homo sapiens
cagagatgatgccactgcactccagcctgggcgacagagcaagactccatctcaaaaaaaaaaaaaaaaaaaaaggtggttgaattcgggcggggcttttaaattcccgggcccagggtagatttcggaaactctgggggcacccgtgggttatgggccctttcttagggcccgggcaattaataccctctttcttcaatttaacgcattggggccaagtgttctctaacattctccttatacccatgtttttaccaggggccggtgtta

SEQ ID NO: 658264 - DNA, 113 bp, Homo sapiens
ggacctggaacgtatatgggccttggttccgccattatgatttctcaccgagctgtttggtccgtgccctatcccacgaggagcagtctgtccccctgtaggcagggctgact

SEQ ID NO: 658265 - DNA, 110 bp, Homo sapiens
gtgtgcatgccgcgtagctgcgcccccgcgtggcgccgtgcgcccgggctcttcccgcgacgtctagttgctctggtagatccggcccaacgacggagtgcgtctactcc

SEQ ID NO: 658266 - DNA, 100 bp, Homo sapiens
aataaacaaaccaaaacattaaataaaacatcagcagaaacaggagtaatgttacatattatatcaccatacaggaagcgaacaggggtggggtgttata

SEQ ID NO: 658267 - DNA, 229 bp, Homo sapiens
  misc_feature (145)..(145): n is a, c, g, or t
ctccctgtggtagttttaaaatgtctgcaaattcttctctccaagaggcggaactgaatttacctccccttgagtatgggctgtacttagtgactcacttctaacaaagtcggacgtgatggcttgtggcttccaaccgtagtcnttaaaagacactgcaagctccgacctgggctccctctttgatcactagctctggggaagccagctgccatgctataaagacact

SEQ ID NO: 658268 - DNA, 112 bp, Homo sapiens
actcccctctattagcggagcacagtaagggagttcagtaagcgcagaggtcacgcctgctgggggtatgttgtgttggaagaagaggaggcgaggaggtggcatagatctg

SEQ ID NO: 658269 - DNA, 895 bp, Homo sapiens
cagggacaggatctttttacttcttccttcaggatccctttgttgatctagcaatgtggccaagttacctttgcctcctgactagtaaggttaccgaggctgagaatgtctaaaagctaacaggaacgatcgagcagcgacgtatgcatgcagcttgccgtctcgatagttgcacgatgtgttcaccaggggacacagccaagacgcccctaagatcatcgtaccgcggcacggacttgtcaccgagaaacttcactcgacgacgaaaatgcctcatgggactctgcaggcgggcatttgcgaatacatgtcagagtgcatagaatacttgcgaaacactcaatggcgagatgggttactgcgctttgaagacggtgatagagagcgcttacgagcatatgcccagtaataactgttcgtaatgcttgtcccgagacgcaatccttccgacgaattgtgcctttcacctcctctcagtgatcacccactgtctacaatcttataggctacgtccaagaagcgtgtcagatcaccgaaacatggcataacgcgaatccgagtgtattccaagagtgtggaacactagaagcacgaacgtgagactggagattcgaggagacgcaagtcgtctccatccgtcgatgtcatcacgtcttgaagaacgagcgctatggcgagtagcaggctgtctcgaaagcgtagaccagatgcttggctcatggatgtcgtacagtctcgtggattcctagtacatcggctaccccatattatcctcaacactcaggggtatgatcctgactacatctcactttaacacgacagtttactttccccttgcagacttgcgaaccctgtgcaaacatgcttttaagcttgcttctaaccagatatgggc

SEQ ID NO: 658270 - DNA, 182 bp, Homo sapiens
ctgaggatccggtattgttgatgacagtgatgataatagtgatgatggtggtgatgatgtgatggtggtgatagatggtgatggtgattatggtggcagtgatgatggtagatggcaatggtagtggcaatgggggtgatgatggtgatgataatggtgatgatggtggtgatgatgatgtg

SEQ ID NO: 658271 - DNA, 229 bp, Homo sapiens
  misc_feature (33)..(33): n is a, c, g, or t
  misc_feature (63)..(63): n is a, c, g, or t
cagatgccagtagcttgtattatgtcttggatnggcccctcctcgggatccggcagctgtggnctaggcccagccctcctcttagctcacctgggctgcggtcccagcctcctaactggactccctgcccgcagcctctcccagatccagctcctccgcacggcagccagagcgcgcgctctaaaacacagacctgagcgcgtcaccgtgccacttgggcgctcgtgcc

SEQ ID NO: 658272 - DNA, 311 bp, Homo sapiens
agacgtccattcttgcatagacgtccattcttgcatgtgtgtgcgtgtgtgtgctgtgcgcttgtgtgtgtgctgtgtgctcatctgtgtgctgtgtgtgctgtgcgtttgtgtgtgtgctgtgctcgtgtgtgtgctgtgtacatgcgtgtgctgtgtgtagtgtgtgtgtagctgcggagctgcataaagtatgagtgctttataggcatgggcattgagatgtaagcatttgggggtgagggtcgtgcaaattacatttcattagcatggattaaggttgaccatgctctgtcctcccctcctttggt

SEQ ID NO: 658273 - DNA, 446 bp, Homo sapiens
gacgggtccacacgtcggcagtgtccatctctatctcatgatcaccgctcggcctccaagtgctgattacaggcatgagcacaacgccagtcagtgccagcgtttatactaactatgtttctcttaggattacaagtcttgcatttccttaaacttagataaaacaaaaaattaaagaacaatagtgatttaaataatgtcttaatgataaaaagatgtagcacattaatgtgtaattcatttctaaaaggattcagtagtcgttgctgtgggcattagacaaagtcattgaaagctatgtgagctaaatggtagacttagaatttgaacgaaaaggaactccagagcccatcatcttaatttattctgctgtgctgcaattagtggtcgtaaagcgtgcaggatgacatgaagtggggagatactgggctcgctcagaagctgtt

SEQ ID NO: 658274 - DNA, 663 bp, Homo sapiens
gcttggctgagggtctaggtggactgtctgagatctgaagacagcatgtacacagccattccccagagtggctctccattcccaggctcagtgcaggatccaggcctgcatgtgtggcgggtggagaagctgaagccggtgcctgtggcgcaagagaaccaggcgtcttcttctcgggggactcctacctagtgctgcacaatggcccagaagaggtttcccatctgcacctgtggataggccagcagtcatcccgggatgagcaggggggctggttgcgggtggcttgggttggtgcaccttaaaacagccgtcgtgtcgtggaggagaggcggctctgtgcagcaccgagaggtgcaggggcaaatgagtctgacctcttcatgagctactttcccacggggcctcaagtaccaggaaggtggtgtggagtcagcatttcacaagacctccacaggagccccagctgccatcaagaaactctacccaggttgaaaggggaagaaggaacatccgtgccaccgagcgggcacactgaacctgagacagtttcaacaactggggactgcttcattctgggaacttgtgggccagaacatcttcgcctggtgtggtggaaagtccaacatcctggaacgcaacaaggcgagggacctggccctg

SEQ ID NO: 658275 - DNA, 126 bp, Homo sapiens
ccagaaattatgtttcgaactagtatgctacactgcctgtcatgtatgataatacatgtaatactttatgaatcatttaaggcgactttaacacatgcacacagaaatgtcacatgtagaattagg

SEQ ID NO: 658276 - DNA, 529 bp, Homo sapiens
  misc_feature (5)..(5): n is a, c, g, or t
  misc_feature (153)..(153): n is a, c, g, or t
  misc_feature (173)..(173): n is a, c, g, or t
  misc_feature (175)..(175): n is a, c, g, or t
  misc_feature (178)..(178): n is a, c, g, or t
  misc_feature (254)..(254): n is a, c, g, or t
caccnatcatgaagtcctggagaactgcggtcaacctattcccttggttgatgtgatctcctggtcagcgctctctctagctactcttctctattggctcacaacggcccagagagcaatggcaccttgacttaagcctactacagactgttngaggcccatggcaaatttantntancggggggaaaatggaaccgggcctgacattaaacaaacaaatgctatggtagctttttcacttcatagcatactcntccccctcggtgatactatgacctgagtagcatcagccgaactgagagggagaataactcaagacaatactcagcagagagcatccccgtgtggatatgaggctggtgtagaggcggagaggagccaagaaactaaaggtgaaaaatacactggaactctggggcaagagatgtctatggtagctgagccaaacacgtaggatttccgttttaaggttcacatggaaaaggttatagctttgccttgagattgactcattaaaatcagagactgc

SEQ ID NO: 658277 - DNA, 1796 bp, Homo sapiens
  misc_feature (1023)..(1023): n is a, c, g, or t
gtgaaggagaaggtcgggttgtagaagctggtgtgtggccggcagctcgctcatctggtgtatcgtgggcttatgtcaggtccagtgccatcgtctctccctgtgaactgggcagggaggcttcgactgtcagagagggagcctgctgcctgctgtatagttcctgagcttgcacagtccagacttctctcaaaactatgtgtgcttgagtgcagcactccagatgtttgtgcctcagctcctagcgctagaactccagcagcatctggccccattgcacaccacttccttgtaatttgcagcacaaaagcgcaagggcatcttgtccagcacaagcacacccttgtaccatctatgtgtgcattgatgaccagcccaacggcacacggatggcaccagcgttagatcggctagactcactgcacacatcttgaccacagccacgcacctagacacagtgtgcaccaacaggcacaccctgcacacgccatgcggcgtgcgtacggtgacagcagcaaagagagagaataccacaccatcacccacgacaagaccaacgcacccgaaacacatcactcaccaacaacatggcacactccatcacagacacaaaccacaacacaccacccacccaggcgaaccaaccacgcacgccagcacgcaccgacaccacaccagggacaagcacacaccacaagaccacgacagaccacgacacaacgcaataaggaacacacacaaaacagaagaaacatgacaaaagaaaaacacgacaagacccacaacagagcgcacacaaacaaacacatccgcaaacacaagacgccaccacaagaaccacgagggacacacgagaacccaaagaaaaaacacaaacacacagagcagaacgaaacaaaatacaaacaaaaacacaacaacacaatcaaacaagcaaaaaacaaaacacaaacaaagccacaaggagacaaaacatacacataagtcaagatatataagtcaatcaagatctatcacactacngacatatataacgaaccacaaatacataaagaactgaaactataatagtactacatatctacacaaaaatactatacatatcaatagaagatacatggacacacagaacataatactcaaattcgctaacactctctgcaacacacactaccaccaaatacaagatctatctacaaatcacaccaaaaatctaatataaacattagacaccactaactaagataacccaacaagcacactaaactgatataatcataaacactaatcacatagacaatacgaagtacactacagcataacgagacgtactgcaaacacacaaacaacacacgaactaacgtatgatgacaagaggatacatgaggcataaacagcactaaagaacagacagcgaaggtacagtagcctatcagatagtaatgtgtaccagacacagcataaccaggtgcgaaccaagaggcgaacgaagacgaaaagagagacaacatagacaagactaaggataaggggacgagacggagctgcagacgagagaacaatacgcaggcccaaccgaacgcgagtgacgatggaagaggcgagagagaggagaaaagagagacgagaaaggacgagagcgtaaagctgaactagaggcgccagagttcgagtcgagtagtgctgatatgcacgaatagagaggagaaagagagagagagaagacagaggaaagcgagatgaaggaagaactgacagtaggcgaggcaagataagtgacagcagacagatctaac

SEQ ID NO: 658278 - DNA, 141 bp, Homo sapiens
tctagaggtctcactcagtagcaaaggactgatcggttcgcatgtccggccttcctcagaccgaacgggctcctgcttcatcttggccagctctcccctggtatccccaccccacatgcatgcacccagggttacgagctc

SEQ ID NO: 658279 - DNA, 483 bp, Homo sapiens
caggcttctttatagaaggagatggttcttttctgtcttctagcctaaataaagtatcatcccaataatggggcctatgccttgaatgaatagaaatgaataagctggtgtttgttttttcaaaagggaagtaatttagatttgttctcctcaaccataaaatgattttagttcagttttacccagtgaaacctttgtttttatgaaaaaaaaggaaaatggtttcccctttggttttatatgtgttaaataaatgggtaaaggacccccccaatgttattaaaatttttttttcgagcattaaaaattttttcaacccccattgggtttctttgggtgtgatattttaatcaaaaggggttgagttgttaccagtgttttttgaaaaaatttttaaaaggcttataaatgtttgaaatttcccccaaaggctgttttttaaaatatatattttttaaaccaataaagttttttttttgccta

SEQ ID NO: 658280 - DNA, 417 bp, Homo sapiens
  misc_feature (67)..(67): n is a, c, g, or t
  misc_feature (139)..(139): n is a, c, g, or t
  misc_feature (170)..(170): n is a, c, g, or t
  misc_feature (322)..(322): n is a, c, g, or t
  misc_feature (324)..(324): n is a, c, g, or t
aaaaactcagttggttgaaactgacaaggtaaggattagctttcaatgtaagaggacaactcttgcntaacatgaatgttaagtaaaggagctcactgccgtgaatgcttaggatccataggtcctggccaactccagnctaagagcaatataaagctctcaaacaaacncccacaaataataaaaccccattccctaccagagctttatttctcttatgttgtatcaagcctcatagtcacccgcacagtgctgcattagggcggcatacaaaagcatcagttctcttccacctccgtagctggtcaatgaagacacacangntaatgatctttaacatatctgcaattagaagttctctgaagacgtcgagacgctactggggtaaaactcagctcttaagcggattggtcataa

SEQ ID NO: 658281 - DNA, 564 bp, Homo sapiens
tagaggatcccctacatgctcgaaaagctctactgcatctgtaaggcgcagggagactcctatgacctcgaggactttgtaaacctgtcagcagcttccaggttcgggagtgactgcttcagatagaccgtatgacaggaagtggtgccacatgtgcctcctgatcgaagaccaagatgcccagggctatgagctgttcttcaagacaagagaattgaagaagaagtggatggagcagtttgagatggccatctccaacatctatccggagaatgccaccgccaacgggcatgacttccagatgttctcctttgaggagaccacatcctgcaaggcctgtcagatgctgcttagaggtaccttctatcagggctaccgctgccatcggtgccgggcatctgcacacaaggagtgtctggggagggtccctccatgtggccgacatgggcaagatttcccaggaactatgaagaaggacaaactacatcgcagggctctggacaaaaagaggaatgagctgggtctgcccaagatggaggtgtttcaggaatactacgggcttct

SEQ ID NO: 658282 - DNA, 98 bp, Homo sapiens
gcggccgcctactactactactactgctcgaattcaagcttctaacgatgtacggggacatgtaataaagaattacttttccttttgcaaataaaaaa

SEQ ID NO: 658283 - DNA, 109 bp, Homo sapiens
ctacatatacgaatcgagcctgtacctgaacattcgtgtccagtcaattcgatgaatctttaaaaaatgtgagtacatatatcaccagatggaagtattatacaagtga

SEQ ID NO: 658284 - DNA, 219 bp, Homo sapiens
  misc_feature (9)..(9): n is a, c, g, or t
  misc_feature (15)..(15): n is a, c, g, or t
acatgtgtncagagnaatcccacattcctagtcctcaccacttttcacagcctcgcttaacttggcttacaggaagcataaagccaaagtgtttggttttttattgcaacatggcctggcccgatataaattagataatgacagccaatggctgaaaatggggttctttgactttcaaattctcagggaccttgagaactttataaccagaaatgtcaa

SEQ ID NO: 658285 - DNA, 139 bp, Homo sapiens
tgggagggagcgagagggctcctttccaagcatgacctcttcttggatgcccagctgctccaaagaactggagctgggggccgtgccagtgaagactacagtgcagtaccagtgccacaagtggaagtggcagtgtgtg

SEQ ID NO: 658286 - DNA, 109 bp, Homo sapiens
gcggagtagccagtagcagtcaggacagggactggttacggccactggcaactcggaagcaggaatgttctgccgatactgataggtcagctcacggaagctgcgcagg

SEQ ID NO: 658287 - DNA, 892 bp, Homo sapiens
cccaagcgtaagagcccggggccctgggccaaaaagtgggagcccgccagaggagagaacgtctcccaacccgcgtggggattgcccgacgctcggggttgtgtccctgacgcccccccgctggccgccctgcagacaccccgcgggtgtggcgatagcaagcagagcaatcggcgcggtacaaattcctgggcattcttccctaggcgcacaacagaagggaggcgcatgtggtaaaacgatgaggctcccagccaagggaaaaagttagcgaaagtcgacagagaagagtgcacaggacctcccccaaaggcgccccacgttataacgagggccccccaaagcgagggcgcgtcgcccaaaatcgccccccaaaggggagagtgccaagaaagatgggcccacacagaggcataccaccccgacggattgcggcccacgaagccacctccgtgggagtagctacgaagcccctgcgggcaacaaggtcatcacgcacgcccaaagctgctcttgaagaagccgcagccttagaacagaaggtgagccgccaataagtgccccgagtaaagcagcgagccgcgccagacagacatactaatgggggaggggacccggcgaagtcacttgcacaggagttcccggcgggggcgcgaccactctcccccggcagaagaaagacgcagcgctcgcaccgcccacacggacacaacgggcgcccctaggagcagagagatagcgtgcgcaactaccagaaaaaggaccataacgctcttatcgagaaaacaaaaaagacgaacagtcccacaaaggaaacccccccccccgggagcgaaagaggaacccacagggcccaaacgcgccaagacggcaaaggccccgcccacaaaac

SEQ ID NO: 658288 - DNA, 1135 bp, Homo sapiens
ggccccgtagctggtgcctgcgacggcgggacccggactcggacgcgtgccccaggatgggtgagttcaccgagaagaagacaacatgtggcaccgatttgcctcaagtacctgtgtgtattaccttacagattgcttgctatcttggctggcttgagccatggcatgtcatggacagtggagcaatctgtgacagctggcccttcaaggagtgacatacatcgagtacttgcatggcgctcagtgcactcatatctggccgacagtcctacatccttgggtgttgcgcgttggcacatgctcaggtacactggctagacttgcgcgggtcattgtggcttgcatgcgccaagcgcattcgaacgggacgcggtctggaagcactgcatgcggcacatgtagcgttcattctctgctgtcctcagtcaattctatttctgcgtggaagatcaatcgcgtggttatcgctcggccgtacgcactacttagccagcaagcatgagacactggagcgtcaatggagacacctgcaaggacaagcagtgaccagagcgctatcgaccagctcggtgccatgcaggactgtgactcagcgcagtgtggacgcagctgtgccagcaaggagattccagctgctgtggcatcacacaactcacaggactggcgacgacacgtgaagtggaatccgctcaccagtgaggtcccgtggcctgtgtggtcccagactagactgcatgcaaagacggtggatggctctattgatgggcaagcgaagagcatgcctcccaaaatctacaaggtggacgggcgagtgcatcaccaagttggagaacttcatccaagagcaacggagggtcattggggctgtgggatcggcattgctgtgtgcaggtcttgagatgatctccagtgctgctgtacacgagtctcaagtggagcactactgaacctggcttgaggccttgctgatgctgaacacaattactgagttgaaaccaatggagtaacacgcgcatggggttccttgatagaaaacacacttgtgcctataacataaactctgaggaaccagactcagaggcagatcaagtggcctatgatgagacacaatgccacacgacgtaagggatgacga

SEQ ID NO: 658289 - DNA, 431 bp, Homo sapiens
ttaactccattgacattttgggatgggaaattctttgttgtggggtcctgtcctgtgcattttaggagttttaagcagttttggcccctaccagtagtatatgccctttaccccctggggttgtgacatcgaaaaatgtctctagacattgccaaatgctctcgtgggggacaaattagccaccagtcaagaaccactgttctaaaccagcagtctcaaagcatggtcgccatggaccattgaggtcttaagaccctttgagggaggagtgtagatgaagtcacaattgttttcataaaaatcaaagttaattgtccattttcaccgtgtggacattggtatttacggtgcataggcaaagtggataaaatttgttggggccatagcaggatgcaagggcaccacactgtattcttcactcacagtttgga

SEQ ID NO: 658290 - DNA, 311 bp, Homo sapiens
ttatgtggtagtctatagaaaaacctaaaactttgcattttcctgagacaaagtaagtagcagaggagacattctctctctctgtcttttggtatggtttaaagtaaatgtttgttagtttttttctgacgacagttttttgctcttgttgcccaggctggagtacagtggtgcaatcttggatcactgcaacctccacctcctgggttcaagtgattctcctgcctcatttttcctatgtagctgagattacaagcacacgccaccacgcctggctaatttaggtattattagtagcgattagggttagt

SEQ ID NO: 658291 - DNA, 283 bp, Homo sapiens
  misc_feature (117)..(117): n is a, c, g, or t
atgatctgaggattcccaataatagctaaaactcacctgagttgtataaaactccagttgagacaaaatagactacgaaaggtgctttaaccatatttgaacacacaatagctaagnaccaaactgggattagataccccactatgcttagccctaaacctcaacagttaaatcaacaaaactgctcgccagaacactacgagccacagcttaaaactcaaaggacctggcggtgcttcatatccctctagaggagcctgttctgtaatcgataatgtgatag

SEQ ID NO: 658292 - DNA, 176 bp, Homo sapiens
ggcgcttgtggatccgtagggtatgatctgctgaaggacggaggagttagaccccgcaatcaagagcctgtcttcactgaagcccttggtgatattttgccactcagccaagaatgaggatgcatgcttcagattctctatgtcccgaacctggaacctatccaacaagcgcctgg

SEQ ID NO: 658293 - DNA, 297 bp, Homo sapiens
gagtgcatggtggatgtggtgtcaggcaggcacagtggtcacgctgtaatctcagcactttgggaagccaagtgggtggatcacctgaactacaggagttcaagacaaatgagcaaatcaacatgacagaaccctgtctctaccttcttggtagccaagcatggttggtgcattgcctgtggtcccatgctactcatggaggctgaggtgatgaggatcacttcgagccctgggacggcagagtgttgcagttgagcccaagatcctcactacgtccactcgcaacctggtgtgaca

SEQ ID NO: 658294 - DNA, 328 bp, Homo sapiens
  misc_feature (72)..(72): n is a, c, g, or t
  misc_feature (74)..(74): n is a, c, g, or t
  misc_feature (289)..(289): n is a, c, g, or t
accataaatagtagatgcttgaacaaaaatcagtactcatgtaggaattctggtatgggcaccacttgattntnggatctctgaagtgaaaagcatggcacttgttcacagtcacctcaagctgtgactatcctgctctctcttcgtctatatatgtgcacatggacacacctacgcgtatacaagtgagattattgcaagaaccaatctgttacctttgatggaaactgtcatacaaatacatgcaaggagactttaatgactttgatcaaaatatatgatcagaatngttatctagtgatatgaatttggggtaattagggtttcg

SEQ ID NO: 658295 - DNA, 365 bp, Homo sapiens
agcggagtgacgacccaacgcctcctgcttgcctgcagggtggaccgtcccatcagcctctgtggcctgtcgcacgcagggaaggacctcatgcagtcctggaatgatgcaggcaggaggcagtgctggaatgacatctcagggaagacggaagaagtgtcgtcgactgtggaaatggagtgtgtgcgcagaagccttgctttccatccacacgacagtgagagcccgacatgacatccctgacttgtaccgagctgtgctcgggggtggcacatctagctcccacttgcataatatgcgcccagttgtcctgacgtgacgtagactgtggacatgtcggtgcagtgcgtgtgacccacgtctcg

SEQ ID NO: 658296 - DNA, 417 bp, Homo sapiens
cctcacagcttctctgaggtgactcctgcatttcgtcccctcgatctgggacagtcacagcatttctgtgatgctgacatagacctttcttgctcccgcctccccaggaccccagacgtccaggacgctgacattgatctccaagaccgttcagaccctcggcagcctgtccaagtccaaatctgtgagtccctcttcttcattttctctttttagggacaactgattcttttctctcttcagaaaatacacgtgaaaaaactcccacatttgagagagtcgtcagataaaagatccagaatcaaagacggcgacacatactctcttgaaaaccaggagctgagcgtacccgtcccgcgtcactctcccctccttaagtgaagcccttgactttttcgggagcctgtgggtcgtcgc

SEQ ID NO: 658297 - DNA, 612 bp, Homo sapiens
ccactcagccttggaccccacttcagaagctaggcccgtgtcccgcggtgctgactgagcctgcttcccgcctccccctccgtgcgtgtgctggaattccccaggggacccgggcccccgccaggggactgtctccgaagacttgatttgttccgtgccctgtgttctccacactgccactgaccaacgtccgccagcggtttccacgtgtgggcttcaggtgttgttcacagcacaacccgaccacaacagagccagtgcacttttccgtcgcttgtgccttttttgtctttgtgctaacgtcttgactaatttaaagatgctgtcggcaccatgtgttatttatttcccgtggtcatgctcagccttgctgcttctgcagtggcgcaggtgccatgcctgctccctgtctgtgtcccagccacgcagggccatcccctgtgacgtctggccgacccggctggacaccctctgccgagtaatgacgtgtgtggctgggaccttctttattctgtgttaatggctaacctgttacacctgggctgggttgggtagggtgttctggctttctttgtggggtttttatttttaaagaaacactccatcatccta

SEQ ID NO: 658298 - DNA, 1069 bp, Homo sapiens
ggtagtatggtagtgatagagtgaggatgaggaagatgtgatgccgacgcatgtgacttggcgggaggcagcttgggtcttgaatacgttgcgtgtcgcggagccatacctggtgcctgcgtggagaacggtgcgcactttgcacaagatattgtaatccgtatactctgggagacgataaaccagagaaccatcacaagaacatgaatgtatgttcacaattgcttcatcacaagccatcatattagacatataacgtaacgttattagaaaggtttcgtgtccgagggagaggcatagccgtgtcaaatgaagaagtcggatggtcgcctacatatcatcggaggccactataatcgcagtggcagccatccgaagatcctccgaatgaggaatcaaagagctcgtcttggccactaccaatgatcctcatgtgaggagaaacgaatcgtgtgaagcataagctatatagggaaatgagatgggactacgtccagtcactactggtacaggactatataaagtattatgacgaaagacaagcactcgacccgtggacccaccatgtatgggaaccctgtaaagaaaaagtgctcccgtagtattaaaatgtgagaccttgaaaatgaatatcaactatcttgggattgactgggggaggcgcggaagacaattgccaagatgggggctgttgactagtaaaaaagttcatgaacataactttcgcgggtatggacttggaatctaaagtgatagccatgtattaattgtaccctgaattggcacgtacttaggtttgccatcgggagccgaattagttacgttcattggctacagaatcattctagttctgctaccctggagggggggaaacataagagcacgtttccaatttgccttactttcctcgaaaaaaacaagcgctcttgtggtaagtcataattttggagacaggtggggtctgccatgaatccaatatccttgtaactccagagtagttgagaaggcttggggagggctttttccttgatgatgctctgggcccttacaggtaccccccacttcaagg

SEQ ID NO: 658299 - DNA, 224 bp, Homo sapiens
gttctggcttcctattcccatcacacactttttcaaatcgctagtcaagtacaatttacctgttctaacgatgcggccaggcacggtggctcatgcccgtatcccagcactttgagcgcgtaaggtgggaggatcgcttgcgcccaggaggtggcggctgcagtgagccgcgatagcaccactgcactccagcctgggatacagagcaagactctgtctcaaaa

SEQ ID NO: 658300 - DNA, 575 bp, Homo sapiens
  misc_feature (368)..(368): n is a, c, g, or t
cccttttggggtctatgacctactcccacgagaacgtgcctatcaagcgcgatattattggtgcctatccggaagacgagaagagggagcacgatccatttcgtctgaagcatagccccaatgtcaacttaacggatgtgaacagcctaagatgctttgaaatgacccttgtgttttgccctgaccgaaccgtagtttggtgtgatggctgctagactggcctctgccaaccgacagtaggtaatgcacggattgctgaaggtatgttccttaaagtggaagctgaactctgagcactctcaggcaagatgatggctgactcacttcaatggactcgttctgacccgagacaaaatgtgttccatggncaaacaaggtggcccactgagtgaagttcactctggattcaagaaaactcaagcatgcggcccgtattcgagctgagttggctattctcactaaggggggggtaataaacataagactcctatggttaacaccacggggctggaaaaccgggggaaaccgagttaatctgctgcaggggttccccttttgccggtgggaaaatgcca

SEQ ID NO: 658301 - DNA, 1147 bp, Homo sapiens
cggcggcaaaccgaagttggaatgtgtactcttagcagcgcgcggtagaagaatcggggagccagcatcatggcagaagcgaggagtggtggaaaactgatcttttggattacgatgaagaggaagagccccaggctcgctcgtgagagagagcaccagctccacgccgtaagaagagacgatcaagggatcctacgttgtccatccatcggcgtctggattcctgggaacttgactgcaggaagccgggagcgtccgtgacgggccatcagtgggactagtgagcattcagagcaatccttacatgaggtccgagctatgagatgcattccccaaggccatcctgggcatggactgtcgctgtgccaggccaatgtccgcggatgggcaagacagcaggtctatcgtagcttggtccatcctaccatgcagattcgagccctgtcgactggaccagtgtgacggatccatggatcagtgttgaccacacgagtggagcatgagccgtataccagatcagcaagaggaagtatgagcagcagtttgccaatgtacattgctgcagcagataaagggtgtctggtgtaactctacgagttggtcctcatccgatcgaacgaagggatggaacgaagatgttagaggaaagaacatgtcacgccatgtcggtgagtcgtaaacccaggaggccgcatcctggctgctacgggcgggaataggaagatggcagacattacaggaaagttgaagcaaacatggtgcgtgtgaggatgtgttgagcaagaatgattggagcaaagtgggacaatgaaggtgagaatgtgaagagaaaatcggagcggacatgtgaatcgaacagacaaaaaatagcgaacatgaaagttaccaggagccaccccgagaacaaacggacagaccggcacagaagagaacaggaacgaacctgtaaggaatccccaggaaggaatgcgagaggaagaagagaacacgaacagacgggaggacgcgcaggaaaaaaaggcgaagcatcaagaaaagaaaaaaaacaagcaaggacaaaagaacggcgacgataaccacagagagaaaaaaaagaaagacgcaacaagcaccaacaacacaaacaaggcaacaaaagagcacacaa

SEQ ID NO: 658302 - DNA, 1566 bp, Homo sapiens
gggactgatcccaaaggagaacacattccagcttctcatctatagctgcggccgtagatcatctcaggtgccatccgagtaggggttgcccaacctactgatgtagcgcttctcgcggtctggattcttgacgtgttccgcgagtgccctcaggcgtgaagtcgtatcatcgggtccatcaatgagacagcgccgaagtccgaaagtcatgactacgcaccacgagttcttgttgcttctgcggagaccatgcgcacgtagagtaggcgagaggtaagacggtcatcggctagtgatgactgttcactgagagtggccgagtcaggggctatgagcactgaattgcctgatttggtcctttcttgtgactaccagaggcgtacgaaatcgttcgtggagagatgcacgtattgtgaggtaaacgtagggcataggggcacaccttgacttcctgtagaattgcacttggcacccgccgggcacgagccgttgaccccgccctcaatatgagctcgctcagactgcaatggtggacctcgacgaacgggttttggcggtcccctcccatatgggtctcgcttctagactgtagtaagggcgaacccgccggtgagttagcacaactctgtggcaagtccataccgggtctggggagagcgttgactttgcgcccaacgtgcggcgaatgcttcggggcacactggtaccgccgttttcccatccccatccgcctattggcgacgagggaaatagccggttcccccttccttgtgccgagattaccgtttccgcatctcagggatgcgagactatacgccgtgggtcactttccgaacagcctgttctccgttgtaccaatttcgaaagcgtccggaaagtccacatctgccgattgcgaaatctccacttgggtttcaccatttgttggaggcctgggtggccacgcgctataggatctcccacaaagctcccccgtatatggtgacacctgttaacagggcggcgtcctcgatatggaggaggcgcacgcctcaccacaaaatggtagcacgacgcgaacatttccacacgcacgacgcgcttatctatggagtgcgcgcgcccgcatcaatgcgatgagcagcagacgtcagcttttccccagcccccacgcagcactcggtgtcataggatctgcaacacgagacgctactcgctcaggggcaacatctgggcggtcccacccaggggagtgacacactaacgtggcaaacaatgtctggccccgcgcgcggtgtatgagtggatgtgcggtcggtcaccctcctggaagggtgatctacgaggagtacagctcataataacccagtgaccctgcgtggtgattagcagggagtgagggcaacacgctattcctaaattgctacagcggcggcgagatagctcgcccaacagttgcaggtggccacaccggacatgtagtatatgcacgggctccctactatgcgcgtcgaacgacgagggcactacccgctgtgacgggtggtactataagtgactccctctcatttacggctgttgtgtatt

SEQ ID NO: 658303 - DNA, 332 bp, Homo sapiens
gaatttccttttctcaactctgtgataatatttctttttttggctgggcctggtggctcatgcttgtaatcccagcacttttgaaggccaaaaatgggtagatcacttagggtcaggcatttgagaccgcctggccaacgtggtgaaaccccatctctactaaaaatacaaaagttagctgggcatggtggcgcacacctataatcccagctacttgggtagctgaggcatgagaattgcttgaacctggtaggtagaggttgcagtgagccaagatcatgccactgcaccctggtctgggtgacacagcaagactctgtctcaaaaaaaaa

SEQ ID NO: 658304 - DNA, 155 bp, Homo sapiens
atggagaccaggctgagtgggggatcccagcacgtgagaggtaaggcaggaggatcgcctgagctcaggagttcaagaacagcctgggcaatgtggcaataccccgatctcttcaaaacatacaaaaattactcgagcgttggtggcgcaccttg

SEQ ID NO: 658305 - DNA, 410 bp, Homo sapiens
gtggtaggatatgagggagaggaattagtagagtgatagaggagaagataaaatcgctttggaaaggaggtgagcagattgattaagttcaacatatacctgcccttttacccagaaattccactcttaggaatttatccaagaaaaattaaaacatatgtccacaaaaacacttgaataaaaatggtaatatcctgaaaccaatgtatcaagtaagagtattcactgtattattacagtctagaaggcctatcttatggtgtcttaatataaataattttcttacattcctaaaatttttttattcctttttttttttggagagggagtctggctcggtcacccaggcgggagtgcaggggcgtgatctcagctcacggcaacctcggccacctcccaggctcaggtaa

SEQ ID NO: 658306 - DNA, 311 bp, Homo sapiens
ctcattgtggaacactgcaaaataccccctcctttcttgacctttctgtctctgcaacagcctcatgtgttcatcataggcacatcaggtggaagggaatgaaagccactgtgacaaacaagacaaagaaagcccagcattgccagtggcctgggacctgaaaacaagtcattgtgtgttaattcttcatggaagaaaactaaaggtcgtgtgtgtcagtgtgaatgctggctgtgaaattaatgctttggccaaatgactcagtcgagacagaaacatgattttgttcgcgctggtgtgagccaacatct

SEQ ID NO: 658307 - DNA, 433 bp, Homo sapiens
tcataggttcgcaggatcataggcacaacagtggcagggaaggtcagcagataaacaagtgaacaaaggtctctggttttcctaggcagaggaccctgcggccttccgcagcgtctgtgtccctgggtacctgagattagggagtggtgatgactctcaacgagcatgctgccttcaagcatctgtttaacaaagcacatcttgcaccgcccttaatccattcaaccctgagtggacacagcacacgtttcagagagcacagggttggaggtaaggtcacagatcaacaggatcccaaggcagaagaatttttcttagtacagaacaaaatgaaaagtctcccatgtctacctccttctacacagacagggcaaccatccgatttctcaatcttttccccacctttcctgcgaacctatgagggtaccgagct

SEQ ID NO: 658308 - DNA, 577 bp, Homo sapiens
  misc_feature (84)..(84): n is a, c, g, or t
gagacacagcggttcgagaaggttttgaagagactggtataaaatcagaattcagggccgtcctgagtattcggcaacagcacnccaatcctggagcttttgggaaggcagatatgtatatcatctgccgcctaaagccatattccttccccataaatttttgccaggaagaatggttaaaatgtgggtggatgggtttcaatggcctggcgaagactgaaaattcaactcccctccccagcagaggtggtaggctgctgctgtatggggacaaaaaagggtttggcaaaattggcctggctgtggaagaacttccagcagtttacccagggctgttttattaactctatcataagggactgccagagaattataaaactatgaaagggattggtttaattcccctttatatggttagaaacatggaggctaacgaatggcataagaaatagtgggccttttgggttgatttaacatctggctgggattttttaatggatatgatttccatgaagaaattttggtttttaacatggaccttttaaaagcctctttttgaataaagccaatgggggga

SEQ ID NO: 658309 - DNA, 193 bp, Homo sapiens
tggccgtgctccaccactatgatttccacgctgggcgttgacagaaacacccacgtgtgcctcctggagtgtcagcctggctgatggccctgagccatgcattcagggagtgacggctgttttgactcgggtgcagtgacaaagtggtgaactgtggaagggtgtattataagggatgacacctgtgatgctc

SEQ ID NO: 658310 - DNA, 131 bp, Homo sapiens
gaaattgcttcactgtgtagacgcttcattgacaccactcttgccatcaccagtcggtttgccagatgtacagaagaggccagtaggccatccccagaggatgacaaaaggcaaaggactgttactaagag

SEQ ID NO: 658311 - DNA, 164 bp, Homo sapiens
cagataaggcatgcgcagataggctgtttatttaatggctgatctatgtaatcacaggaggccagtatgtacatgacaaagtgggaggttttatttctggtgtctctctccttccttgcgatacaagtcttgcatgctctccttccttcttggcctggaggctg

SEQ ID NO: 658312 - DNA, 763 bp, Homo sapiens
  misc_feature (763)..(763): n is a, c, g, or t
tggagggggagtttggctctgggttgcccaggcttgcagtgcaatgggagagatctcagctcactgtgcaacctctacctccgttggttcatgtgattctcccgcctttagcctcccgagtagcggggattacgggcttgtgcacaccagtgccaagctaatttggtatttttagtagagatggggttcctcagtgcgggtcaggcgggtctcagactccgtgacctcaggtgattcgaccgccttagcctcccaagggggcgggagattaccgggtgttgacgccatggcacccaggacgggtttacccatttttacgcttgtgtcaagaatggcctcccctttaaggggctgaaataaatatcccttggtttggttttcccacctttttgggttattgggtattggttactaacgggtcctgggggtgtaccaacctgggcatgtgtggatatactgtatgagcagtggtgaacagatacctcttccagacccttgtttccagttctgtcttgggtatttacccagaagtgggtcctccgattattttggaactccatttaattttggagtggttgtccaatggtccccccaggtgtcgtttactccctcacgtgcattgccagttttcattccttttaggagaacatccacttagttcctgatcgtgggtattggcaaaaaaaaaaaaggggggggcgaataaatggggcggaaagaggtcaagggcggtccacgccgtacggttcgctaccccgcggtn

SEQ ID NO: 658313 - DNA, 117 bp, Homo sapiens
acatgcactttgatgagcctgattgcgaacactcttttggtctggacaaggctcctgtgctcctgtcttccgtgaatcggaggggcttcgggaccacctcccgtagggacgggaaga

SEQ ID NO: 658314 - DNA, 435 bp, Homo sapiens
  misc_feature (27)..(27): n is a, c, g, or t
  misc_feature (97)..(97): n is a, c, g, or t
  misc_feature (432)..(432): n is a, c, g, or t
ctgaaaatcgggtgtttgaaaacccancccggcccaacatggtggaaccccaatctcctacctaaaaatacaaaaaaacctagcccggatatggtgncgggtgccctgtaatcctcagcctacttgagaggctgaggcaggagaatcgcttgaacttgggagcagaggtgagctgagtgcagtgagccaagaccatgccattacactcaagcttgggcaacgagagcaaaactctgtctcaaaaaaaaaattagccagatgtggtgacgcatgcctgtagtcctagctactcaggaggctgaggtgggaggatcacctaaggccaggaggtcaaggctgcggtgagccgtgattgtgccaatgtactccagcctaggtgacagagtgagaccctgtctcaaaaataaataataaataaataaatgttcagancca

SEQ ID NO: 658315 - DNA, 751 bp, Homo sapiens
ctatgctgattcgtcggtcaccctgaacgctttatattcttatcctaccaggcttcggacataatctcccatattgtgaactgtacatactccggaaaaatagaaccgtttggatacatagcgtatggtctgagctatagatatcatactatgcgctctcctagggtttgatcgtagtgagcacgccatatatttacagtaggaatatgatcgtacgtacacctcgaggcatattgtcacctgccgctaagccactaatcatcgctatccgccaccggacgtcaacacgtatttagactgactcgaccaaactccacggaagcaatatgaaatgatctgctgcaggtgctctaagccctaggattcatcttctcttttcaccgtacggtggcctgatctggcagttgtacttagtcattaagctcagtcactagacgatcgatactagcgacggacaacgtagctacgttgtagctcacttccactatgtcctatcgaataggagctgtattgtgccatcataggaggcttcatgtcagctgattatacccgctattctcaggctactagcctagatcaaactacgccaaaatccatttcacgtatcatattcatcgtcgtaaatctaactttcttcccacaagagtttctcaagcctatccggtaatgccccgatgttactcttgactatccccgtatgcatacaccacatgaaacatcctatcatctgtaggctcattcatttctctaa

SEQ ID NO: 658316 - DNA, 227 bp, Homo sapiens
cgagaggtactcgtcaatggggatgttggtcccacctggccgagactgccagtgtacggcggaatactgctacatgttcatagttcttctcgacgtcccggtccagcagctccacggggtgatctccttgcctccaggcgcttctcattctcatggatcttcttcacccgcagcttctgcttctcagtcagaaggtcgttgtcctcatccctctcatactgggtgac

SEQ ID NO: 658317 - DNA, 852 bp, Homo sapiens
gagccgatcgcgggcgatgtgtgcgtagccgtgcatctccccggtgtgttggaagagcagcgagcccaaaatgcagcgatcgctcttgggggatgggtctccttgagctggctttgccatgtctacaggagaacacacggttcggttgaagtgtctgactacatttccaaccaaagtgtcactgtccactcactgacgggtacagaatgcttcctagggacaatcaggaatttgttcctatcaaagggtaatctcgcccccttgcaacttaaacgcttggttactagttcctgtaatctcgatgtcaggatccgctgcaccaaatccagggctaactgaagacaaggtacgcaggtatccattgaaggctggaaatttaggctcacgtacttcgtcgaggattagcgtgtcttttgcccagttacggattactgatcctcgattgctgccactcaacaaacttaggagtacgtggcgtgcgtctatacctgagtggcagaagacagaggaccagtaattctacccatggctaattgaagacacaagtggcctgttatctatcgcgggtgtacaggggattatcaattgatacaacctggagcccagcaagattacacaagtctgagaatgctttctctgtctcatgtcgtcagccagcaccaagcctatgttgggcactatcagggctgatggaaagatctcagtacaactcagatgcataatgctgaatagagattgtaacaacactttcttggctggatgtgaagcttaaactcctgtggattcacatcgagataccagcttcagatgttgtcattgttctagtaaactagttccataatgctgacaggg

SEQ ID NO: 658318 - DNA, 1416 bp, Homo sapiens
  misc_feature (1)..(1): n is a, c, g, or t
ngagttgttctgcggtgcgacaaacgcaagtggggcgaactcttgggggtgttgaagtgagcccccctgtccgactgctgcgtttctcggagatagagttgtgggagagctccctccggatggttgttgacccgaccgacacgatgttttgtgatgcgacgatatgtgttggttgctaaaatggcgcccctgcataggagatcgtgcctccctgatatgtgatcgtcacaatgtgggttagacgcggccgatatttctgcgctttgcgctagttgtatcctgcctgagtcccaaagagaatgtggtgttttgaatatgtgtctgattgtctttgtcgtttgtggtggttgataaactctacacgcctgtttgtggtgaaaatagatatttggtgaacactgcgtccatcgtctccccctttgtgttctgttggattacttactctctgcatacatctttctcgccaccgcgataataataggaggagtgtgtcgcgcaccagacccctccttggtgtcacacgacttcgggggtgtgttctcccccgccgtggtcttgttaaaagagatcagatggttcgtgcgtaatatgctgccaaccgaattattcctttttctgctgggggagaagaaacgcccccgtggggattcgtcgtggtttttaaaggtaatccctcgtctccactcttctcgtgtcgggaagaaattggggtgagatcccggcgaagggtgtggaaccgaccgcaactatgggcgagacaaaatagtttcctacaggcgcccgcaaaggttagtttcccgcaagatctccccaagagtgataagaggcaatttcctcgttccctggagaccccacgccacagagagtggttttgatattcttctctgtctctcgtgggaaatacatcacactgcttgtggaaatatgatttgtgagacgcccacgccccgcgtgttctgtaacgtatgacacagacactggccacagaaaaatagagagtgccacaccccgtgccacacatggggtgctttctccgtcttctcaaagagatgtggaatagccaaatcttgtctgttgtatagaacccctggacatggttaagacaccctatctcacaccctctggagagtgtggaacccccagagcacaccaccatctggagaaatattcaaagagccaagagtcccagattaaggataggcgatccctccgtgatccagccagaggttgatcttttgcatgggaaaccagctggtaaaatggacacccaccctgtttgactaccaacacatcccagaaagagatccactcttgcacttggtcctgcgcttgagggggggtgtttcaactttccccctttaaggtttcacaccaatttcattgcactttccctttccaataaaattgttgcattcc

SEQ ID NO: 658319 - DNA, 799 bp, Homo sapiens
acccacgcgtcgcaacacctctttacagtgaccaaaaaaaaaaaaaaaaaaaaaaaaaaaaaaaaaaaaaaaaaaaaaaaaaaaaaaaaaaaaaaaaaaaaaaaaaaaaaaaaaaaaaaaaaaaaaaaaaaaagagagagaagagagagaagataacacataatgtatttagagagagagagtatagatagtatgtatatattgatatattgtattgagagaggggggttgtggttatgtggtgttggatatgtatgaaacagcaagtaggatgtgatttgtgatatagtgtatatatataagagagagaagagaagagggagaggtggggagtgtgggagatgatagagaaagataggtaaagggaggatcataggatataaagagtggagaagagaaaaaagagggtagaaaaggaggagtgttgaatgtattaaatgtatgttaaatataagagatactatagagtgtggtatgaaagtaatttaaaaggaataagagagaaggagttaggagtgatggtgtggttagaagtattttattatgttatttaaagtggtggaggttggtggggggcgaatatcggttggttgtgcgaggggagaggaactgtgctgaggtaggaaggaataacatgacaagtggaatgagaaatagtgaatatataagacaggacagggggagggaaggaggggaacgagaatacgcgcgggcagagcaaaagggaaaggacgagcaggcaagaagaggagaaagcgagaggaaggggcgcgaacgcgaggagcacaagcacgggcgg

SEQ ID NO: 658320 - DNA, 716 bp, Homo sapiens
ggcgcaagcgctatcctgagcaggatgcggttcgtggttgccttggttcctcctgaacgtcgcagcggcgggagccgtgccgctcttggacaccgaaagcgtcgaatcaagaagaagctggagtacggcgcttctgcaggaacacgtctccacccaccccagcttgagccaacggcctggaggctctaccaagtcgcatccggagccgcgagactccaaaagacagccctagcaagtcgagtgcggagtgcgcaagaccccagaagacaggccccaacaagtcgggtgcggaggctaagacccagaatgacagctcctaacaagctcggagtgtctggagagcgaacagacccgaaaagaggcagccactagcaagtcgaggttcggaggcgcagtaccacaaaaagacagcaactactaaggtcgcatccggagctgacagagctccaaagagacaagcactggcgaaatcgggtgcggaggcgcaaaccccagaagacaggcccaacaggtcggggtgcggagggcaaagacccaaaaagacgggcctagcaaagctcaggtccggaggcgcagaccgacaaaacgatgtccctaagtaaggtcgggtgcggacgggcagaccccgaaaagacggctccagcgagtcgggtgcggaggatcagacccccagaaagacgtccctaacaagtcgggtgcggagaagcagagtccag

SEQ ID NO: 658321 - DNA, 974 bp, Homo sapiens
gtaaacagccccgaatggagtgcccaggcgtgttcgccgcggaggcgccgttatcccgggcccgccggccctgagctcccggcggcgcagattggctcacagtggttgattgatcaaccccattggacgttggttctgtggtacaaatggagtacaggactcagtcgtcacggcctgagtgagagaagccttatttccaagatggagaagaagcggagcaacgaacatgaacagcctctcttcaggctgaaccacaaaaggccatggcgattcaacttttatttatgttgggcaagactgtaacgatggctgacttagtaatgttgcagcttctcagctgaacacacaaaacttcaactttctaatcaacgacgacaacacacagctgctgcatttgaatatatgcaatttctcactgatcatattcgcttgtgaccatgaagcttgtccaacattctggctgcttctgctcgtggtttccgctctgtggggaagaaaccatctggggcgaccgactggcacacagcacatcttgtgcaccaacgggcgcaatgtggcctgggctgttccccaacttgactttggcacgggtggacattcctcattcacgcagctggtcgggcacttctggaacttacttcactaggccgcgccgtctcccaccgggcgcttacctgctatcacagggcccgaaatcggcttaggaaaattgtcccggtgtacgttgccacagtgtgcccccgtgacaagcgatagtgcctggtgttaccacggtctcaccacacacacactactgggacaggacaacacttactttacaccctttcgcgacacaggcaagacttcccgattgccaagagttgtgaccgctatacccccgtataggtgaaaattatatagcgaaagagtgtgtaatatctccgcgacatctatcatcatcagtacgcgcgtagcaagtcaatacacaatgggtc

SEQ ID NO: 658322 - DNA, 541 bp, Homo sapiens
gtggcctcgggtggtctacgtagtgtgccgtgagctccagaaccctgtgtctgcagatacctgcaaatgatccacgtgggctcccttcaacggcaccagcactgcatccttctcccgtgacagacggacgagctcctcatgcttcctcttaaatgtttcctcttccctcttcctggttaagctgcacagagtgaagtttatccttctaaaatcctttaccctgaaaagacacacatatttatggaaggagcaagtgagatgaaagcaaagaccaggctggaaatgagcagaaacggtagaatcccccagaatccagtcccggtcatggaaggatggcacagagcacgcctcggggaagatgaaggactcgcgcacccgtgcgcggctcatggcctccagaatctggagctccccggctcggctctggagcttcactactccagctcggcgtaggtgggctctgccctctgcagactctctgcagcgattggcccgggtaccttcagagcctacagatctttgtgccgtagtataaccttaa

SEQ ID NO: 658323 - DNA, 135 bp, Homo sapiens
tagctcggtaccgcttctgcttctgccatttcaattaatgttcttcctaagtgataaggatgtagacttataagcaggctcttggtgaggagggtcttggtgaggagggtcttggtgaggggcagaagcaggaag

SEQ ID NO: 658324 - DNA, 136 bp, Homo sapiens
cagcacatctgcatctgcaccatcatgcatcactcacaggcatcttttttcgtccatcagccatgagtcagcccatgcttctctcacacacagcagactctctcacttttcttcaccagcgctcaatcatccaaca

SEQ ID NO: 658325 - DNA, 363 bp, Homo sapiens
cagctatgtcgtggtggctcacgcctgtactcctcagcacttttgagaggacaaagaggtgggcgggaatcacttgaggttagcgacgttcgagaccagtcctgggcagcatggcaaaaaccccagtctttacgaaagatgtaaaattggccgggtgttggtggtgtgtgcctgtagtcccagctattcggggggctaaggcgggagaattgcttgggccagggaggtggaggttgcagctggctgagatcgtaccactgtactacagcctgggcaacacagcgagactccatctcaaaaaaaaaacgaagtttttgatgcttccaaggtgccattaaaattggtcccgaagggttatctgga

SEQ ID NO: 658326 - DNA, 758 bp, Homo sapiens
gctgaagaacaaccgcaggtcgacattgttcgtgaaggctggcagtgactggggccaagcattggcgaactgccacattctcccagaagactgttcatggctactgctggctcaaggcgagtcaccttcacatgttaccacctgttgacaccaaaaggcggaccgagacagtgcaccaagctgtgcccaggggggcagactcccattcctgctgtatggcactgacagtgcacacagacaccaacaagattgaggacatttctggcacgcgcagctgctgtgccctcccaggtaccccaagctggcagctctgaaccctgcagctccaacacagcctgggcctgcgacactctctctgccacacacttttctgcctacactcccgcacctccccccacccagcacctcacctgccccctctggccccaagggcactcctgcacccacgcccccctgcacagcgcttctccacgcacacactctactctcacccatccccccctcccagcaacacaactggcactcacaacccactgcctgacaccaacctgaccgcctgctcctcctcaccccgccccctccccgcccctgcccccccccccctcccctgccctcccctccccccctgctccccccccttccccctcccccccctgcgctgctcccacctccccgcccctccccccccccacgcccttccccccccccctcggtccccgccccgccctcccccgcccccctcccccccccctccccgc

SEQ ID NO: 658327 - DNA, 373 bp, Homo sapiens
agggagagcaaacactttggtcataaaaggatatggaacacccaagtttttcacacaaagtttattgccctttcccaacaataatacctttgaaaacattccgagatgcactttcccatgacttaatatatattaaccgcgctcaaaatacatgtgcgggacagatattggtgcttaggctccagcagggaaacacaagaggcccagaccctggtggtgggaaacttattacactcctaggggcaggcaaacaaggggcaggcttgggagacccattacacgggcaggaaccccttttttcccacatttccttaaccccttggcccggcctttggattctttttttcaaatttgttaggaaccccccaggaac

SEQ ID NO: 658328 - DNA, 457 bp, Homo sapiens
tgaatatttacaagtagatttcagacaggaatactacagggtggtcacaggataacaaattctaggcagcagatttacatgacttgaggctgtgggctgttaagacgctgaaaaaccagggtgtggaccaagctggctaaggctgagtggacccaacgtggtgctggattggatggaggttttacctaggccctcattatatgctcattaacaaactaaatcacacacccgccagtgccatgacagttctgagaccagtgtttgatgtaaaaatggcaccacagttccaagaaatctccacctttacccaggaattttcatgaacattccactccttggttaaagaaacccatcaagatgaaaccccagaacccattattctctcttgggtatgcccaagctcccctttcttgagtgtgttctttttgctttgcaataaatctgttctttcacaaaa

SEQ ID NO: 658329 - DNA, 1053 bp, Homo sapiens
gcagtgatccattcatctaaactctgatgctacaaggcgcagtgctggaatacctttctacatacaggcactgttggcatctgaaccaaacgaaaggcagaatggatttgttgaaaataacaatgaaagcagttaactctctttggctgggacctacagatgacatacagcagtacagtcccccaggttcatgctttacacactactccttagagcattgctcagagatacgcgcctgggcagaaaatatcatcccttcactgtcgctgattggcagcctaacggcctgacacttcctgggctttaacactcacccggctctggcccagcagacgaaaaatacactccacacatatcatcctcccacctgccccttgcactccaccaacgcaactccacccgaacgcttcccacacggcgccacagcgactcgcaccacttcccaacacacccaactacgacactgacccgcgcacccgcacctcaccactacctcaggatcccaccccaagacaaacctctactaccctatactactattcctccagaaacccaggcaccgcgccacacctgtgaacgcaccactacctaataccgctcagaatccaagatgacataatgggcgaacgcaacccgcaagactaatatcccgtatcaactcccacacactgccacgtggctcaataaccttcgtatttaacacttcacaacagcgacacgattacgcgacagaacagaccttcccatcagactacctctacccacacagaaatagcggacccttcaggccaacgctcaccctctacacctggccctctcataatactcactaaattggaccaaaccccctattatgagaaatccaccccttgaccacaatctcactgcaatcgggcctggtcgagcattcagaactcaaaaccacatgacatcctttacatcaatctcccccccggcttgcccaccctcctcgctcctcgccgctcgaatgaccacattgttagtacccacaaccacattccgagcctatactcgcacactatcaaaactcca

SEQ ID NO: 658330 - DNA, 155 bp, Homo sapiens
tgagactccatctctaaacaaacaaacaaacaaaatagtaattctagtatcaggacagattggccccaatttagcaccattctaataagatctgctttatttaagaactgtttgattcacagtgctgacagagattatgatgcggaggcagggtc

SEQ ID NO: 658331 - DNA, 138 bp, Homo sapiens
  misc_feature (3)..(3): n is a, c, g, or t
tantcttgactcaggtcacacagctctttatggtgaagccccgtgaactatgcaatctgagctctaagtttggatatctaactgctctgctgtgttgctttcccattatatgcttaagctaactaattacgaaaaggg

SEQ ID NO: 658332 - DNA, 296 bp, Homo sapiens
tccagctcgcatttgagcggccagggccagggaccacgcctcggcagatgacgtgctttttatcgcagaggaccagttctgccatacggggcactctatggggccaggaacaatggccactttcggtgatagcagatggatctctcaccaactagatctcaggaactcaaactagacagagaaaccaaacatatttcatgccattctactcagtgcatgggattaatgagaaagggattcgacaaagaacgacagccattcattcagcaaatatttgagggtggctgcacatggtg

SEQ ID NO: 658333 - DNA, 305 bp, Homo sapiens
  misc_feature (76)..(76): n is a, c, g, or t
gtgtggggaggatgccggcagctcagggcacagtccagacctggggacacccgcgggcaaaagacaagtcacgagnagaagaagcggagagaaccaaggattttttcctggttggaaaaaacagagtcttaaaaatcctgtgggatgccagggagtcctgggcgctgatatctggtggcattaaggagtcaccatcaattattttaggcataaatacagaactggggttgggtggggtgtttggttcttatctttgagaatactttctgaagtgtttatggataaaataatatgatgtctggaaa

SEQ ID NO: 658334 - DNA, 260 bp, Homo sapiens
ttattttctttaaacaagaatcttccattttaagttcttaaacctatattttaaattactataagggacagaatgtttgcttgaaggaaaaaaataggagagatgtcaaggtcccaaaccaatttgttttcttcaaaatcaatggtaattggtgaaccctggtaaattattaatacacagtacacacacaagcgttcacatagggtcacacgcgaaaagggtggcacatttctagggatggggtgcactaccgagtggga

SEQ ID NO: 658335 - DNA, 314 bp, Homo sapiens
ctcacaaagctatcactatacaaatgatgacaagtgcacaatggaccaatgctcaagccagagagtgtgccaatgtaacagagcgtgacgaaggcagtcacctcctgggggcccaggtagggcacactgatcaggaccctttgaattataccctgaagaatgaatagagaatttttgagagggcccgaaacaagatatcgacgcacaacagaaacagagagcttactaggtcaagaactcaaattgaaatcctcccctgtcacacgcgacggcccttgaccacttcctgcctatagctatgggctgctgaacta

SEQ ID NO: 658336 - DNA, 907 bp, Homo sapiens
ggaacgtcaacttaagagcacaggggattagtgaggttatggttcttgccgcatccgacatttatttgaaacttgtattagtcaagcaacttaatgctaggctaagttgcagtgagtaataatccctagaccccagtgacagtgcagaaaaagaagggtttcatatgtggagtgtgatgcatgtcaatgggagtttcctccacctggtgactcaggtatccaggcacattcatctgtggaggtctgccatcttgacacgaggtcattcgcagaaggagagagggtgtagagtcctgccactttttaggtgctcctgacaaggatatcttcagcactcctgttcacattccctgtttccaaaacttatcctttaccgagtgcaactggcaaaaattctgggaagcattacaagttctctgttggctggaaaccttcataactacgtaatatggcccttaagccatacattttcatgggttcaccccggtatggctgacctcataaggcttatatcatttcaccttgtgatgtatcagctttattgtcatgaaaacgcaggaacctcgtttggggggagacaagcgtctttcctcattcgtccccacttgattttctttgaagatcttgttctttacatataagtgaatgttggtttacatgttgtgacccaacttttttcacatacaccaccccccggcacacccccccattggagtttcatataaaaccaaccgaggggggcgcggcggcggggaaaacgagtggggggtatcaaaagggctcatgtcataaattgaggggatatattcggggggcaaactctttttggtcgcggcagttactcggctaaaaccttaaatgggggtgacaaattgatatcgcgcgttgttgtccccatgtatttttg

SEQ ID NO: 658337 - DNA, 503 bp, Homo sapiens
ccatgttatgccggggggagaagaacggatctggtaatgtaattgtagtttaagaagattagggaagaagtcccgatatatgtccatttcctgccagtgaggctgcggatgagcagttgactccccagtcccatccctccggactgcttttcgctgtcctgggtctgtgctgttgcatggagttcctgggggaagcccgtggggacggggcatctggccagggctcactgctgttgacaggtgaataaagaacgtccggatttcctttgggtggacggtgatgatggggcctcctggtggcctcgagggagaggtggtgtcacctctgtggcggccaggccccgtcctccagctccagcggtgcagcatgctcaaatcccaggtccctgtgagcgagcgctcctccactggcaccacggaccccagcgcctgcagcacagcctccagattcactgttactggctgagacaggactgggtcctcgcccacggcaataaggtggg

SEQ ID NO: 658338 - DNA, 211 bp, Homo sapiens
aggaaatgttgaagaatgaagctgggtcctcatctctcaccttatacaaaaatcaactcaagatggatcaaagacttacatctaagacctgaaaccatagagttctagaggttacatcggaaaactcttctagacattgactgaggcaaagactgcgtgatcacgaccccaaaagcaatgcaccacatgtaaagataaatagatggccctc

SEQ ID NO: 658339 - DNA, 920 bp, Homo sapiens
aatcaatggttttacactggcagcgatcggaaacacctgcagataaaccctgtaccattccattattgagaccttaatgctcacggcctcggctgcttagaacgaatagtctgtgaaggtatctggtcgctcttgctcctatgaaatctagcaggctaccattgtcatttcttagggttcattcagttccttgtgcaagaacttcctccaggaacactattgctacaccgagcgtagtctacatgcgcatgactcgaacactttgtgcccttggttgctcatctgtaacttggacacgtatgcactcctcatcttggctgtactgtataccatgtgctgctgataatctgaagaaatgccactccctttaaggtgatgaggacacatcaggcatggaagcaagtaaactaatctctgtactgaagggatgatcttaacctgttccatgatactctacaacttcctctgcattatatacttttgcgaggatgttttccttgattgtttgttaattattaaaaagtctgtatgggcatgaacaacctactttaaggggaagatacgattgctggtctagctaatgtgatgctgtgataccttatggcactaaagcagagctgagtaatgcttaggcgttccatgtcggtttatttctccagactgggcggtagctgtgctctgtgcgactgttgttaccattgtgtgttagcctttcgtgtgggtctaagcgttggtttagcctgtcaagtccggacgccttaagttgaccaaatccttgtccttgatgtggtctgagccggccctgagggtcctgaaaagtttcggtcctcttgtggtccacctttttggccctgcccccgctggtgagatctgctgttctagccctgaaggtgctggccctgggggggcctccccgggtc

SEQ ID NO: 658340 - DNA, 159 bp, Homo sapiens
  misc_feature (61)..(61): n is a, c, g, or t
atctcaatttgctccagatgagctctttgacatctcaagatgcgatcacatgggccggatncagagaaatgtttcctggcagagcagctctctgcctcccacctctgtgctcccagctcacaatggaaccactatcccactacattccacagggggcgg

SEQ ID NO: 658341 - DNA, 133 bp, Homo sapiens
  misc_feature (98)..(98): n is a, c, g, or t
tagtactaggagtagttatagtatttgggtctatacgtattaggtctttaacccatattgaattaatttttgtagtataggtataagataaagggtcncaactatcattctacttagcctagtgaatatacca

SEQ ID NO: 658342 - DNA, 160 bp, Homo sapiens
ccgtgtgtcagagtctcacaagaataaaatatagaaggctacatggaggggttaaaaatacacaaaaaagtagttgaacaatctataaattttttatacttgaaatcatgattgagttgaaataaaaaagtgcatttcaatggctaaaaaaataatatcg

SEQ ID NO: 658343 - DNA, 1073 bp, Homo sapiens
ttgggattttactgaagttagttcgggcaatgctccattgacgtcctttatttcgagactgtggtggtcccctactactgtacagatcgtttcgggggccgattcgattctccgggtccatggacaaacctgtactagttaccattcaacctgccgtgcaggaatgttctgaacatctggcacgctaccaaccttttccaggtcacatcactgatgtctaatggtctacggctacgtgcaaccgttgctcctggttacagaggaaaaggtcccaacggagtggcacagatgctcggaagccccaccaaggggcctcgggccctcccctgcccctccgacaggctccgccctccctgacccgcagacagccatcgtgccctcccatgacccgccagcagcctctgcaccttccctgcggcactctggtcggttgatgctccttccgttcctcgggcatggtgccttggggggtaggtcgtgatgtgcactggacgaggaccacagagtacaagaaacttgtgacttcgtggacgggataaagaagttccggacggcatgttcatggtgttatcgaggacattgtccgcacagaccgctggacaaacacggcttgtcgctcccccaaccagtatccagtgatcgccagtgggcaccctgcatcgtcgctcgcctgtggtcctcccccagcactcttgccgctgcacgccagccatgccccaccatccctagccacacccctcaccctgctgtcctcccacggtctgcagacagatgtttgaagggcccatgccgtgcccagctccaatgcagacacatcaggcagtggccaggcccccacggtgcttctcagtggacaatgatgcctcctcctgggaagccttacctgcccagcccacgccgaccaccgggaggaagccgtgactgtcctttggctgcatctcccgaaccatggccaaggagggcttttctagtgggatgggcctgggcacgcggccctactcctgtcagtagccggcccacccaccagcaggcccccaacccccaggcaaaaatggctagaggacgggaggaga

SEQ ID NO: 658344 - DNA, 421 bp, Homo sapiens
gcgcaaattcccgggccagtgtttttctcatctgtaaaactgggtataattcgtgtaccatgactcaccaggtggtgctatgaggatgcagtcactgataaatgtaatttgctccatatggcaccttggtttattcaaaaacggtgtttttcaaacaatctacggtggcagatttgttacactaagtaattgggagagacagtggtgaacctaaaacaggcaaaaattttccttgcctttcatggaggcctggacattctgggataaggcacaaagcaaaaggcccgtttttaaaaactttaatttgggttaaaaaatctatctcattataagagcgaacgtggatgttatgttagcatctgctgtgtggccggacaggtttatattggaggacctaaaaaaaaaataaacacagaacaaa

SEQ ID NO: 658345 - DNA, 515 bp, Homo sapiens
tcttggaagcgggatgtcagcacaagagtgagttgaggatcaaggagaagcatctttcaagcccaccaccgaatagatgcgactatattgatgaattgtgcaagataaacatcaccacatataatgactgttaaaaaaaaggaaatcgaaaaagacttgccaactttctacattcctatattttaacccaaatttaagtattttgtggtgtatagagaaccattttaaatatccagaaggctttgtcttgtttgtttaaaatcgcattttaatttttcatcttggctttaagaaaaaaaaataaaacgaaataaaaacacatttgagcttgctatgttcacatttgaagttttaaaaagaagcagagttgttatgtgttaaatgtgagccttgatctgctttttggtctctgtaaatacatttgaccaattttgttctttattttgctaatgtttaaagatgttactggttttattgtaaagttgataatggtaaataaatgttggttccctaca

SEQ ID NO: 658346 - DNA, 601 bp, Homo sapiens
gaagctacggtgagaacatagccagtcccaaagacaagtttcaaagaaaagatgacagctagagattagctgggagtagtctttgacagtgcttatttgatactgtctctcagagttggcgataaaccaggtaatgtacaatggtcattaggtcgtcagatagctttaaagttgtgaccttctcgtacatgaatcttctacccagtttcctttcctttgtatgcgaaacatgaaatcctagaatgtatgagaagttcagacattaggcataaggaaactcgttgcaggctctctgtccagggctgcttcctgtcctggaggggccagtgagtcttaggtatgtcatttattctcacatttgtgttttgttacgaatcagtgaatggtcaataagctggcttatcttccatattaacaattatttcgatacttttaatcacatcttatccgagcccctcttgaaggctttgggaccccggtcgggcccacgaaaaaaggttctgagacaccgagggggcggcgggggccgatgctcctttgggacctcggctgtagcgggcccccaagaacctgggctgccctttgcgtggttgccaccgta

SEQ ID NO: 658347 - DNA, 696 bp, Homo sapiens
  misc_feature (419)..(419): n is a, c, g, or t
catggtggctcacgcctgtaatcctagcactttgggaggccgaggcgggtggatcacctgaggtcaggagatcgagaccagcctggccaacacggtaaagccccgtctctattaaaaatacaaaaactagccaggcgtggtggcaggcgcctgtaatccttgctactcaggaggctgaggcaggagaatcgcttgaacccaggaggtgaaggttgcagtgagctgagatcactgtcactatactctggcctgggtgacaaaagcaaaactccatctcaaaaaaaaaaaaaaaaaaaggcattacgacggttttccaaggattaagcctaataggtcttacgaagaaacaacaagccccacgggaagcgctgaattcgcggaccaatttttttacaccacaggagggacagcacattacnaacttttacccccacaaaggtattacccactgcggacatattcgaggccttggagaatttatgcaaaaacccatggcaggttaactataacgcgcttgtggtaacttcccaagtaacattttggggaagagcccacggggtgtgggagagtctccttatagagcctcgagggaagattggtatacactaggctttaggcagacattttgtgaagaaccccaattctgttacatacacattgtgttagaacctttcaacaaggacattggagtggtat

SEQ ID NO: 658348 - DNA, 103 bp, Homo sapiens
atcacatctgacaaatcaaataacccttccttcatatctttgggctgatacctaaaatttctgtatactgtaaaatacactgagtcaattctcaccattgatg

SEQ ID NO: 658349 - DNA, 149 bp, Homo sapiens
gcgcaggatctgtgggcaagggttagtgccagaattatctcatttcatcaagttataaaacttgaggtagtgcaactagatatacacttcttgaagacggaacatcttggtttgtttgttgttttatttttcgagacaaggtcttgctg

SEQ ID NO: 658350 - DNA, 333 bp, Homo sapiens
gagactgagtctcactctgtcacccaggctggagtgcagtggcaccatcttggcttgttgcaacctctgccacctgggttcaagcaattctcatgcctcagcctcccgagtagctgggactacaggcatgcaccaccactcctggctaatttttgcagtttcaccatcttggccaggctggtcttgaactcctgacctcgtgatccacccgcctcagcctcccaaagtgctgggattacaggtgtgagccaccatgcccatcttcttttctttatgataagttagtaatgaatttttaattgtcttttattcagaataaactatattataaag

SEQ ID NO: 658351 - DNA, 293 bp, Homo sapiens
ttttttcccctaaccccccccccccccttttttttaggggggggggggggggttcccaacctttttttttccttggcccctttagttttgggggaaaaaggggggtttttttaaccagggcttgggcaccccccccaagggaaggggaatttttttggggcccccttgggttttttttttggggggggcgggttttaggttttttttttttaaacccggcctttttttgggggaccccctccccccaaattttttccccgttttttggccccccttaaaaaggttttttggga

SEQ ID NO: 658352 - DNA, 217 bp, Homo sapiens
gctcgtactctagagtgatcccatgggcggtgaagagtccctgaaccagagggccagctgagccacgcaagagaaactgggagataatggcatgtttggtgttaagccactaaattttatggaataacttgttagagtagcaatacacaactaatatagttttcatccaaacgtggcacaatcattttgtctcatgcattgtttcaactcgtttttc

SEQ ID NO: 658353 - DNA, 993 bp, Homo sapiens
aggtgccacgtggtcagctccaccacagccgcggaggttggaagcgatgaacgacagcccaacacgagttgctgtcgcgccgccgagtgggccagggcaaagccacacagcgggatacgcgactttgggaaagacccgcagctggaaacgaccggcccgttggacaagaaccacagggccgggcccgcaccaggggagcgccgccccccgcgtaaacaagcggtcgccctgagcacgggggaccgtcccacaagccaagggcctgccccctgcagagcagcggccaccccaactgggacgaggcgccacaccagcccacacaagggggagcatacacgaggcacccgccccaccgtggcgcctcggcgggaacccgcccccagcatcaccaaaacgctggtacagatggcgcaaaccacccccagcccctcgtcagggacccggggtcacgcgcgcagaccccgacgcgaccccgagtggaatgccccaacatgcgcctctggcagacacacggtacaccgtatagggagagccgagtcggcaagcaaaggcagggtccttctccacacagaccccgccgaagaaaacaccaggctcgtcccctcgagcaacgggagtgtaacgcggagagaggctgtgggtcgaggatattcacgttagtaaaggagaagaagcggtgcaagtagtaaaagggagaggggactaaaccataatgttaacgatcaccccacaagttggctctagcctactcacacggcgacagatcatgttctgcgtctcagacccctcttgtagagattgtggaggtgattagcgccctgtagtgtcgtcatagtaggacaccccgtgtgggctctcttatagaaaccacctgggttggacttacgagctcttcaaaccactggaaaagtcttttggtagcaaggcgccccggcggtggcccatttccttgggcgggggtttgaaaaaaaggattccccgtctttcataaca

SEQ ID NO: 658354 - DNA, 1057 bp, Homo sapiens
  misc_feature (1033)..(1033): n is a, c, g, or t
gtttggtccgttgctttttttggtcctccttgttcatgtgtgctccgtttgcctcggcgtttgtcatgtttattatgtctgtccggcctgagtgtggggtgtcctgcagggcgcgttttccccttttttggtcgtggctgattttctttttccgcgtaggactgttgagttcgggcctggtaagttctggtcgatccagtgggggtgtcttcggacctccatggctctctacaggctgtcagggctttccgttgctgttcttcgcctagagagggagcttggcccattttggtctctattaggtcctcccttacattttacttttggctacgctgtaggctgacacttcctcagtccaggcgcccagcgagttttgagtcttagaatacaggatgcagtattcagtgtcacgtcgttcgtcttttttaaacgctgtgttagcggcctggtgcatgtcccgttcagagatgtatcccaaactgatcgtcgtggacattcgaaaacgctggtggtctggcgttctgttggcctccggtgaccttccccggtctccgaagttctgttgctgcggccacccggaatgccagtatgacagtctgtctcttcagccacaatttatgtttgcccctagagtgttgctgtgacttataacacttctttttcccatatgtcattcatttctcaagttctgaagagtagcagttaccatcgttagacgaccgttcccttacccctcccttagtcttgggttaagtcccagaatccgttgaatttgccgttcgctgatgacataaatactgtaatttctttgtgtggcacatgagactctctctactaaagcgtaagggctttacaaaaagcagagaccacatcatttaagcttcagcacttaagcccagagcctcacacacagcaggcaatccaataaatatattgttgactgatcaaaatttttttggtgccagtgtagagttgggcttgctgctgctgtcttcagcgtaagtcttgctttttcagctgggtttctcaattnttacatcctaggagtagtgcattt

SEQ ID NO: 658355 - DNA, 445 bp, Homo sapiens
caaaaaattagctggcgtggcctccagcacttgggaggccatggtaggagaatcactggagtccaggagttcaagaccagcctgggcaacgtagcaagaccttgtttctaaataaataaataataacttccttctatgcacaacctgctgttactgtgctaattatgtaacaggcttctgtagagccaaactgatttgaaaaactgtacttggctgttaaaggtatatttaaaaatacgaaattactcaaaatgttttgttgttttgttttgtattgttttgtagacagagtctagctctgtcacgcaggctggagtgcagcagcgtgatctcaagctcgctgcaacctccgctcgccggtttcaagcgattatcctgcttcagcctcccaagtagctgagtagagacgtgcgccagcacacgtgcctaatttgtatatatttag

SEQ ID NO: 658356 - DNA, 210 bp, Homo sapiens
gctagaagtgcgctatgacatgcgccgactttccgcacgggagatgcttttattttcggctccggaaacccgcaggtttgccaagacactgctgttgcataccactcccggcactctcaacgcctcgtatttacacgatgcaaccacaacagccgcacgcttaaaccctctccaactgccagtcgcgcgtgattggtatttcgaggcatg

SEQ ID NO: 658357 - DNA, 1230 bp, Homo sapiens
  misc_feature (35)..(35): n is a, c, g, or t
  misc_feature (396)..(396): n is a, c, g, or t
aagtgtccgtggtgatgagagaaggaagatgttgnttctctccaagaaaaagagttgtggagtgtatgtgtgccgcccgtggtgtaaatacgcacgccggtgaggggtgagagaagagaggagaactcacactgtggttcgccagttgagacgcaatagacgacccttgtgtctcgctacgctagagttggggcttcgcgtgtgtgtctctaagggtaagatgttgctcatgtagagtagggatagagtgtgtgatgagcgcgctcacagtggcgcacagtgagtgtccgaccctgtagctgtgtgatatagagcggtagtatgttgttagatattttggtgtgacgcgcggcgaggcacgtatcgctgtggttacatcacacgaggggggtatanagcagaggaggtgatgcgacgtatatctctcgtttggtgataggaaaacgtatatttggggttgtggtatgagaggggcatatactctttcgcgggagagaatagagccagcatttagatagttctggtgcgaatcagacgtttgggagaccctcacctctggggggtgtcgttcttgtacccccaactatgtggtgtgagagtaatatatatagtgttatgatagacccccgtggagagttacttataggagacaggggcacctcggatggactcgtggctgtgctgtgactctgtgtgggtacttgctggtgggggggaccagggggctcgctgtgtgggccaccccccgcgttgatgcacgcccgccgctgttcaccactttgtggcacttttgtcactgttgtttggcgtttactcctcttttctgatacttcacttcttgttttgtcggctcttgactcgtgtgttgtcacgcgatacccctgattgtagttgctcctcgggtgaggggtggtatattgtgtctggtagatatggatagtgtctgcgcccaatatatatattagaggtggggtctccacccagatttgatggacaccagaaaaagggggggtaagccccacagtgatagaataaagatagaaaatctcttatgtgttgagagatgcttcataggttagttggggaggaaaaaataggtttgtgtacattttgtgttagggaaattaacacccttgggcctttcccataattaaacataggaaaataattacttcgagcaattaactcgggaccgaaggtagagtagacgcgcccgtgtgttggtgtggt

SEQ ID NO: 658358 - DNA, 155 bp, Homo sapiens
  misc_feature (23)..(23): n is a, c, g, or t
  misc_feature (38)..(38): n is a, c, g, or t
  misc_feature (78)..(78): n is a, c, g, or t
caaagagaggctcggctgccggncacagactggatttnttgacatcaagtcccacgcgttcttccgcagcatagactnggacttgctggagaagaagcaggcgctccctccagtccagccacagatcacagacgactacggtctggacaacttta

SEQ ID NO: 658359 - DNA, 865 bp, Homo sapiens
  misc_feature (252)..(252): n is a, c, g, or t
tcatgaagggctggggttttgattgctacattgctggtcgttggcctgacattatgcaacatgaactttcccagacaacccttcaaccagccggctgggtcaaaacttgtagtcctcccagtgggcagatgatgccgggcccagtagggggatttggtacccatgatctcacccaccatgggacagcctcccagagcagagctagggccacacccttactactagtacccaacgatatatagctacagccanggggctaccctttatggccctatactacctactaccagcagacctaggtacagggagctacccacagcactagccgcctcaacacaagtaccctattacctaggtaccaggaccctagagacttaacctaggccctaggtaggtagagagataggggggaagcccttgaataccacctagcttactactcgctatattccccaggagaccccactacaggctaccccggcttgctagctagtttaataggagaaccagcccagtatatcccccacgaacagcagtagggcggaggtaggagggcactaccagatagccaacagcttgggaccccctggccaaggcaggtgggggctaccgggccccagacctacacccacaggcttgtgtagtacccatgtaggtgccatggacggaagtagaggtgaccggatgaccaggattgccatttctgttgtagaggcctcctgccaggaaaatgggttatccccgtgaagtgcacagggcatgactgaaagcgctatgaggctggagaacactgaagcttatggcggcttgggctggatctcttgctccagaccacgagatccactgtcaatccgaaggcagggca

SEQ ID NO: 658360 - DNA, 173 bp, Homo sapiens
aagtagaggaacgggtactgtgtcgctccagctctctcctgagtcgggtaactgcgtcgcctccagctctctctcttgagtccgggtaactgcatctgctcccagctctctcccctgacttggtcgctgtccccgtctcagtccccctgacttgggtccctgtctccatctca

SEQ ID NO: 658361 - DNA, 232 bp, Homo sapiens
ttttccccccccctttttagggggggggggacccccccccgcctttttttaaaaaccccaaatggtggccccctttttgggttccccaaacggggggccccccccctttggtaaaaatttggagggcaatttttccccccttcggggccccggggtttttttcccgggtgggttggttctttttagctttttggccccccccccgggggttttaattcaatttttttccccc

SEQ ID NO: 658362 - DNA, 179 bp, Homo sapiens
tatctgatcttttagctacgtccagccttagcccctaccccccaattaggagggcacgggcccctaagcaggtagtcagcccgactaaatcccctaaaagtcccactcctaaacacatccgtattactcgcatcaggagtatcaatcacctgagctcaccatagatcttaatgcattca

SEQ ID NO: 658363 - DNA, 1379 bp, Homo sapiens
  misc_feature (1210)..(1210): n is a, c, g, or t
atccatcttccctacccttcctgccaagccagggactaagcagcccagaagcccagctaactgcccatttccctgccatactgcttctgactggctgtcactctgcatccattcctagtggcactcaatcgcaaacctgctatccttcactttacctgtattataatcttcacccctgctaactggcttgggcaccacggcccacatccccttcctccacatctactactacatggcttggcaacctacaacgctcaaccaacggctgcgcctctcctcccttggccctgcagcagcactgcgcacacgcgcgctggactggcgcacttctgcctctcatgcgcgcatttccccctagccgccccctagcctgcacggagccacgacacgcacgcacacacccacaatcacttcatcacacatctcatctaacaccccagactgccaggggccaacagcaactcacccaacatccaagcgacaagcgaccagcgcacgtatggccttgccccagtcctcccacgactgtgcttgccccagctcgaccgcctcagtggtctgccactgatggactacatagctgcagaccaccagcacccaacatgcatgcacgccgcggcaaacttacacaaccctgggcccaccactaagcggacacacacaaacaccacacaacaacacaccacaccacaacacacaccacccccgcgcgaagaggcgacgcaacagccacctctccgaccaccacacgctctctacccaccccgcgccacgacgcagcgcggaacccaacaaaagagaacataatcaaacgcccgcgtcattcaccccccagacgacgcataatcccgcgtgcgacgcaacacacaccgagcaggcgggcgagcgaaaccaccaagaaaaaaagaggagacgagacgaaccgcccacaatcctcaccttccaccacccccagagccgcgccccccccgcagcgccccacgcccccacgcacctcacacccacaccaccaccgcccgcccacgccaacaccgcgcgccgcacaccccacacccccgcgccccaccacaccacgccctgcgaccgctacacctctccttccgctgcccctacgcaatcacacacaccgcaaccaccgacacacaagacacgcagacagagcaaagagcaacgagaagaaaggacaacgaccaccgaaagacaacgtggngagcaacgacaacacgcaacaccaccaactacacaccacaaacaccaaccaagaacgagacaaccagataaagacaacacgaacgcacacaagaacagagagcagcacacaaagcgcacgcctcatcacagagacaatgatgcacctacgacacggagagacaaaaacc

SEQ ID NO: 658364 - DNA, 955 bp, Homo sapiens
ggccatgttggggttgtgggtcgggtggccgctgctccggcctaccggggtccttgcagtgagtactcactcccttcagcgtcgtctgcccccagctcagctcttactgcgggtcgctccgacggcgtgtccatcctgtctagggtactatgcgggcatatatctccttcgcgaaaagcaggtgccgacaccgggctgcatctgtggcgggtcattgagccgcagttggtgggaacgtccagtctatgactcgagggactaccaccaattctaactgccctggaagtgcaaggcgaggagacgcagactgtttggaggtggcccagcgatttgggtgagagcaccagtaaggactattgctatggatggtacagaaggcttggttagaggccagaaagtactgcattctggtgcagcaatcaacagattcctgttggtcctgagactttgggcagaatcatgaatgtcattggagagcctattgatgaacagaggtcccatcaaaaccaaacaattgtgctcccattcatgctgaggctccagagttcactgcgaaatgagtgttgagcaggaaacttctggtgactgggtatccaaggttgtcgatctgtagctccctatgccaggggtggccaaattgggctttggtggtgcgggacttggcagactgttctggtcatggagttctcagcaatgtggcaagccggggtgtctcctgggtgccgggttgtgcaggggaccggaccgcgagtgttgtccgggccggggctggtgcccagggtaggaggccctaagagggcgcgttggtcatgtgttcccggtgccgctccggtggcgcagggttggtgtgatttacgcgggggtagtggtgtggccctccgggcgggggttggccttggtccgcggggtgtccgggctgttggcgcactaggcggattcctgggttagttttctg

SEQ ID NO: 658365 - DNA, 451 bp, Homo sapiens
agttcgacggagactctcctttatgtctgaattagtcgagcacagaaccgtccagttggcgtgcaagttcttcaggagtccccatgtcctcctcctccgtgatcgtccatcagggggcgtatccccattcatctgaacattctctccagctgagtacatattctttcttttgtcagaggatggaagactctaaggagggtctatcctagtagctggaacccattccccaggtggaaggacgatgactgcatctaggaactcatcagtaccagcaatcaggtcgtgcctgtctgaggcgtgataagcgatgtcatggaacacctcatcagacgtcagggtggtaatgggtctggcagtctcgtggtaggagtaggttttcccctgaggagctaagagaatgaaccagaagcttgtgggcacaggaacttcagtcagggcgcccagcatgaca

SEQ ID NO: 658366 - DNA, 416 bp, Homo sapiens
  misc_feature (341)..(341): n is a, c, g, or t
atcttatatgagagatacggtagttattgtgcaactacctgtggcattgcagatatcctgtgtacttatcacaccacagtggacaaggatctacacggctttggaagacatcttacatcaaggtgagaaacacaaacatcagaagtcaaacacgctgataaaagcgatccaactcacttataatcctgaggaatcatctaaacccaatatgatatgacgctgttactttgaagtccacagtgtgttgaagaaattatgaaatatgaagcctcgatttttacacatgactcaagtgttcgatatttgcaggaaatatataattcaaataatcaaccttgcgnagacacggtgcgcatccatgatatcactgtggaatggcagacattggccataagggagcttcaggcgcggctttt

SEQ ID NO: 658367 - DNA, 291 bp, Homo sapiens
tgagaacgaaaagaaagcaaatcacttctatgcatgcaactaagtaaaatactcagcttcaaatttcctagagtgtccagaccccccacctctcccctcgaatagcaaaaaagatagagggcttaggacaaattgacaaggtctggtcttctagaacctctaaccaaaaaattaggtaatatgctatatactaaatacaactaccccaagtttcctaccattaggtacatatataactatttactctgaatcaaagctttcacgatgatatgattctatatcttggattac

SEQ ID NO: 658368 - DNA, 135 bp, Homo sapiens
cacggcaggtgtactgattccctgtgacatcaccaccgtctggtaggtgatcaccagctgcaccacaggaagggcatagaagacagcaagggtggcaatgtgccagaagtagatctggtactttttccggcagaa

SEQ ID NO: 658369 - DNA, 328 bp, Homo sapiens
aggcttctaacctaacttacctagctctatcctaaactagcctagtcataaacttactgtagtctaacctaaccataattttaacttaagcctacccctagaataatattttaccttgtggggactaataaaattgccccggtttcttttctttttactcttcttgtgcggaacacaaacgaactgcaacgtgctcactggaggtggtgttagggcctgtccgagagaacccttccctggcgtggtgttcgggctggtcagagcggacccttcactggaggtgtgttagggctgttcagagagaacccctcactggagtgttttaggg

SEQ ID NO: 658370 - DNA, 131 bp, Homo sapiens
ggagctcggtaccgtcttgtgttgtgttccctaattggcttgtttgggtgatgttggggtttgtctccagccacatctcagaacctgagccaattaggggaaacacaaacacaagacaaggtagagccgag

SEQ ID NO: 658371 - DNA, 208 bp, Homo sapiens
ctcaaaaacaaaaacaaaaaaaacccaaccatctatgacacacttacagccaacctaatactgaatggggaaaagtggaaagcattacctgtgagaactagaacaagacaaggatgcctgttctcaccactcctcttcaacatagtactggaagtcctagccagaacattcagacaagggaaagaaagaaagggcatccaaactggtt

SEQ ID NO: 658372 - DNA, 239 bp, Homo sapiens
cccaaggcgtgaatacagactcaaaccatctagaggtgtatgatggtcccaaaaatgtaagatctagatatatctagatcaagaaggaagaatgaagaaagtgaaggatgtccagtgtctattaatttgccctaagagctagaacctcaggcttagcctaattatggacagtggagaagatgaaacattgaggcattcaagataactggaagtacattttggaaggaaggcccctggtg

SEQ ID NO: 658373 - DNA, 223 bp, Homo sapiens
cagagtcagctccctcagaccagtactactaccccttcttccgtcacctcttccccgggcgctctcagtacttgtgccacagtacaggagaccaggccctcctccatctttccttccccccaattccacaggcggccttgcaggccgctgctcatgccagtgtggacttcaagaatgttctggatttctacaagcagtgcaaggagataggttgagatcgacc

SEQ ID NO: 658374 - DNA, 251 bp, Homo sapiens
  misc_feature (107)..(107): n is a, c, g, or t
gatcagtttcactatctccaaagcatttgcatcatgaccttatacattcaatcccttttatgctggttccgttaagacccacccccacgcacaagactaaatgtagnttcccatatatttcagggtctctgtgtattaagctaactcagatgttttgaaagctttttctttaaacagaggtgaaatatctgtggctaaaaagtttgagatttgtgataactttgtagtcatgtaaaacttaagtgcttcat

SEQ ID NO: 658375 - DNA, 341 bp, Homo sapiens
  misc_feature (22)..(22): n is a, c, g, or t
  misc_feature (49)..(49): n is a, c, g, or t
  misc_feature (71)..(71): n is a, c, g, or t
  misc_feature (212)..(212): n is a, c, g, or t
  misc_feature (219)..(219): n is a, c, g, or t
  misc_feature (247)..(247): n is a, c, g, or t
  misc_feature (278)..(278): n is a, c, g, or t
  misc_feature (341)..(341): n is a, c, g, or t
aggaacgtcatcgttttgaaancgtcgcaataagacgcacacgtttgtntccgccgctgttgcttctaaangcctaaccaccttcagaaagttcgacctgtggcaaatgtggtaaccctgcccaagcgcaagagaaagtataatggggtgccaaggctaaaagacgaaataccaccgggaactggttcgaatgaaggcacctaaaaattgtntaccgcngattcaggcatgggttccgtgaaggaanaacactaaaccccagaagggcagctgttgcngcattccattcatcttaagaatgtcaacgttagtcctgccataaatgttctggttctaaaaan

SEQ ID NO: 658376 - DNA, 499 bp, Homo sapiens
gctcgaccggtatagggacttgacgaacttccccgtccagagtctctaatagggagctagagtttcaagacgactcaacgacaggtatggtcccatgaacgcctcttcccccccacggcaacagctccttctagtggacgacgaagaggacgccctgctcgaactggccgaattgctggagggcgaaggcttttgctgcttcaccgccacctccgtcaagctggcgctctcgcacttgacccatcatccggatatcgccctggtgatcaccgacctgcgcatgccggaagaaagcggcatgtcgctgaatcaacgtctgcgtgaacacacctcgcgccagactctgcccgtcatcgtcacgtccggccatgcgacatggacgatgtcagcgatatgctcaggctccaggtgctggacctgttccgtaaacccatctatcacgtgcgcttgctggaaaccctcaacaacctgtttccacagcccaggatgcatctggtca

SEQ ID NO: 658377 - DNA, 901 bp, Homo sapiens
tcccaaggccaaattgtttccagtcttttatttaaagatactttctccaataaacaattcagtggtatttcaggcaggactgtgggcagacaactcgttaacagatttacaacaactttacaaacctccctttcattcaagtggactaccaaaaattcagaagagccactataacaacccaagtgaaagttctttcactctgaagtgcttcgtgaaacgagggaaagagtttctagaaggtggagggtgtgcacaatttaacaattaagcaagtgtgtgtgttttacacagattttcacacagagccgacccgtgaactttcacaggtgaaagtttgaaagtgaaaatgtgagcaaagacatttataatcatagaaggactccaccaaatttcataaaaaatgtggaacaccacagagtgcactctttgtgtgaccagggtgtcgccaactctttcagggtgggcattcacgtgtgggaaagagactcccagacagtgtggcccgtgcaaccgcaccgcgtgggaatcagcgccaacaagcgaaacctgaggggagctcgaaggggtcaaccaaacaaagacagtactccgggggacatacagaggagggaacgataaaggccatcaaggggacggaaaaacaaatggacaacgagcggaaacaacaagaagcgacctatagaaaacacaacaaatgaggataaaacgcagtaaacacaaccaaagaggggaagaactgagggcccacaacgagagtggaaccaaaaaggcagagagaagtaaaaaaaaagactaagggaaaaatacacacaaacagcagcagaaagaaacgcccaaaaaaaagcgacacagctcaccaacaaaacaacctaagaaacgggggaaaaacgaggagacagct

SEQ ID NO: 658378 - DNA, 435 bp, Homo sapiens
gggtgggaagtgaggagcgtctctgcttggcccatcgtctgggatatgaggagcccctctgcctggctgccagtgtggaaagtgaggagcgtctctgcccgggcgcatcccatctaggaagcgagaagcgcctcttccccgccgccatcccatctaggaagtgaggagcgtctctgcccggccgcccatcgtctgagatgtggggagcacctctgccccaccgccctgtctgggatgtgaggagcgcctctgctgggccgcaaccctgtctgggaggtgaggagtgtctctgcccggccgctccgtctgagaagtgaggaaaccctctgcctggcaaccgccccgtctgagaagtgaggagcccctccgtctggcaaccaccccgtctgggaagtgaggagcgtctccgcccggcagccaccccgtcgggtggag

SEQ ID NO: 658379 - DNA, 451 bp, Homo sapiens
aagggatttctgcctgctccttctcttacactaaggtacatgtgcccacctaagtatcagccaagccaaggagaaaagccacaattaactgagcacttacttggtgccaggaacttgctcacaaacgatattaaaattttacagcaaccatgccagactaggtcttattttccttattttacagatgcagaacctgatgcccagcaaaggggaaaggatagcaggagccttgatccacccaggaagaggtgccagctggatcagcaagaggctggtggagaacaagaagctgctatgaaccaatctttagaaaacagcaggatctccgaggagagaaagaatttctctccagccaaaagcttcatgagatggaaggggatatcctatctcctatattgtatcctcatcatggtctcaataaacccacttggaagatgcccatgaaaaaaaa

SEQ ID NO: 658380 - DNA, 925 bp, Homo sapiens
ccgcattaactcattcatgtagtttattcaagtgatttatgtatttaaactaaatattgaaaatgttagtcaaattgtaggttagctatgtcaggtatttatatcagtctgtagtggattcccaaatttcaaaagctcttttaatggtaatggacaaacaataagcatatgcagaatcattcattgatgcaattttcatcaaggtggcaattgcatcgttaatctaactaaccagagcaagggtagaaccaagtttgtgttcaaatgttggccatttacttgtattgaccaaagtttggcagctctactaatattctgtgctcaggactaaaattgctgttaatttttcatataaaaatttaaccagtggctggtccattattatcccgtgctgacgtggggcacacaccatggggtggccatgttcctataacagagcacatctatattatagggcactctcatttccccatagtgggcagactggctcccctaactcacagtgacacccaattttaacacactttatacgaaggactcacatacactcgtccacatatacaggtaacagaaaaattacatccctattatcaccctatttgtttaattccttaaattttatctcctctacataatttgaccgtagcagtaaacagatttaattatgtctttcaaccacacttattaacctataacatgactcaccggccagaaaacaccccctgggggaaaccacgccacctaactgccacattgaaaagaacgcccaactaatttcaactccaacacacccagagggctgcggcaggcggcgcacaaaaacaagccactcaatggactaaccaaccctgcgaagcgaacaaagaacaagcgggcaacatcacgccacgccacacaacctaaaaccgcatggggacggacaccg

SEQ ID NO: 658381 - DNA, 449 bp, Homo sapiens
aagtcacacatgaaagaagccatgatcaagcttggttaccacatgctctgcttcctcatgtatctatatagtggtagcaactgcccttgctaatcaccgtaacttcggctgagaaagaagaggaagcgaaatccaagatgcagctcagttcatcaaagcctagcaggtcgcctcagctgccttttcatgcctgccacagaccacagtaggacaaaacctgacatggtatttgaagttaagagttaagaaagcttcctatagtagtatatcccatggcacttaccacattctatgatggtatcacaattagatgtatgcaactaatcactttctagattgtatgttcatggagggcagaatatgcccattcataattgaattttgttccttatgatcttggcacctaacacagtgcattgcacacaaacaataaatgattgatgactgta

SEQ ID NO: 658382 - DNA, 370 bp, Homo sapiens
cggcccaactgtggtctcagctggagtggtacgtgagcaaacaccacagttgagagccattggtctacacttgtggaaatgtttgagggtgagagtgtcgagcttgggtccctgctgtacccgtttatgagcaatgctgtcttggaaaattaatactactccaggggcctcagttttctcatctataaaatggagataaatgagatacactttcataggaaggttatatgggatttactgagataataagacagtacatggaaaatgctgggcatagcatttatttatttttatgttttttaaagatggagtcttactctgttgcccaggctggagtgcagtggcatgatctctgctcactgcaacctcc

SEQ ID NO: 658383 - DNA, 370 bp, Homo sapiens
cggcacgagggctggaaaagagaactccatctcaggacccatggtttgccctggagagcttagcactgggctgagcacaccgtgtgggattcaacgtgctaaaatgcagaacctgatgcccagcaaaggggaaaggatagcaggagccttgatccacccaggaagaggtgccagctggatcagcaagaggctggtggagaacaagaagctgctatgaaccaatctttagaaaacagcaggatctccgaggagagaaagaatttctctccagccaaaagcttcatgagatggaaggggatatcctatctcctatattgtatcctcatcatggtctcaataaacccacttggaagatgcccatgaaaaaaaa

SEQ ID NO: 658384 - DNA, 444 bp, Homo sapiens
caacacataggaagggtcagtgggcatggttctatccctattctcagagcatgccagtggcaacctgtgctcagatctggaagacaatggacccacgttaggtgtgacacgtacacataactgtgcagcacatgccgggaggtgatcagtcggacatcttaatttgaaccacgtatatctgggtagctacaaaattcctcagggaatttcattttgcaggcatgtctctgagcttctataacctgctcaaggtcattgtcatctttgtgtttagctcatccaaaggtgttaccctggtttcaatgaacctaacctcattctttgtgtcttcagtgttggcttccagaatggtaatcgaattcctgcagcccgggggatccactagttctagagcggccgccaccgcgttggaagcctccagcttttgttccctttagtgagggt

SEQ ID NO: 658385 - DNA, 1684 bp, Homo sapiens
  misc_feature (282)..(282): n is a, c, g, or t
  misc_feature (1608)..(1608): n is a, c, g, or t
  misc_feature (1684)..(1684): n is a, c, g, or t
gatgagtactgacgctggtggatgtgcctgccgtgtcccgcccgacgcttcccacgtgtgccggtacacatcggatgccgtggtcttgctcctggttagctccgggtgggtccgtgctaccgtgttgtcggtggagctgcgggggagtcgcatcgagcgtagcttggcggactcgcattccaaccactgcatgataatcccgatagtcaacactgcgagtgtgcagagcaggtcaacggcagagactggcagcctgtcatgtgtggcactcagcttaatcgnaatgatgcgtgccccagtcgccattgttgtggtgttcgaagaagcgtacgcctttcggtactccactgaccccgagctagaagtgtcacccttcgtacttagagtgcgagactacgagaaggtgacgccccatttggcgcggcacgcagttggctaaacccataccgtggatatctctatggaaaggtccgcgactacccatcacgaggaaagggaacatagcgtagcgtctccgccaattctacgacaattccctgttggcatagatacatagcgagggacttgggattgcgcttgtgccggccaatagcgctaaactagattgggtagaatagaactctctcggagtgaaaacgagcggagcacccatggagcccactggaatcttgaaagactttcggttggcacgcgaacgagcgaacggtagcaaccgttgctcaatggtgagcccgattgagcataggaccgctttcattgcctcgcacatgattgggctattcacgcggtcctcaattgccttgccaagaatgcgcgctcgaccgaacgctttcggaggggggaccactaccgattgacgccgatattcgagcgccattggttgaatgttgcgcaccacggggcgtcttttcaccaacgtcactaaatacaagtacaaaccccacgtagaagaatttgggtctcctacaccaaagaataggggacactccgagggcttgcctacctataccagacttgtgccctacgaactcaacattggattcgtggattgcgcccccgttcaaggggacttatggaaggctcggtcgtgtccctgatccacgaattaatacacaacggatggcccaccaacggcacgaaaaaagttcgagatggctttgaactccatgcatcaacgtgagcaggctctagggtccatgaggaaggtccaatgcgtatgcgtgaacaccgttggggccccacctgttcacacctttattacgaggggtttttaggccctcggtgcatccccagcatgtgggcaccctgtcccaaagggttagggtcctgggaaaagccattgcctgaaattatattaaaccccttccttgagagcagggataacgtgcggcacaagtgtcggtcactgtcgcagggagaaaagctcaggttgacagtgtgtgcccccttgcctaacgtcaagacagcattttctgaggcccccatgaggaactcattgggtcgacccatgggctgaggagacatttggacctcgttcgtcaccttgacagccctttgtggactacaaaccggttaccacgatcacaggttgagttgtgtacctctacnagcatggattagccactcgatcacggggcaaatttgctcttagcggcaccgtgcaccgtgtgaaaacctgacactn

SEQ ID NO: 658386 - DNA, 206 bp, Homo sapiens
aagctatacaggcacagtatagcgagacaaagcttcactacgcgcccgttaatctgcacctccagtagagacgaggtaacatcatattaggtcacggccggtctcgagctatctgacctcaggtgagccacccgccttggcctcccaaagtaaataaataaatgggtgagacagagtcacaaacggagcccaatggcacgccgact

SEQ ID NO: 658387 - DNA, 472 bp, Homo sapiens
ggcacgaggttttaaagtgtgtgctttttgcctttttctccttcttagcatgctttttgtaagttatacatgctcactgtagaaaatccagaaagtcacccagtaaaaagcctaaatttttccacaactcggaagacaactgtgaacttccacttaatctttacgttatgtatgtgtgttttcgtattatacccttttttcatacttttcatactgctttgatacttaatgttatgtcatcagcatttcccaagtttagacagtcgtgaaacgtaacttataaaggttatgtaaccttccatcacatggagatgccataatttatgtaaccaaactcccactactggccatttatagtatttccttttcctctttccttttcttcttcccttcctcctctcctttcctccttccttctttcttttctgcctttggcttttaaaagaatcctacaataaacaatttgtacgta

SEQ ID NO: 658388 - DNA, 157 bp, Homo sapiens
tctctccacactggacaacattttccacttttaaaaaatatcttctcacgcctgtaatcccagcactttgggaggcaaggttggcagatcatgaggtcaggagttcgagactagcctggccagcatggtgaatccccatctctactaaaaatacaca

SEQ ID NO: 658389 - DNA, 217 bp, Homo sapiens
ctccctctgttatagatcgtgagtctgtgagatggtgagatgagatcgtgagtcagagatgagatgagatcgtgagtgagtcagtgagtgagatcatgagatcgtgcgttagtgcgtctgtgacgtgaactcgtgagtgagtctgtgagtgagatcatgagattgtgagatcatgagtgagatcgtgagttagtgagtctgtgactcaggtggtgtg

SEQ ID NO: 658390 - DNA, 197 bp, Homo sapiens
atggcttcccagcctgaattctagccgacgtgcaacgacgacctgacagcaatccttctgaagctattccaaacaatagaaaaagagggactcctccctaactcattttacgaggccagagttatcctgataccaaaacctggcagagacacaaccaaaaaagaaaatttcagaccaatatccctgatgaacatcga

SEQ ID NO: 658391 - DNA, 854 bp, Homo sapiens
actgatcgatcaggtaccactttgctgtagtgaactcccagggtgcctttgaggctgctgggttcctcctgacctgatcatctctataacttgatcatccgatgctactcagatgatagtgggaatgtggaggttttgacgagcttcagtcagtctgcttggatcaggtgtggtaactgccgatgtttcccgtctgcctgttcgaaaattctcttctggaggagacatggtctactgggacatacattccagtgtggaacaatccgaggaggttggtgtgcacgcttgacttatggtatttccctgatactgaatggcctggagagcctgtgaccatcaaactggctagagtactaggagtccaccttgtaaatgcctactggtctcttcgctatgggggtctgatcacttggtctgctgttcacctctcattttgctgcgagggcgcctgcgtgaacccataagagccttttagtctcttcctcgacggtccctttgtttaggcccaagcgcttcgtcaatctaatccaggggctcgcgaatttttgcaccgtcgcccgtggatgttcccccgtgggatcctacggagatcatcgtaagccagctcgttgtccacacgcggggtcctccgcctactattcacgaaaccaatgggaccttgcatcatgagccggatctcccgtttgagcgcgtcatcaccccattggtaacctttgtgtgcgaacggccctacgggacgtgtgttgaattgccttccgggtggctcgccggagtgggtcgctcctcctcatggttctggggtagggttggagtctcgaagtcgtcgtgcagggccctgggaattgcccgtttct

SEQ ID NO: 658392 - DNA, 374 bp, Homo sapiens
acctggtcagtacttctgtgcctatctcatttaaatcagaacaatcccatgagctcggtacatctttcatgtcaggttacagatactcatctgcgggtcacatgaccagtaagccatcccagtggggcttgaatgctgattgttgggtgcccaattcatgctttaacccatagtacatactctttgacagaaatgcacgttgttactggcttttttgctttgctttttccttaaatcacatcagaactggtttttgctttttccttaaatcacatcagaactggtttttgcttagtaatttaggctccatgacctgaagattgtcttttcttatttttatgagttgaggttttgagtgagagggaaatacaacc

SEQ ID NO: 658393 - DNA, 263 bp, Homo sapiens
acaatcgagctcggtaccgagattcggggaggcactgccagttggaagagaaaaaaattgccgggtgtggtggctcacgtctgtaatcctaacacttcaggaggctgaggtgggcaggtcacctgaggtcgggagtggagaccagcctgaccaacatggagaaaccccatctctactaaaaaaattaaaaattagccaggcataatggctcatgcctgtaatcccagctgaggcagaagaatcgcttgaacccaggagccggg

SEQ ID NO: 658394 - DNA, 1143 bp, Homo sapiens
tggaaaaagccagctgatcttaattggctcctggggggcagggggctcaggagctctgtgagggggcgggtccgtttctctctctttcaccatctcacaggcttctgtggctgtgcgcaggatgtggcgctgtggccctgggggattggcttgccagtgcgcaggataggggcggaactggtcctgggggactcagtggtgtctgagtgctgcgtgagcggtggcgcgaagacattctgggtgagaggggggctccgacaccatataggagggtggaaggcttctccgggggccgagattcttcgcggtataagtgagccaccacagagaaacctttgtgccgtggggaagaggccggtatccacaagcgcccaagaggcctggggcgggggaaaatacagaccgcgataggaaaaggcggaagaggaaaatggggggggactcttaaaaggtaaaatggggggctacaggtgggcgtgaaagggttctgagtataattccctcctgggggatcaggagaaaattgggagcgaatgttcccagggagagacacatccctattgggaaattggcggcaaaacttgggggggggggggtccccttcccggaaaggggggaaacctgagaagaaggcaggaaatggggcaaaggccgggtggcgagggtggggccctaagacccggggaaaagccccggaaaacaacagggggggggagggcctatccaagaacacagaaaccttttcccaaagagagggcctgaagggaaattaccttctaaagaatatttctgtgcgcagagaaaaatatctataataccctgaaaatccaggttcctgggccaaagaggaaatccctacaaaatggggggctagatttgggatattcccccacggggggccccacgggggaaaattcccaaatccgaggaaggtttcacaccccaaggggagtcgccgaaatagtggacaccgggaataacggcgggaaaacacagagaagtccccaaggggggaggatacccccccgggggaacggggaaaagctcgagacgccggatggcccgggataagccagaaatttcggggcccccaaaggagaacgcgatgggggaaaaatgggctcccacacgggacccccaggt

SEQ ID NO: 658395 - DNA, 1355 bp, Homo sapiens
aggttcctaaagatcctgctgtttgccttgtgtgtggtactttctgtactgcctgaacaggacttgtgctgcaaggcaacaaagttactgctgaacttgtgtacctggcacctctacagaaacctggtggctgcacggcaacacggctatcttaccccttttggactcaatggcattcagcgtaacatatattcattcaattccgaggtgtacacctgctttcttgccttctgggggttatccgtgtaattctgcgatgctcatggagaggaagaccgggaatcttaagccgaggccaaaaccttctctaacattctcgctaaacgcgaaccgataccaacagttctcgacgccacaccaccagctgcgcatttccctcactaccttttgcgatcacattcaatctacaaccgaatgggcgtccacagtctacaactggcacctgttgacctctccatctccaccatacactaccaaccacataccctctcttcccccatctcatcgtcccccccccaccaccccacctcctcaaccctctctccttccacaccatctcatccctaacccactcgtatcacacccccacacatcatcacacccaccccccactcaccacttacacactatcttctcatctaccctacactccctctccccatatacacaacacctcccatccactctccctccacctaacacatacacacattctccccccgatcctctccctaccccactaacactcttcacattcctctcaaccaccacacactactcaacaactgatcacttacacaccatgtgcccccttctccatttatcctgcgcacttttataactcaaacacctacttaatctaccaccaaacagcaacctaacacactaccaacttactcacaacataacttactcctctcgcatctctctgttcgtactcatcacacacctactcaactattgcttgtccactccatcacataatattaaaacccactgggtcgggcagcacacgagacaagctagtcggtcgcaacaccgatcagatgacgccgcgactggtacgagtgtacggtgacagagcgttggagccagtgctgcggcgcttgggccgctcgaccggtcactagtgttgagtgatgtgagttgcgagcgaatcgatgagctgaactgacagacctgcagacaccgaaagcaaactccacgacttgcgcggcgcagctgcacgcgtccgtgtaactccgacagtgacgacatctcagtggccaggtccacatgtgccgaacgcagagcagaggaagcggacaagcacaccgaggtcacgctgagcgcagcatagtaactgacaccaagtg

SEQ ID NO: 658396 - DNA, 910 bp, Homo sapiens
  misc_feature (910)..(910): n is a, c, g, or t
caaagtgatcatttgaaaaagagatatccacatcttcaagcccatataaaggatagaagctgcacagggcagctttacttactccagcaccttcctctcccaggcaaaatgaaaatacttgtggcatttctggtggtgctgaccatctttgggatacaatctcatggatacgaggtttttaacatcatcagcccaagcaacaatggtggcaatgttcaggagacagtgacaattgataatgaaaaaaataccgccatcattaacatccatgcaggatcatgctcttctaccacaatttttgactataaacatggctacattgcatccagggtgctctcccgaagagcctgctttatcctgaagatggaccatcagaacatccctcctctgaacaatctccaatggtacatctatgagaaacaggctctggacaacatgttctccagcaaatacacctgggtcaagtacaaccctctggagtctctgatcaaagacgtggattggttcctgcttgggtcacccattgagaaactctgcaaacatatccctttgtataagggggaagtggttgaaaacacacataatgtcggtgctggaggctgtgcaaaggctgggctcctgggcatcttgggaatttcaatctgtgcagacattcatgtttaggatgattagccctcttgttttatcttttcaaagaaatacatccttggtttacactcaaaagtcaaattaaattctttcccaatgccccaactaattttgagattcagtcagaaaatataaatgctgtatttctacccagaaacagcaccgcttcccactattatgattgccttttacctcacacatcgcgcgtccctgcggcgggacgcgggtgagataaagacatgtgacgtccactaggataacn

SEQ ID NO: 658397 - DNA, 345 bp, Homo sapiens
aagctcccaacaagactaatttggagaaaagatatcacaacttatctttttcttgcactgttgaaatctatttggctaagtgctggtatatatatttttacttaaggggaggatgtctcactaatgtggtctacggcggggcttgaaaccctgagttcaagtgatccacctggcttaacctcccaagagttctgggattacaggcttgagccattggccccagtctggactttccttaataatctgtcttctttataatagccaaccaaagtggggtatgaatcaagtagtgtcagtcagagatgatgatgagtggagagtggagacaaaaaatgtggataatct

SEQ ID NO: 658398 - DNA, 804 bp, Homo sapiens
caaagtgatcatttgaaaaagagatatccacatcttcaagcccatataaaggatagaagctgcacagggcagctttacttactccagcaccttcctctcccaggcaaaatgaaaatacttgtggcatttctggtggtgctgaccatctttgggatacaatctcatggatacgaggtttttaacatcatcagcccaagcaacaatggtggcaatgttcaggagacagtgacaattgataatgaaaaaaataccgccatcattaacatccatgcaggatcatgctcttctaccacaatttttgactataaacatggctacattgcatccagggtgctctcccgaagagcctgctttatcctgaagatggaccatcagaacatccctcctctgaacaatctccaatggtacatctatgagaaacaggctctggacaacatgttctccagcaaatacacctgggtcaagtacaaccctctggagtctctgatcaaagacgtggattggttcctgcttgggtcacccattgagaaactctgcaaacatatccctttgtataagggggaagtggttgaaaacacacgtgagtaccaataagtcattcactcaccaaatattttctgaaagctactatgtgccaggtgctctgttgggtgccaagtgaaatgcaaataaagggaacagtactcagttcagtttgctttgggaattaattacatgccatgtgtgtaaattgtgctaaattttaggaatacagaaatgaattaaacgtctccagggaacacatagtctagtgaagaagctgac

SEQ ID NO: 658399 - DNA, 145 bp, Homo sapiens
tacgatacactcgagctcggtaccggccggtatgaatgtcggccgtgtagataagccacagcaacaggggctggcgggggctgccagtgggaaacagtcaccagcaaagtgtaataatcctattaattaacttttttttttttct

SEQ ID NO: 658400 - DNA, 501 bp, Homo sapiens
  misc_feature (314)..(314): n is a, c, g, or t
ggctcaccataacctccgcctcccgggttcaagtgattctcctgcctcagcctcccgagtagctgggattacaggtgcatgccaccatgcctggctaatttttgtatttttagtagagatggggtttcaccatgttggtcaggctggtcttgaactcctgacctcatgatccgcccacctcggcctcccaaaagtgctgggattgcaggcgtgagccactgacccagccaaaataatttctgatatatttaaattactccaagtatgatcttcagaggacaagattatatgactgtgggaaaaacttccctttnttttccgtttaaaagaaagcccttaaattttggtacgacactttcgacactacataactccaatttttgtcaacggaaaactttctttccttggcgagaccgatgaaaagcaaagcaattctttctttttaggaaacttgggttaaaggattatgaggataatacgggggtttttatctatgttggg

SEQ ID NO: 658401 - DNA, 1029 bp, Homo sapiens
agatttatctctgacttctcttttctgttccactggtctatgtgtctgtttttatgtaagtgccatgctgttttggttactatagctctgtagtataatttgaagtcaggtaacatgattcctccagttttgttctttttgcttagaatagctttggttattctgggtattctgtagttccatataaattttaggattgttttttctatttctgtgaagaatatcattgttattttgatagggattgttttgaatctgtagatagatagctttggatagtatggacctttttttttttttttttttccctttgggaaatagagtttggtccttctgtgtgaccccagggtcgggcgtgtcgcctcgggacaattaatactcaggtccaattcgcacactctccaactctcccaaggggcccaaggcaattctctttcccacttgcagagcttcaccagagagtaacgctggggaacttggaagcgcataaacgccaacacaaggggccgcagagataacaacgtccggcggaatctcagaagcaagcgaaacaccaggcggtattcggccccccacggatcgagaagccggagcgccgtgagcaccaccgacacctgccgtgggccacccaaggggggtaaccccgcagccacacaccgacagagacgtcccacacaaagaagtggccgacggaaccacaacaccacgcgaggtatttaaccacccacacgctggccgatctagtggggcggaccaaaacaacaaagatgccgagacaacaagaacaccactgggagacacccaccgggggcgcaccaaaatagcgaggcaggaggacacccatggtacgggctgcacgaggagaggtgcacaaacacgcacacccacctataaggcgaggccaaagaaaaaacggggggagccactagcaccacaacaaaagcaatggcgccccaaccggagcaggcagtgccacccaccacaccccaccagcgggcggagcacagcagggcacctagcaccaccgct

SEQ ID NO: 658402 - DNA, 408 bp, Homo sapiens
caaagtgatcatttgaaaaagagatatccacatcttcaagcccatataaaggatagaagctgcacagggcagctttacttactccagcaccttcctctcccaggcaaaatgaaaatacttgtggcatttctggtggtgctgaccatctttgggatacaatctcatggatacgaggtttttaacatcatcagcccaagcaacaatggtggcaatgttcaggagacagtgacaattgataatgaaaaaaataccgccatcattaacatccatgcaggatcatgctcttctaccacaatttttgatcagagactaccagagggttgtacttgacccaaggtgtattttgctggagtcacatgttagtccagcagcctgtattctcatacgatgtaccatctggcagattgt

SEQ ID NO: 658403 - DNA, 674 bp, Homo sapiens
cgttgtagcctctacagcactgcaagatccccgagctgacagtcgcaggccagaattcgtgttagagtggcagctcttcttctgccagctcatagcacgcttcgtccactacatcaacatctacaagacagttgtggtggtatccacacttggcagccaaccatagacaaaaccctcactttgggatcgcctgacatggatgaacgaccgagattgtctagcactaagctcgtgctaccggctcgctcacatgacgtgcgaggcttgaaatggttgccctgtacgtcgaggtagagctgtctacagaagagcgaagaaggagtatccctgtcctgaacggcggccacgaactggcagtccctggtgacggacggacttcatcagacgatccggcgttgtggacgaggagcgcgatgggaaggtcggctggcgttctcccaatctggtcactcatacgttggggagactctcaatgtacattatagctgcctcacgactgtgctagcgctcccaagagtattatctgggtgggtgaaagctgccagtacgcagaggcgcgtaggcccggggcatctctgtcgaaggctacccggcgaagtatcctgtacgtctcatggaatccctcaagcgaagcctgcactgggagaggctctgcctagggtggcgggcgagcc

SEQ ID NO: 658404 - DNA, 319 bp, Homo sapiens
cccttaattttttgaggccgtgggggaaaaaacgcctgcaggaattcccccacaaaggccccgggaggagtgaaatgtggatgttgcttttgcccctcacgggggcatttgagtccagctccccccaaaatgaggtgcagccccccagaaagagctttgcccgtccccaagtaaccagggcccagcctccagggccccaaatccggccagcctttccccggtttgggtcctgccctctaacactcggctttgctggtcatgggaaaaacaaaattgctcctgcatgcaactaattcaataaaactgttttgtgagctga

SEQ ID NO: 658405 - DNA, 100 bp, Homo sapiens
atccacccacctcggctcccaaagtgctgggattacaggtgtgagccacaaagcccggcccattttcttcctctttggaggtaatggatttgtttggaga

SEQ ID NO: 658406 - DNA, 680 bp, Homo sapiens
  misc_feature (24)..(24): n is a, c, g, or t
  misc_feature (57)..(57): n is a, c, g, or t
  misc_feature (135)..(135): n is a, c, g, or t
  misc_feature (137)..(137): n is a, c, g, or t
  misc_feature (139)..(140): n is a, c, g, or t
  misc_feature (149)..(149): n is a, c, g, or t
  misc_feature (154)..(154): n is a, c, g, or t
  misc_feature (167)..(167): n is a, c, g, or t
  misc_feature (172)..(173): n is a, c, g, or t
  misc_feature (187)..(188): n is a, c, g, or t
  misc_feature (210)..(210): n is a, c, g, or t
  misc_feature (214)..(214): n is a, c, g, or t
  misc_feature (227)..(227): n is a, c, g, or t
  misc_feature (229)..(230): n is a, c, g, or t
  misc_feature (232)..(232): n is a, c, g, or t
  misc_feature (235)..(235): n is a, c, g, or t
  misc_feature (239)..(240): n is a, c, g, or t
  misc_feature (244)..(244): n is a, c, g, or t
  misc_feature (248)..(249): n is a, c, g, or t
  misc_feature (252)..(256): n is a, c, g, or t
  misc_feature (258)..(258): n is a, c, g, or t
  misc_feature (264)..(264): n is a, c, g, or t
  misc_feature (266)..(268): n is a, c, g, or t
  misc_feature (271)..(271): n is a, c, g, or t
  misc_feature (278)..(278): n is a, c, g, or t
  misc_feature (293)..(293): n is a, c, g, or t
  misc_feature (296)..(296): n is a, c, g, or t
  misc_feature (309)..(309): n is a, c, g, or t
  misc_feature (317)..(318): n is a, c, g, or t
  misc_feature (332)..(332): n is a, c, g, or t
  misc_feature (359)..(359): n is a, c, g, or t
  misc_feature (362)..(362): n is a, c, g, or t
  misc_feature (367)..(368): n is a, c, g, or t
  misc_feature (372)..(372): n is a, c, g, or t
  misc_feature (383)..(383): n is a, c, g, or t
  misc_feature (388)..(389): n is a, c, g, or t
  misc_feature (397)..(398): n is a, c, g, or t
  misc_feature (418)..(419): n is a, c, g, or t
  misc_feature (423)..(423): n is a, c, g, or t
  misc_feature (431)..(431): n is a, c, g, or t
  misc_feature (450)..(450): n is a, c, g, or t
  misc_feature (473)..(473): n is a, c, g, or t
  misc_feature (488)..(488): n is a, c, g, or t
  misc_feature (518)..(519): n is a, c, g, or t
  misc_feature (522)..(522): n is a, c, g, or t
  misc_feature (531)..(531): n is a, c, g, or t
  misc_feature (562)..(562): n is a, c, g, or t
  misc_feature (619)..(619): n is a, c, g, or t
  misc_feature (647)..(647): n is a, c, g, or t
gacatttaataaaatatagttgtnttatagccatgctcccatttttgatgaaagctngttagcaaatcctaatgttagtttaatactttaaaaatgcataacagatattcagtcagcattataaaacctttaagncngnnggctgtccngcagnatagacagagggntcatnntcacttatgtctgnntcttcatctactccttcaatanccgntttcttccctttncnncnggntacnnttgntccnntcnnnnntnccccgngnnnggnccagttnccaaaatagtaagcngcnctgaagaaccagnacttgtgnngggataggtatgtncgggtaacagtacactgatcttcaggngcntctgnntcanatctctttggnacagnnagggttgnnttgcctttatgattatgagnngttntattagtntctattaagtaattttggnttccatacataacatattggggngcaagactataaatnatgtggctagtgtgaaggacaattagcagnngtntcatgcagngaaaaaggagtgcttggggcctggttctacntcttctgattttatataatctaatccaaaagaaccatatgccaatatttcgaattcntgccattgaagttaaaataaagtacatnataataattgttataagaatataatcaagaggg

SEQ ID NO: 658407 - DNA, 112 bp, Homo sapiens
gcgcggtgacttagaggatcctgactgagaaaaggttatgagagtaggacacagtagactaccaggaggcaatgtcttcggtccggtggggatccggtggcatcgataaaca

SEQ ID NO: 658408 - DNA, 814 bp, Homo sapiens
  misc_feature (171)..(171): n is a, c, g, or t
  misc_feature (656)..(656): n is a, c, g, or t
  misc_feature (691)..(691): n is a, c, g, or t
ctcatgggcctcactctgccccagttggaaggccctaagccatgtgtcctggccctcaggctctaggggaagaggttttgggcccggaacttgagtctctccctggcctggaccccctgtattaggagtgccctcccttgctctgccgctgtctggttattgggctttagncccaggtaggaccattcccagaaggggctttctctgtaaactcccagagcccccctggggacaagaggaaccagcagtatagccacgcgcccttgttctctccacatgcccctcttaaggcgaacttgggtccacactccggccacactctgttaacgcccctccacggtttttctcccacggttccacactaaaataagggcacccaagaggcgtctgttgcgccactcgccactttctccttttgccccggcggagaagtctgactctgaaggtgacaccacgctaattatgcaatttgaaaaaagggaagagtgtttcttccacgctgccacaatgtgggccactccctcggaatatgggttctttgggagaccacaagaaccacgcgaccacttatgttggcgacaaattgtgaagaatgtctgaaaaaacgttctgaactttttaccttaatactccccgatcttcacgtcttcttggtntttgaccacagagtgtacccactggtgaatgtaangactgttgacccttggggtatggactgggtgaacgggtactaccacggaactctttgtatctatctctgccacttttctgtaaatctagtatccattcccaaactaaaagtttatttaattta

SEQ ID NO: 658409 - DNA, 456 bp, Homo sapiens
  misc_feature (24)..(24): n is a, c, g, or t
  misc_feature (57)..(57): n is a, c, g, or t
  misc_feature (135)..(135): n is a, c, g, or t
  misc_feature (137)..(137): n is a, c, g, or t
  misc_feature (139)..(140): n is a, c, g, or t
  misc_feature (149)..(149): n is a, c, g, or t
  misc_feature (154)..(154): n is a, c, g, or t
  misc_feature (167)..(167): n is a, c, g, or t
  misc_feature (172)..(173): n is a, c, g, or t
  misc_feature (187)..(188): n is a, c, g, or t
  misc_feature (210)..(210): n is a, c, g, or t
  misc_feature (214)..(214): n is a, c, g, or t
  misc_feature (257)..(257): n is a, c, g, or t
  misc_feature (276)..(276): n is a, c, g, or t
  misc_feature (287)..(288): n is a, c, g, or t
  misc_feature (301)..(301): n is a, c, g, or t
  misc_feature (313)..(313): n is a, c, g, or t
  misc_feature (331)..(331): n is a, c, g, or t
  misc_feature (337)..(337): n is a, c, g, or t
  misc_feature (342)..(342): n is a, c, g, or t
  misc_feature (379)..(379): n is a, c, g, or t
  misc_feature (393)..(393): n is a, c, g, or t
  misc_feature (438)..(438): n is a, c, g, or t
gacatttaataaaatatagttgtnttatagccatgctcccatttttgatgaaagctngttagcaaatcctaatgttagtttaatactttaaaaatgcataacagatattcagtcagcattataaaacctttaagncngnnggctgtccngcagnatagacagagggntcatnntcacttatgtctgnntcttcatctactccttcaatanccgntttcttccctttcccccgggctccccttcctcccctccccccncccccccgcccggccccgnccccccccccnnccgccgccctggnggcccgggcctngtgccggcctgggcctgnccgggnccccntcccctgctctcccggcgcctctgcctcgcctctctntggcgccgcccggnttgccttgcctttctgcttccccgccgccctcttcgtctctcttncgcccttcccgcctccct

SEQ ID NO: 658410 - DNA, 878 bp, Homo sapiens
tttactcatatatacacctctactttgtctacccccatcttcttcttaatctcactcctgtaccccgtatttccttatgcttccccctgcgtctttattgtaaccccccatctttcacctaaatttcctcctcccaatcccgatcccatccccggccacccggataaccaatttcgcacctttgacgaaacatggtcaaccctcgtaacaaaatgggtaagtccgctaataaaaaaactataaactgggcacccagacaatattgaaccatctctgaccctaccaatgagggcacattcacaccccccaacttctggaacccttcctcttaaaatcccccctctggtggtttttcctccccttcctctgggttctttcccctggtattttccttcagaaatcttgccgacgcttttttcaaacagtcccttcgtaccccgcccccgcctgcttggaaaacccaaaggtaccgaggcacccggcggtctataagcacaattccccacagcgaagggctgcggtaattcggctttcttcttccactaaggacgaacagatggtatccccccaattcaccccaatggttgttaacccggaccccccataatctcagcagacatgggagcccacacctcaccttatgcggaaccaaatagggtggtaattacactcccgcttatattagcctattcccgacatcatctggaatcatggttacttcactgccccccctctttatacatagattctaagacatccgcacactccacttacaaaatttggaatgttaatttttaatcttgaaaccaataatattcagcagaataccaatggaaattaaccccaaaaacaatgagttaaccaccaaaactttcagg

SEQ ID NO: 658411 - DNA, 320 bp, Homo sapiens
  misc_feature (250)..(251): n is a, c, g, or t
caagaacacaatctggtagttagaggttaagaggaggaataagtggagataataagtaagctaagggttataaagtactttctcagagctaggcagattttcaaggtgcctctccagtgtatttaatctatggtagaaggaagaacgagagtacagaatgggtggtggcgtctctcatagaaagccaaatcaagagcagttggagtctggagggctgagaaaggggtggctctggtttaagtctcttggnncagctgtgggactctctcagcagctgggaacagaaaaccagtattacaatggattttaagaatgggtgt

SEQ ID NO: 658412 - DNA, 552 bp, Homo sapiens
  misc_feature (293)..(293): n is a, c, g, or t
  misc_feature (348)..(348): n is a, c, g, or t
  misc_feature (371)..(371): n is a, c, g, or t
  misc_feature (391)..(391): n is a, c, g, or t
  misc_feature (424)..(424): n is a, c, g, or t
cgggctcattagcagtcgcggtgtgcggctcggcgcgggctcacaaagagctcggcctcgcggactgagccggcggcagcggggcggggacggcggcgtacccgggcagcccagcgccctggccagtctcctgaatatttacgcgtgctgaatctcctgtggacaaaccaccaataggccaggactgtcctgtggacagacggggtgagcctcttcttgtgtctggagattctgaaaagatttgatcaccaggagatttttcgggacattaccaaaccactcattttaggttngcaatggtctggagcagccaaggaagcagcagcgctctgatctcaagtggacctngttgacaagtaacaacgattccnagagacaaacgaaggtggcnatcgatttcccaagttttgtgggctgggttccncaggggccccgtgcgaaccagaagacctcatcgacgggatcatctttgctgccaattacctggggtccacccagctgctatcagaacggaaccttccaaaaacatcagaatgatgcaagcgcaggagg

SEQ ID NO: 658413 - DNA, 104 bp, Homo sapiens
tgaaaagtgagaggggagaggaggcaggcccaggaccagtactgcaaattaccaggaaaggacaggtggagacactttctttctttattatacattttgggaaa

SEQ ID NO: 658414 - DNA, 112 bp, Homo sapiens
aacatgcgaacggactgatcatgcgaacggactgatccatgcgaacggactgatcccaacaccttttcaatggacacctctcatccaccactcctatagatcagtccgttcg

SEQ ID NO: 658415 - DNA, 157 bp, Homo sapiens
gcccatttaaaaaattttattttttaaaagccttttttgcctgttgtaatgggcaggccccttcccctttcatgggaaagacaggtagttccctgaatataggttgaaaaggttatgtaaaaaaaaattataataaaagggatactttgcttttcca

SEQ ID NO: 658416 - DNA, 360 bp, Homo sapiens
tacttggtcaacgtttgtgtggtttaatagcattttttgtacgcttagtttcttactgatgctctaagctacagaattgagacccggcacccagattaggaatagaaaccttcggaagaaacaaaccttgtattaggagatggagaatctccccttacaactagacctctaacagctggaaccaagacactactgcagactatttcaggacaggtgaaacagtcgtcaccaagaactcctttagctcctaaaccagtgtcaagcaggccacaccgaagtgacctcaaggcaaacagaccacctctgcacctaagcctcagaagtactcatgcaaaaacaacagtcctcccaccacaaacg

SEQ ID NO: 658417 - DNA, 201 bp, Homo sapiens
ctatatgtattgttgagtattacattgtggttggaaatggaaaggtctgtgactggtgtagagagaggatgtgagccgaggatagtgataggtttctggctgctgctgtggctgctgctgctgcgtggttgttggtggtgatggtggatgactggtgctgctgctgcttgtgtgctgctgcttgctgacctcaggcccagg

SEQ ID NO: 658418 - DNA, 166 bp, Homo sapiens
cgagataaggtaggaaaggcactctatagcacttgatcctcacctatacccctggggctgggaatatagaagggaggagtgatctccttaagatagtggatcatctattacagatagtgaagcagccataaacccaccccataccccaaactgtgcaactagtagc

SEQ ID NO: 658419 - DNA, 99 bp, Homo sapiens
  misc_feature (69)..(69): n is a, c, g, or t
catcatcatcatggatttgctggtgcagtacaataggcttaatctcgaattcgagcctcgaattcaagnttctaacgttagaagcttgaattcgagcag

SEQ ID NO: 658420 - DNA, 746 bp, Homo sapiens
  misc_feature (263)..(263): n is a, c, g, or t
  misc_feature (290)..(290): n is a, c, g, or t
  misc_feature (316)..(317): n is a, c, g, or t
  misc_feature (508)..(508): n is a, c, g, or t
  misc_feature (520)..(520): n is a, c, g, or t
  misc_feature (550)..(550): n is a, c, g, or t
  misc_feature (553)..(553): n is a, c, g, or t
  misc_feature (587)..(587): n is a, c, g, or t
  misc_feature (672)..(672): n is a, c, g, or t
tcaagaagcatcctgagttgccccttacccacacccacatctgttacccacaccacttcatagacctgttcagtatttgcacactgcacaccgttcttcgtactcgccagggtgtgtgccttcccctagtcacttgctggatttcttttgctctgtactgttcaggctttgaactgcccaaccgtagttattccttggtttctcccgcctgccccccaccccagagggtagcaatgatctctgtttcctggacctcttacctntcctttatgaggtcccgaagcatctgntgctgcttagtgatcagtgtcaaatnntttccgtcttacagatatttatgccttacactcattgctcgtgatcattcttgttctaaggtcgtgtttgtatggctcgttacctcagatgcctatgccaataaagcatgctctcagaaggaaaatacccagtaaccagcctttccccgctgggcccgtctttgccttctctcctcgccccacccccattngtttacactccnttctcttaggctccatttttgaaaatattnatntttaaaaacaatatattgcaccagtggggcaaangggctttaaaaaaccaacatccagatgtttagagagaaataaactgagtgaaaatgcgagcaactgggaaaaccaccttgaactncctacagaactgtaattttaaaaacggtgttggtggatttggtagtatcaggttgcaaaaaaagggcgaccgct

SEQ ID NO: 658421 - DNA, 322 bp, Homo sapiens
ctcgtcgtactcggctcccaaagtgctgggattataggcgtgagccaccgcacctgaacattaaaaattttctttaagccaccattggaaatatccactattagaatatttatataaaatatttgtggagctcacatttattgaaaacattatgccatgtgttcagattgttctaagcactttgtatgcattatctcatttgatccttacaataactttatgagatagttactattatctctattttatttttcttttttcagccagtcaaatttagcagtggggggttgtataccaactttagtaacactgctttgaataa

SEQ ID NO: 658422 - DNA, 433 bp, Homo sapiens
cgcaactcagtcttccaacgtgctgtgatgacaggcatgatccactgatactggtcacttattgattaggcactcatacattaatagtgctgatggtagcaactcttatccgagacacttgcaggtaaagtgatgcgtactcaccttcagaggtggcacctgtcttgcatagcctgcaccactgactgctgcacatgccaggtccgagccacgtgtccatgcagcagacgacgcccacgctgtctaccacctccatgagcatgtgctcaatcgcgctacagtcacgcatgaccatgcatgcacgatgctcgcatgctgcagccaggcactattgagatctgcgtatcacgaaccaacatcgctagtgcagtccaacctagtctccatgatgcagaagcaagcgtgcacgatgcactacgctcgtcgctgcggc

SEQ ID NO: 658423 - DNA, 387 bp, Homo sapiens
cggctcgaggggcgcagaccgtctaagggattgatggatgtgacctcccagggctttgcttaccacacagatcagagcacgggttccctgtcgttaacaaccgctgcgaagggaatcccatccacacttctcccagacacctgggcccatccccgggcttcctgtggttgtccagtgaccgcccttcctcattgccccgggacatttttccgtggggcagtgctcccagccttcaggactgctgggggtgttgggggtggcctgcccagcctgtctctgactttccatgcagatgggcctggcgcgggcttgtcacggggctgcatagtgcttggagtcaccagcacctactgacggatccctgacgctgcccacgggtgttcttca

SEQ ID NO: 658424 - DNA, 466 bp, Homo sapiens
  misc_feature (237)..(237): n is a, c, g, or t
  misc_feature (466)..(466): n is a, c, g, or t
agcggcgggagcaagaatgaaagcaaacaggagctgctccggggtactgcttttgccgagtacccagaatcagtgctcaggctcagaaactcctggatagaagagagcatttcataacacgagaactgtgtccatcagtcattactacagagcacaaggtcctcccgttctgcaggaaggctgtgtgcgacctagagtcgggcgctgagatatacgccgacgcataacggtttgtcnaggaaggctaccaaccttgaggggccctcactcgtgtttgacccaatcagcgcaagttgacgacagacatactcgcagcaaggttcagacattcttacccaggacaaagttggaggacttcacacagagtcctagaaacaaagttaggtcgccaattaaggcgaaaaacaacaacactcccaaacgttccaagcccaccttacgagaatggacactatgggggaccccn

SEQ ID NO: 658425 - DNA, 267 bp, Homo sapiens
aggggccctttttttggccgggactttaaagttccccagtttttaatttgggggggctttaaaaaaagccttgtttcaatttccccctgttttgtaaaattccgctctcttggccacagtggggtttggcggtttttcaaagttcagccccgttccagcacttgaagggctgttttttgggcgtccctatctttgtcaattcttttttaaggccttaggacaggcatccagcctcaccaagcacaaacagggtgcataagggagcaa

SEQ ID NO: 658426 - DNA, 610 bp, Homo sapiens
tcttctctatagttcccgagttggcccccattgcagcccccaccctgtgggtagtcttccagaagtgatgcagtggtgtgagatgccctacaccttgttatttgggagactttgagagtcattcacttccatggtgactagtgtttgcttcttggcctgaatgtgtatcctagttctcgatgtatgccagtgttcctcgcgccagctgccgcgtgtcccatgcctattaagtacaacacgctaaactcaatatcataggaagaatgactgagggatagtattgggtattggccccatggcaggaacagccacttgcatctggtcccggtgccacacctgcggtgcgttggtgtggttgtggagcctgtccctgcgcgccttgctcccgttgagccacgctgtctggtgggtgattctctgccctagagccagccaccctggatctggcccagtctccagagctggcacaccctgcctgttttctctttttagacacaacagccgcagtttggccagcacactaagtcccaccagtctgaggtccgaggaaagcggggtgactcatttcccttgtccagggcccgagaagtagcgaggtgtccagcctgca

SEQ ID NO: 658427 - DNA, 442 bp, Homo sapiens
  misc_feature (1)..(1): n is a, c, g, or t
  misc_feature (435)..(435): n is a, c, g, or t
ncttttgcctatgccctgagaataccaccgccaagtattaagaagagccatccctcaccctggaatgatgcacaaaaattgattataaaggttgcctgtgggaacctgggtggttaaggataggattgaaagtgggacacttccttttcctctgtatagcttgcgtactttgtaccgagtacatgcattactagttcaaaattttaacatcgtaagtgaatgaaaatttaaacaggccgggcacggtggctcacacctgtagtcccagcactttaggagacgaaggccggaggatttcttgagcctaggagtttaagatcagcctgaacaacataataagaccctgtctcaacaaaaaatacaaaaattagctgggtgtggtgcatatgcctgtagtcccagctattcaggaagctccattgcaatctagcccgnccaacaa

SEQ ID NO: 658428 - DNA, 195 bp, Homo sapiens
ctcctggcttagagaggccctgaggaccaatccttgcttctgtcatctgaccttgccctttaggcctcctcagaactcccaaaatgtgacctatgctatcaccgaggccgcaggaacaagaggtgtgtgtccatgacattggtacctgtcatccctgtgtgcagcacgtgtgccccttggccttgctatatgcaa

SEQ ID NO: 658429 - DNA, 143 bp, Homo sapiens
aaaccgaggccttttaacaagtactccatcttcagattagctggttttgtgatcgcatttgtcctcagtgcaaaaagcatcttttgaagaactacttccaaatgtcagcaattatgttaattcaaatgaaatttgtttcctgt

SEQ ID NO: 658430 - DNA, 210 bp, Homo sapiens
cccccccccggggggggtttaaaaccccattttttaaattttttcggggggggggggggcccccctccttaaaacaaattttttccctggggagggggcaatgggggggggggggcccggggggggggcctttaattttggtttttaattttggggggcccccccccccttttttgggccccccaaaaaggggttttttttttcccccca

SEQ ID NO: 658431 - DNA, 154 bp, Homo sapiens
aactgtctccggtactcagtggactcttgaagatcaattaaaaggagaaaaaatacaatttctcactttgcattttgtctaaagaaaaaatgctttatagcagaatgaaagagaacgatgaaatggcttctttctcagttgattggttgaatgt

SEQ ID NO: 658432 - DNA, 421 bp, Homo sapiens
actggtaatccaggtgataatgagctagggagagtgatgggacagagtggctgtgtgaatgtcgtggagtttggatttgattctgaatgaagtggaagcctttggaggatttatgcaggggagagcctgacgtgaaattcaaatggattttttttttaaataggcaggaaccattaaaacatcagttactgggacgagcatgcccactggtaagacaaatacagagatgctgaaatgtggaccccatttctcctggcgctgttgccttatgcccgcctgtctccgcaggtgccgtgagtggaaatgtgatcgtgaacaccatcgcaggggtcccagctgccaccttccagtccatcaacaagcgcctggcgtcgccagtggctcctggggccttgactgtgagttgcgcttcacctggcta

SEQ ID NO: 658433 - DNA, 281 bp, Homo sapiens
tcgagctggtacccagcgcttgggaggcgaggtgaggattgttgtgagcccaggagcttgagaccagcctgggcaatattatgggatcctgtctctacaaagtagcagaaaacaagacaaaaaaaaatcagccacatggctgttacatgcctgtgttcccagttactcaggtagatgagttgggaggatgaatttaacctaggtggccaaggctgcagtgagctgtgagcttatggcatgttccggactcaggtaggttctgcagtggacacgaatgttca

SEQ ID NO: 658434 - DNA, 678 bp, Homo sapiens
tgtgcgccggtttactcctgtaatcccagcactttgagaagctgagtcaggcggatcacctgaggtcaggagttcaagactagcctggccaacatgttgaaacgtcgcctctactaaaaatacaaaaattagctgagtgtggtggcggacgcctgtattcccagctactcaggaggctgaggcacgagaattgcttgaacctgccaggtggagacagcactgagccaagattgggccactacactgcagcctgcgtgacaacagtagagctctgtcttagcagaacacgattttggtctattctcgcgggcgcatcataacaaggatttcctacttccacagcgctgcgcgtaaccgagtcgactttggtctcggccaggacaatgacgcccgcacgaattgcccggtgactccaccattctggcctccgagggtccctttacaatcccttgtgcatttggacgagatacactccggtaccttcctggagctatgctgaccctcctttaaccaaacactttagcttgatcccccactgttcaacagtaaacctcaaggtcttgatggattccttaactgggcatcaaatattgaaacggtgcgtccgcaacctcgtccgtgcgctctcatggcctacgccttgctctctccccaacgacgctctccgctctctttcct

SEQ ID NO: 658435 - DNA, 270 bp, Homo sapiens
ccgagcccggggcacctgtggtccccgggttaccgccggtcacgtctctgcttaacatctgcgttgtggtcgtgacacagatgtaccaggtccccactactcgactggcatcgcgcgatggtgacccctggcttacgtgggcttccggattcaccattgggtgggccctgggtcacgggtctgcttggtcccaccttggtcggcctttcctgtcttctggcagtccttctgggtccccttgctcctttccactttccaaggcagcacaaa

SEQ ID NO: 658436 - DNA, 129 bp, Homo sapiens
gctcatacccaccacaaggcatatcactacacacgcagcagaagggccgaaatagaacaaggtaaaaaaaagcactgtagtagaggatagtagaagccacggtcaacccacaagccacggtcaacccac

SEQ ID NO: 658437 - DNA, 480 bp, Homo sapiens
atgaaagatgttcctcattccaagctgaggacggagaaaagccgtaaagctgacactggagctagaatgacttgtcagccacctttgagcaagaacttgcctggagtccaaatgtatggctattgaaggatagtaagcagacagcactaaaagtcatccattcgttatggatttagtcttaagaccctcatttgagagatgccttccctgtacctggaggaaagaaacatctttatctctgaagacacagggccccagggaagagtctggacaaacaggctttaccaatttccccccgttggtaccgttagatcaggcccttgtccagtcatttccttccccaaggtgtccccccctccacccctagccttaaaatggcccaagttccctggttgtttgggtcctccatttcaagggccccctatgtcatgttaaacttttaaataaatttgcatgcttttctcttgtgaaaaaaaaaaa

SEQ ID NO: 658438 - DNA, 323 bp, Homo sapiens
  misc_feature (2)..(2): n is a, c, g, or t
  misc_feature (43)..(43): n is a, c, g, or t
  misc_feature (144)..(144): n is a, c, g, or t
  misc_feature (210)..(210): n is a, c, g, or t
  misc_feature (226)..(226): n is a, c, g, or t
  misc_feature (238)..(238): n is a, c, g, or t
  misc_feature (261)..(261): n is a, c, g, or t
  misc_feature (274)..(274): n is a, c, g, or t
gngccccctgtggattgatttatgcatggaaatgtcaccttgnccaacagttctgatgggaacctgaaaccctgctgtggcttcaggagggggtagtggcaagatgatggtttattcacgtgattttttccgcttcgtgatttncggaaaccttcagagttggttatgtgcctccagtggcatacatatggcttcagacggcaatcacanaaacccagtcactcanaagcgagctctncagatttaaaatttgcatttganttctgtaaagacnttgtcttttgcgggtaagcagggggaccattacaattccccaggtgggg

SEQ ID NO: 658439 - DNA, 412 bp, Homo sapiens
gccttcgggttttcgggggcctgggtaaaaaaagggggacacaaaaaccggggggtttttttttagccccggcccccggggcctttttccttttggggccccaaaaagggggggaattttttttctataatttaggaaagggcggggtttggtgtgggggtgggcctccccccggggttttccgggggggagattttctccaaaaagggggttttttttatccaggttctttggggtttgggcccagggccccaaaatgttccgggccccttttttaagaccgggggggggcttttttccccccgggggggggtttttggattaaggggggggggggggggggcctttttttaccccccgcggggggggggggggggggggggcccgggattttaaataaattttggtcccc

SEQ ID NO: 658440 - DNA, 181 bp, Homo sapiens
tcggtacccccatgccaaaattcttagcggggaagatagtccggacggcctggatgcgggcgatgatctcgcaggggatgataccataagagaacacatctgccttttcattatagggctcatctcggagaacctcaggtgacatccagaatggggaacccaccacggccagcttctcact

SEQ ID NO: 658441 - DNA, 295 bp, Homo sapiens
gcttagaggatccctgccgatgctctcaccggggccactgggtgcatgtctttgaaacaccacctctcacaatttaggcagaagctgatatcccagaaagactatatatgtttttttttttttttttttttttttttttttttttttttttttttttttttttttttttttttttttttttttttttttttttttttttggggggcgcggggggcgctctttttttctctctccacacaatctacaccaaaaaaaacagacgcgccgcgcccgcggggaggcgaggggggaaaat

SEQ ID NO: 658442 - DNA, 132 bp, Homo sapiens
aaaaaaccctttgggggcccccccccccttgggggggggaaaaacccccccccctgcccccccccttttttttttgggggggggggaggggggggccgggccccctttttttttaacccggttttcttttta

SEQ ID NO: 658443 - DNA, 653 bp, Homo sapiens
  misc_feature (620)..(620): n is a, c, g, or t
gggctgcaggaattcggaacgggtcctgacacacaacgaagagtggaaccttgccctactatgtctctatagctcggcttatgccagggacgtgccacgtgctgaggcgcacagcattgagcgcgcttaatggtcataaagattgctggacgcatcagatgatcctgtgagagcagagtatggagacacgggatgagcatagccatgcctagctgctgagtcagatcagacgacgcagaccctactgcatagccgtgcagcacacaattaatggacacctaccactcgtagccagacctaaggtagcatggctgtatgttgtgcacaacaagcgcctgagagcatagcatgcgtcttcgcccactatgcaggccaccctaagctagaccagatggagagaccagagtatgatgtgcaggcgcatgctaatcatggcattgtagagtcattcttgatcagatactgggaggacattgacgaagcagatcctgacataaatgccaggtgaaccccttccgtcgatggtgtctagcagctgttaccgaacggtgactagctgatgactaatggaatctgactgttgacacagctcgattagactacgcgatgaacgcctgtgntgctgtggacagcagactctgtgcgtccgtctt

SEQ ID NO: 658444 - DNA, 163 bp, Homo sapiens
ctaggcaactagcaagactccatctcaaaaaaaaaaaaaaaatgctgaattcaggttggggggttttgcattggatgaaaattcagttttacacaggtaggtaggaaaaaaagggaggaatattttgatccgggaaagggtgaataattttctttgatactat

SEQ ID NO: 658445 - DNA, 106 bp, Homo sapiens
tgaaaatgcgccactgcactccagcctgggcgagagagcgagactccatctcaaaaaataaatgaattaattaaaagtatggctgttgagctaacatatgatttta

SEQ ID NO: 658446 - DNA, 600 bp, Homo sapiens
ggccccccctattggaaaagggaattccaaggtgaaaaactgaaccccagctcccccccagccctcccctccattcccaatgggttttgtacccaatggtggaccaagaaagtggatgaccccccctagttcattcatccatcccctggctccagagatggtcacatgacccaggcctggccagtaaaagtagtctctcccctggccacagtaattggtcatgtgatgcaagccagcttactagccctttgaaaatgagtctcctgttgagctggtaggatgtaagcctggagctaatggcgatcatttttgcccccccctggggaaagcctgcttgggaatgaaattaacccaaaggaagtcccccctgagaaatggccaaaaatatttcctgaaaacattatgtggccctttggatccacccaagcctgaggtctacccctgggcttttggaataatgggaccagttggttcacccctttttttggtaattcgagtcatgggtaatttaaccccctttaaacccttaaaaaaccatcagcatcccccgggaacttttttaaaaaagcaaaatttctactgctttggatcctgggtcca

SEQ ID NO: 658447 - DNA, 237 bp, Homo sapiens
atggcataacaggaggaagctgatcccaccatatactctggcaaagtattcgccccctgaggagtgttgatccaccacagactgagataccaaaggaaatgattgagatcgtggaggagggcgatctgaaaggtgaggtctatccatttggcatcgtagggatggccaacaaaggggattagcctgcagcacaaggggagagcgtcaagttccaattgtagtgtcctagggccaaaa

SEQ ID NO: 658448 - DNA, 126 bp, Homo sapiens
cgttgtcagatatggggagttctgtgattgaggtggagtacattaggcgtcggtacaactacaggttaaggagggtgatggtggctcccatcgcggggatgacaaggccccttgccctccctgtct

SEQ ID NO: 658449 - DNA, 262 bp, Homo sapiens
atggtgtgcacaggggccagtgtcgaccacggggtcgcggggtccatgcttcactggcgccaggaggtttcccaccgtctgtctgcaggacatgactccaggagtcaggcgttcgtcgtttcacggggcttgcaaatgatgagtaaagtgttcttccgagtgagcagatatcaagcactcgcggttctttggatgagtcagcagatactcaatgtagaccaatgccaattcaggtttgactgggcgtgtgtcatggatctgc

SEQ ID NO: 658450 - DNA, 129 bp, Homo sapiens
ctgctccgcccctctctggactgcactgaaggtgaaataaggtatcctttgcaaaaggactctagtgtagcagccccatgcaaagattccctccaccctggtcgacatcttcctttttttttgtttttt

SEQ ID NO: 658451 - DNA, 375 bp, Homo sapiens
gtcaaggtgaccaaggccctgggtcagtgcgtccactctgtgtgagcgcgacggagtctgatctggctgatgggaccctcgactcctgtccgcactgcttcctgagtacctccgacggttggaagaccaggccactgcatatgtgtgtgagaatcaagcctgctcagtgcccatcactgatccctgcgaattacgaaaactactacatccatgactgccccaacccccttggggtggggctagaaggtgaagcatcccaacttgacgtagagactcaggcccatgcagggccgtagtagaaccttgtggccatccctggagcaccctgccactcaggttgaccctcggccaatacgtcacttgcccccccttggg

SEQ ID NO: 658452 - DNA, 1643 bp, Homo sapiens
  misc_feature (821)..(821): n is a, c, g, or t
ggtttgactgctaataaagcttggcagtagacctcaagcctaacaaggtacacaccacgtgaaagagaagggttcacggtgatagagaagcatgaatgccccaggctgatacgagaacggaggagaaacaaggacgtactgcgccctgtctcctgaggtaggagatggtatgaattgtgagcaggacgcagtggtgcatgatgtcccaaggccaagggtaccccttctgctcacctgcccaatgagataccttgtctgtggtgattgaatttaacgcggcaagctacatccgaagtgaggtacacatctctcttgtgagcatcttgcccatgatttctagtggagacaccttatgcataaatggatcgtgcttgagtcccctagttggtactccaagaagtaatccgcgtatcaccttgatacgaaaatacaacatcgagacactttcgaatagcatgcttcgcaaagtttccatcgactttgggtacattgtgtccaagggtggacttggtgagcaaggcctcgatgggcaatgaaagtagacgctttgcggtcactacgttgctacagtacccttgtgtctagggacacgccgaaagcaagactaaggcgacggctttaccgaagtgtcttacttagcgcacgatccttgcgcggagttgcttgtacccagaagggccccaaagttggaggcactattggccacgcttttattccccaggccatacggaaggagataccacacacagaagtatatgagaggacagcacgatgattagaggattacttaaacgcgacgggttacaaacattcacgcggancatatttcggaggcgggggggaaaaagctcccagtgggaggacattacccgcgttaggggcctacactgagcatggaacggggagaaacgaacaccgccgacaggaagactggcagatggcggtgttccatgacagacaggactacccactattatgttacccccattggggagaacgcgggtcgtagtggccctgtttttccccaacgacgaacttggttagtggtagccaaacaacgaggcgcgttgatcacaaagtctcaacggggcgccgaaacggaaactcctatccaaagacgttttgagagacagttccctcctattggccccatgtaccagcgccctaagggcattggccccgttggacaaccccttggggcccgctctatcaagggggcgacacgaacatcgagggaggggaggaccaaacatttacacagacgcgttgaaaacaacccgttagcgaagacgcacttttttgggtagcacatagtcaacatcattaagacagacactaacaaaagtagactgtcccgagtgctcaactacgtattgtaatttccatgccgcctgcattgcaggagccaccaacacggcggcgctacaacagcgagatagcagtggtggcagcaccaagaagagaactctcagtaagtgggtaggtagtttcactcatgagagcaccaccacacgacgtatagtttgttcatacgaccactggtggcagtcactagcaatgctcgccgaacgactcccccccccataataagagaggacgagcacaactcacataagtagctcacgaatagacccacgctgttt

SEQ ID NO: 658453 - DNA, 237 bp, Homo sapiens
  misc_feature (13)..(13): n is a, c, g, or t
  misc_feature (72)..(72): n is a, c, g, or t
  misc_feature (105)..(105): n is a, c, g, or t
  misc_feature (108)..(108): n is a, c, g, or t
  misc_feature (116)..(116): n is a, c, g, or t
  misc_feature (121)..(121): n is a, c, g, or t
gttacaattcccnaatacattatatacggaggtgctctcaaacgaaacccctcgttaggggcgggggacggngaccattgtcctccttccactgtaccagtgccnccncggctggnctccncgtaaataattctttataattccgctgtactgtgctcctcttttcaactgtaatgtgggtaactgtctgtctgtgtctctgtatgtctcaactcaaactctcacgtcacttatatt

SEQ ID NO: 658454 - DNA, 290 bp, Homo sapiens
gtaaaacattattcctgtcttaaaaaatccagataggccaagcaatgtgactcacgtctgtaatcccagcacggagtgcaatggcacgatctcaggtcactgcaacctctgccccctgggctcatgagagtctcctacctcagcctcccaattagctggggctacaggtgtgtgccaccacacccggcttatttttggtatattaagtagaggcgggattacactgtgtcggccagactggtctcaaactcctgacctggtgatctgtccacctcagcctccccaaaatg

SEQ ID NO: 658455 - DNA, 125 bp, Homo sapiens
aaaagaaaagtgatcagcatgggatagtgggaaggctacttcgaggggattcagcatctgaaaggccaaggaaatcacatggatacatcctgagttttcctcagttgtcagtaattaagaatgtc

SEQ ID NO: 658456 - DNA, 288 bp, Homo sapiens
  misc_feature (49)..(49): n is a, c, g, or t
acgtgcgtctgaggtgagaaactgcagatggagctcccacatcatcgtnggtacccctggggtgttgctgttaagccggggattcaggaccagatttattacatatttcaaaagctcaacaagcaacaaccaaggtaattttgctgtcaggcacaaatgccttctgatgtgcttggaggtgaccaaagaagttcatgagcggaccccattcgggattcttgtcaagaaggaagagttgaccctggagggtatcggccagttctacatcaacgtggaaggagaggagtg

SEQ ID NO: 658457 - DNA, 251 bp, Homo sapiens
tgttactgccccttttaaaataaacactattttgggcatgttgtggtagcttagacctataatcccagcagtttgggaggtcaaggtgggcgtatcacttgaggtcagtagctggagatcagcctagccaacatggcgaagtccgtccctactaaatatacaaagattagccaggcatggtggcacatgcctgtaatcccagctacttgggaagctgaggcatgagaattgcttgaacctggtaggcggag

SEQ ID NO: 658458 - DNA, 81 bp, Homo sapiens
gccgaggacacggccatatattactgtgcgaaagatcctaacggggactacctaggggcctttgactcctggggccaggga

SEQ ID NO: 658459 - DNA, 161 bp, Homo sapiens
gcgctctagcggatccctttaattggttcttcgatgacgctaaagaagctttaaattcctgtaataaaagggaaagcagagggacagaagctattcaaacttcgtcttctttatttctctaagcagcagtaatattaacgtaacttttccactgactttga

SEQ ID NO: 658460 - DNA, 468 bp, Homo sapiens
gtaataagcacaataacatcacatcctaacttatcataatcaccacagggagagaagggcatgaaggagaaaggagtacagcactgagatctgtaataaagctgtagtgtctgttcatgtccttcacccactttttgatggggttgtttgtttttttcttgtaaatttgttggagttcattgtagattctggatattagccctttgtcagatgagtaggttgcgaaaattttctcccattttgtaggttgcctgttcactctgatggtagtttcttttgctgtgacagaagctctttagtttaattagatcccatttgtcaattttgtcttttgttgccattgcttttggtgttttagacatgaagtccttgcccatgcctatgtcctgaatggtaatgcctaggtttacttctagggttaacatggttaaaggtctaatgtttcagtctttaatccatcttgaattg

SEQ ID NO: 658461 - DNA, 1635 bp, Homo sapiens
  misc_feature (1635)..(1635): n is a, c, g, or t
ggatcctcggccgatgcgggccgcgcgggcgtgtgcctgacgactcgacagctgcggaatcctgcttctcagaaaggatggcatctcatatatatgataatctatgggccaaggtcagtcgagcgtagggacacagaagcttccattttctagtcatcacaacattcgagtcattcgtgggtaggacataggaagattggaatctgtaccgtttgcgaagtcatggcatgtgaggactatggagtcgaagccagggtgtggctggtccgcaactcaaccgaaatgatgatccctggatggctactgggaatctaaccgcatggagtgagtagctagtgtcccttgactgtcgtgagcgctgtgtgtgactagttgcagccctcgtgcggagatatacgctcggggactagccgttgcgacggggcctcatgccgggagagaaattatccttgatatggatcaacacttgttctaacattgtaggacacgccaatctgcatggcatcacttctgtttctctcccccttgagtacgggcatagtggccatggctggagcccaaatgtactggtaggaacgtatccattgaatgacccgaggagaagccttgggagctggaagggggggaaccctggggttattcgctagggtagacggtattctccataatacggtacggcgacgtgcaaagcctatgccgagtacgggctatacggtaaacacggaggggtacgccaaagtatcttgcggaaaatccattgccattcaaagaggacttaccaaattgcgtgaaccgtaccccccttgtcgatgcgaagacaggtgccattacagatgcgcgacgcgacgaccgttgtgtggagagcacgcgaacttatgcttggagtacccccagtggtatgaggaaaacctgtgcacgaagacgcttcacaacaggcaggatgcgatacacaatattgcataacacttttggccaaagtccagagggtgggccacatgtggggttgaacaaatgcataccccggcaagataagcgacagagtcattggcctgcagagaagcttcccccgcacttttaacttttcaccattggccttgggccagattaggcacaggaagaaattctccctttcgcctggccaaggacacaaccactgcgtacacaggtcagataaacgcaacacacccagagggtttgcctcgtgggcacctcagtcatgaaatttgagtactgggggtggaacttttcaccacgcgcgtttggaaaacggcactgggcaaacacgatcgggcagagcagttggaaaagcgtcaccacagtgcggtaatcaacacctagaagacagaggggcagtatgagcaattcgcagacgagacggctcagcgctcagcggaaccacaaacagggctttttagtcaggtatccgccctcgcctgttggacacaccacacacgtatatagcactattctggtgggacgatagggcagggtagtcttaatactagtccaggcggacatattactactcagcacttgctgattgccgacggcaactaccatctcacgagggcaagctagcttatcaccttgggcacaatagcacgagtttgaaaatcactcaaggatactatctgn

SEQ ID NO: 658462 - DNA, 111 bp, Homo sapiens
  misc_feature (26)..(26): n is a, c, g, or t
  misc_feature (98)..(98): n is a, c, g, or t
gatcaaagacatcctcatccagtatnaccggacctgctggtagctgaccctcgtcgctgcgagccaaaaagtttggaggccctagtgccctgctcgtnaccataaatccta

SEQ ID NO: 658463 - DNA, 166 bp, Homo sapiens
gtacttgaaaaacggaggttcttcctgcgcatccaccccgacgtccgagttgacgggtccgggagaagcgcgaccctcacatcaatgctacaacttcaagcagaagagagaggagttgtgtctatcaagggagtgtgtgctaaccgttacctggctataaaggaag

SEQ ID NO: 658464 - DNA, 1477 bp, Homo sapiens
  misc_feature (875)..(875): n is a, c, g, or t
  misc_feature (1317)..(1317): n is a, c, g, or t
gccgtcatctctttattggctgccagcgagagtccaccaagcctgccgggcagtccctgcttgcccaccacggtgtttgggtccaggcccagcctcaccaccccggggtgctgtctccttccatggttccacgccgtccttgatgggtgtgcccagtggaagtgtcatgagaagacccccatggcttggaagtgtgaaggggtgaactgggactggagtctcagggttaagggttcccccagaacccttctggggatatcctaaactatcctagttcctctgcctgaaaggggctccccaaatcctaccagaagggatggaatgagattaagacgtgtgaagaatgtgggacaaccgcttacaaaacccaggggggtccttgtgcaaggtcccatgtggcggggcattccctgtggagtgccactcacccagacccgcacaccccgagaaccacgtgggtcttgaggaaatggcagaggtctgtgggtgtatccccagaaaaagcagcttgagtgcggtcagtgtgggcggggctatatcatccccacgaagagtccactgtggtggggttcaatctcccctcgaagcctgtatccccacaacaaagattatccctctattggcacacacaagtgtttgacaaagagaaagagcatatgtccacaaggaaacttcactggggccatggagcgcaatacaacacagagatgacccaaggcagatatacgcatgctcgtgcgtatcctggcccatagagcacagaagagaggctaaccacgaagacacacgaggggacatagtaggttcaccaaagagcacacacaaaagtcgcccgtccaccgaggatacatcgaagccccaataacaagcgcggnccacaagaggtggtaccaaaaacagcctacaacacgaatagaggccctctgtgatagagcaaaacaatacatcatgagaaggcgtagcacaaagggagcttgtcaataggaccatcattaggcagtagaggcaccacttgaagtcacgatgtgacaatgagcgccagagatgtggcgaggccgaaccccatatacatcaccaacagaaaaacagccccaccatgtggcgacagcccacggagaaccccaagaaacagacggagaccccaccgaaggtgcaccacggacgaagagtagccacccccgagaaattgaaaaggcaccgggaacacgggagaagcaggaggacacacgagcaaaggaggtgctacacatacatagtcaagtggtgtggcgtgacacgacacgaactacacctgaccaccccgacaagcagaacganacacagactagaagatagaggaatacgaaaacgagggcaacacaccccacggtagcaccacgccgtcgagacgcacgcacaccagataggtggtaaaaaagagcaaacggtaccacacaacaaagtcgcgaatacacacaaatggccaaatggctcacct

SEQ ID NO: 658465 - DNA, 923 bp, Homo sapiens
ggtcagactgttccacacccagaagacgtcaggtgacttcagtcctgctgcagttgtgcagcagaggagactgagacttcggttgaggaaacgggtatttcatgtctcagggagtaggttgtgcagttacagcttttctgttggtatgcataattaataattggagctgcaaagcagatcgtgacaagagatggacggtcagaagaaaaatggaaggacaaggttgttgacctcctgtactggagagacattaagaagactggagtggtgttggtgccagcctattcctgctgctttcattgacagtattcagcattgtgagcgtaacagcctacattgccttggcctgctctctgtgaccatcagctttaggatatacaagggtgtgatccaagctatccagaaatcagatgaaggccacccattcagggcatatctggaatctgaagtgtgctatatctgaggagtggttcagaagtacagtaattctgctcttggtcatgtgaactgcacgataaaggaactcaggcgcctcttcttagttgatgatttagttgattctctgaagtttgcaggtgtgatgtgggtatttacctatgtgtggtgccttgtttaatggtctgacactactgatttggctctcatttcactcttcagtgttcctgttatttatgaaggatcaggcacagatagatcatatctaggacttgcaatacagattgtcacagatgctatggtaaatccaagcaagaatccctggattgaagcgcaaagttgaatgaaaagtgcccaaaataattagtaggagtcatctttaaaggggatatccatttgattatacgggggagggtcagggaagcacgagacttgagttgcagtgcagtttcaaagatcgtggtagatcttaattttagcatgacggt

SEQ ID NO: 658466 - DNA, 1095 bp, Homo sapiens
ggaggattccgtaggctgcagtgtggagcagctctaatgccttgccagccctgtctggagtgaagactaataatgccgccctacgacgagcagacgcagtgccttcatcggatgctgcccagtgaggccctgcaacaagttcgaggaggcctgagcggtcgctgaaggacatggaggagtccatcaggaagcctggcagcaggagatttctttatggactttggaccctaacggggaagttttgcttacctgtacagccagtgctacggagctcagcagcaacgaatacgtctagcagactctgccccttcagagctatgtctcgcaggaaacgccaaactcggtgggctctcccacacagccttggcacctggggactcatggattggccccgaccaggacaagttcagtgccatgaacgtatgagcaagggcaccgggctgctggcagtggccccaacctgctccaacaccgtgctgcctccttgtgcgggaaaacgagaccattggttgaccagtgagcaacgagagcccagtacgcttgcgagttacctcatgggagctgatgacggctagcgcgtccttgcccggtagccaacccgccctggagagcaaccaaccggaagacgaccaatggaggagctctagcctggaatgggcgccaaagagttgcccggaaagacagatagagcgtcctcggatcggacagataccccaaacaaaggatgaagcggagagccccttcggaaagagtgcaccacaatgcgcaattctaataaaccctagatacaccaaatttacccatcaataatgagaccgaaacatagaagcggagaagtacaccccaccacttggggcccacgactataggcgtagcacagaaattcagcaccatgggaattgtcaggaaacatcttacacctaccgcgaggacacgcacacacgcgcgtcgtataagcgcccccaagagcatgcagtatcacgagcgtgtagcaccacaagcatgctgcaacatatcatgaagcagagagtcgtctacatacgatcgtgacgcgtggctacgaccaatctcacgctggtagcgcacgcgtccgta

SEQ ID NO: 658467 - DNA, 161 bp, Homo sapiens
tacgtgggtttacggcgacgacatgactgagcaagtatatgcaacaatgaaagcacttcgggaggcagatgtagactgcttgactttaggacaatatatgcagccaacaaggcgtcaccttaaggttgaagaatatattactcctgaaaaattcaaatact

SEQ ID NO: 658468 - DNA, 317 bp, Homo sapiens
ggtgttttggtttcggttgtttccgaccactaggggtggggagggccggcccggccatggtttcagccccggccctggacagttttggggccccgggcccccagcccttgtgggttcagcccccgttcccgccccgccccgcccggccggcccttactttttttggggtcccagttgggccccgtgccggggggtggcccaggttccgcccgccatgggcctgttaattgtccggccccgtcggggtgtgttggtcccgcccgggggtgcgggggggttttttgaccccgggttttttttaaggggccttccgccca

SEQ ID NO: 658469 - DNA, 374 bp, Homo sapiens
aagtcctttaccagctttagccatagcaccagaaacaaaactaggggaggcctgtctcatcatggaaggcgctgaatttacggaaaacattattaatggcgtcgagcgtccggttaaagccgctgaattgttcgcgtttaccttgcgtgtacgcgcaggaaacactgacgttcttactgacgcagaagaaaacgtgcgtcaaaaattacgtgcagaaggagtgatgtaatgtctaaaggtaaaaaacgttctggcgctcgccctggtcgtccgcagccgttgcgaggtactaaaggcaagcgtaaaggcgctcgtctttggtatgtaggtggtcaacaattttaattgcaggggcttcgggggtaccgagctcg

SEQ ID NO: 658470 - DNA, 171 bp, Homo sapiens
caggtcatgttatgcaatgcatccatcgagttgacacagaggtgcctacccactgggccttggttgtgcaggtagatcgcactgtatttggtagcctctgtggacttagggaaatcctgtgaagtgtgtcaaggaaaatacacatgtgaggtttgagggagaaaaaaaaaa

SEQ ID NO: 658471 - DNA, 414 bp, Homo sapiens
cgggggaagcggaagctgcagctggggtgggggcagcacctctatgcttcatctctgtgggtggcaggagacaaaagcacagggtactatcttggctcctgggagcgactcttgctacccacccccacccatccccttccccttggtgttgacctttgacctgggggttcccagagccctgtagccctcgacccggagcagcctctcggaagccggagtgggcagttgctggcgattctgagaaaacttggccgcatccaccggggccctgcctccagtcggccgctgccgagtctctgcgttctggccgcttcccggcttaatgaatgccagccatttaatcattgctcctgccaccacaaatagatgagcagttaaataaaactcaacttggcataattcaaggcaaataaa

SEQ ID NO: 658472 - DNA, 743 bp, Homo sapiens
cacgcgttcggggtctccgggaagtcgcgggccttcggatgtggcggatgcggccgtgagccggcgggggaggtgctgctgctgcctccactgtactcagacccaggtagcacaggatgtccatcctccagcagctcagtgcaagcggtgtgaactcagctctgtttcagatgcctccacatctcatgagccttccaagtaagctggttgaacttcggtggcgtggctgtgctgagtgacggcctcttgctggcctggtggccgtgcaacccgcgaactctgcgagctcctgtcatgtggcctccgctgtggcccgtccgttcttgaccgtggcacagcctcgcagggccgggtggcgcatgcgtgtcgggtgggggctctggccatgtagtcctgtccatgctggttacatagggcaaggggatgctgactggggtcgatcgcggggagctgtgttcagctccccggcagtggtgcagcatcctggcgagccatcgaggggcgtggcaccaggccggacactagaggggcgacgctccgttatcgtgaaggaactacactggggatctggctcaacttcggcctggaccgggtagcaggccgggctgatgggatcccggtggagatgggggtgattggcgacgacgagcttcaatgccgtaaaagcggccgcggggctggcgcacgggctataaaccagggcaggtcgatagactggtggcgagaaccaaagtactgccagc

SEQ ID NO: 658473 - DNA, 887 bp, Homo sapiens
cggatgctcttaggagggttctagtcataggtacttaaaatgacagaatttttttaaagctggatttcaggtaattttcatgtgatatttctttgttgattttatttgttttctaaaaatatgtctaatctctactgataattatgagtgagttttgcctttaaaaatatttctcagaaccttttcagcctctgtcattgtcgttttaaaaaatttttaatttgtgattgttgaaagtcagtaatattaagtgcactcttttttgtaattttaccttctatttgagattgggaggtatgtatgaggtttgttgtgtaggtgtaagtatactcttaatttaaaatggaaatgttcatgattaccacattctttttagagggaacaaatctaatacccatactcagtgatggaactgtgtgcttctggaggccacactccaggatgaacagttgtaaattgttaatatgactcttgttactttgatagacattataaatgccagccctcttttttcctttttaaactttcatttggtttacaaaaacaaactcttcagtgctcagggtaaaaatttctggaaaagtggtctacccacggtggtgtgacgcaaggactctggagccagaaccagctaggttggagctcaccatctagtagtggggtgaccttggacaagcccatagcctctcaatacctaaatccccatttaatcggtgatcaataggccactgaaggctcacaggggtacggatccttcggaagccagcacggcgggtcaaaggtataacaaggcaacagctcgcacacaccgtaggcaacacgggacgacacaggagggccaaaacatcaccaccggagaagagaacaccagggcacacgacacaaca

SEQ ID NO: 658474 - DNA, 125 bp, Homo sapiens
  misc_feature (43)..(43): n is a, c, g, or t
aggtgattagaggatttaaactgggttgagttaggagttgggnagctgacacgtgtgtggcccgttataataaaaatacaaaaattagccgggcatggtaggcgcgcgcctgtagcgccagctat

SEQ ID NO: 658475 - DNA, 157 bp, Homo sapiens
gggctcatgtgatcctcaaactcggctttaaacgatcctcccaccccagcctcccgagtagctaagaccagaaaggcacaccactatgcccagctttttggtattttttggtagagacagggtctcccttggttggcctgagctggtctcaaactcg

SEQ ID NO: 658476 - DNA, 241 bp, Homo sapiens
ggccgagaaggggaaaaatgagagaactaccactaacctcacttgctcgcacaaggtcaacagaagttcggttccaagctacctccttgctttttctgtgaatcacttctttgtgaaggtttatacgcagcaatctctactaatctgttaacacatagattggcggtctgaggtattgatcaacagtactcatgcctacttgccatctgtcagggccccagtcacaccgctgtgtattccg

SEQ ID NO: 658477 - DNA, 466 bp, Homo sapiens
agctatggttagtgttactttgggctcaagttgagaactagaaagaacatttccttgagatagctggatgagttgacagagatacaggaaatgtcaagaatctaaagacgattcatttctatgtgggcatgagaatttctgaaataatgagctgtagttgacgaaaagcaagcagagcttagtgaataatcttttcaggaagaaagaaggtgaccaggccaaaatgtatcacctctgcagggtgataaatagccactgaatggagaggaaagagtgaaggaggaacaggcaatattaaagtaagttgctggtaagtttttaaaaaatcagtttgatattgttgaatcattaatcatcagttatcctaaaaacaagatttattataatgacttatcctgtgtagaaaaatacatctattttgagtgggagactttcaagatcatttctagtccagaaaaaaaaaaaa

SEQ ID NO: 658478 - DNA, 1046 bp, Homo sapiens
tctgatccgtcctaatcacaggagtcctacttctcctatcgtctcccaggtcctagctgctggcatcactatactactaacagaaccgcaagtcaacaccaccttcttcgaccccgccggaggaggagagccccagtctataccaacagctattctgattttcggtcacgcgctgaagtttatattcttatcctaccaggctttcggaataatctcccatatgtgaagcttactactccggagtgaaagagagcattgggatacgtaggtatgggtcctgagctatgagtatcaattgggcttcctagggtttatcgctgtgagcacaccagtatattcacagtaggagatagacgtacagtcacgagcgatatttcacctccgctagcataatcatcgctatccccaccggcgtcaaagtatttatgcgtgactcgccagactccacggaagcaatatgaaattgatctgctgcagatggtctgaggccctaggattcgatctttcttgttcaccgtaggctggtctgacctggcattgtgttttggcaacatgtcaatcacgtagagcatcgtaactacacgacacgttagctacgtttggtagcccacttccacgtatgtcctatcaatagcgaggcttgtgttctggccctcgtatggacggcttgcaattcacctggagtatgtcccctattgccggcagagcttgcaccgtaagatcaagacctacggcccagaaaatccatagcactatcgatcatgcccacggagtagaaacataagttggctgccccggacactactcgggccagacgggatgcccgacgtagtccgataccgaagcaacccacagaaccaccaatactggagggcacactctcaacgcggaaagagaacgcggatgaactgacacaaaaaccaagaagaacaccaaaggaggaaggggccacgcagaaacagcggaaacacacaggggacccagcaccccgacgcacaacaaaacaagcggcacgcacacacaacaaacaccgcagagctcaacag

SEQ ID NO: 658479 - DNA, 385 bp, Homo sapiens
ttagcgtggtcgcggccgaggtacacacatcacaaacaagtttctgagaatgcttctgtctagtttttatgggaagacattccctttttcaccaaaggcatcaaagcgctccaaatgtccacttccagacactacaaaaagagtgtttcaaacgtgctctaagaaagcgaatgttcaactctgtgacttgaatgcagatatcacaaagtagtttctcagaaggcttctgtctagattttagatgatgatattcccgtttccaacgaaatcattagagctatccaaatatccacttacagtttctacaaaaagagtgtttccaaactgctgcatcaaaagagaggttccactctgttagctgagtacctgcccgggcggccgctcg

SEQ ID NO: 658480 - DNA, 1643 bp, Homo sapiens
ctggcctctcccccacccctcagcccgggccctgggctctgtgtccccccctctccctccgcttcgcactcccgtcgggtacgggaaagtgtccaatgcctgatgcctggtgtgccctgagtgtgcctgtctgtgtgcctgcctgtctgccactgtgtgtcccaattgtgagcctgcctgaatctcttatcctgtgtgaagctcgtactgtgtactgaccttgtccaaatgtgcctggccctggctggctcatgccccatacatagcttgagtggaaacaaacttggaatgtgcatcttggcaacacaatccatatgtttgttgcacaaatggacttgagttcattcttctgtgcatgttggttggtaatcttccatgctttgacaccacctgtggatgtggggacatttgcatttgtgtgccatccaaagaactcttgatgtgttgacttgttggtgtgatgtacgatgaatgtcacatgagatgaaggtccatttcttgggatgtacacttcttccgtcaccattggggggtgaaggtcaccattgattctctgaataggatggaaggccatagcaaagcgcggtcatttttgagaacaacaaaatattggtaagcagcccatttcaagacgagacgtgagagggtaggacaaacaataggattacacaattagaaaccattggtgggcctggtgagagggaactttaccccttaacgatatgagccaatatcaagcaagtgaaacccatttggatcccaatcatttgaaaacaagattttccatcgatacaccaagcagaccaccgatataatagggggaccaaagaggcaacactatatcacgtggcacccgcatacccattgggaaactatttccaaaagttttacaaatgggaattccgcaaaaggcagcataccccaaagcggaacagtgtgggaatcgacctccccccgatatggaggacgcgcaaagtgaaatgcgccaaaaacacgtgagggcacagatgaaacgcactttaaacagcatatggctggagccattatggcatctatatggatgatgaaaacaccatggatgctccaattgaggccacataccatacacacgataagatgagccgatatactaaatacagcagatatatagttgctaagacaaaccacaaaaaagacagacggaataaacacgccccaataacagccaagataacattctttcgattacatactaataaacattagagacattttatataacccaatttcactggtaaagtcgcatttaaaaaagagaaaacaacgaagggtggtgtaaaaacggagatggcatgtagatataaacaaaaattatatttacgccaaagtaggttaaatggtgaatgttgaagatgtgatcagttggagcccggtgacgtgagtaattagaggcacacagaataggtgtcatatagtcagtagagaaaagaagacaaaagtaaaacagaatgatagaatggtttaccagaaacgaccacattattcattaagaatgatagctatcgattgaattaaaagctttaaagaatatagataaaattagcagaacgatgagcatgatgaacctagatgatgcaccgaaggtggactgaatataaacaaaa

SEQ ID NO: 658481 - DNA, 1182 bp, Homo sapiens
cggagccgccgaatccggtgccgcaggctcctctgcgacccccggtgcccccgacagtgtacttccgcaaagtggtccggctagagcaaattccggcatgtgttcgggcagccggtctcgaacgaccagtgctatgaggacattcgcgtgttccgtgttacctgggcacatgcaccttctgcgccgtcaaccccaaggttcctggcgcgtgattgttggagcgccaggtggagggggtgcctttcttggttgctccccctaatggcaagacgagtgccgcgattgagcaagggccgtactccgagcgtatgtagtgaggctagcacggagaccgtttcactgtgaccatcgagcgtgcgctgtctctcaacgaactgacgcaacgtcatacgtccagctggtctcgagagcgactgccagcggttccattgagattgcttggactacgaattcgccacggaggacaccgtgggcttgtacccctcctctcggcgttgtaacatggaggactcggagcttgggattggctaacttgggacgcggcgacatcgacgcgaatgaccgcaccgttggtgcctagttcaatccgtcgcgtagtggcggaccactcaaccgagacacccgcacaaagctggttggctttgcttgcaaggttgtcacgggcattgccggagcgagacacgattgggttaactccaatctgtgcggaagttagtcgtgggcatcacgacgggaacggcgtaggcattggtacccagggccttgggaacaaggcccttgaccacgcccctttgaacccgtcaagttcgtaaccgagaacttggtgtcacgcccttgggaaaacgctaactaactatgagcgatagccccattgattactatagcgtcagggcagagtgtcaaaagtgtatcccaaaggaagtctcgtttggccggcccatttcatattcgggagacccccgcgccggtgtaccgaggggagtgcaacccccgtttgggcttggggacacaaacacgcgccgagttgcacgcaaaagcgggccttccaccttgttagcacgtgcagtgtcacccctgggatcccccaattgccgatggagaggtaccacaattcccgttatccccttgtggcacacgaaactgtggtcccagaaaggggggttgcattgtagaaacggcgat

SEQ ID NO: 658482 - DNA, 180 bp, Homo sapiens
  misc_feature (103)..(103): n is a, c, g, or t
cccggaatggcgcaacgaagataagaagcagatgtacgccaagatggctcggcagggccacagccacgtaacgaactacgtgactcgcgtcatcaagacgaangaagacgatgcggggaacaaagaccagttccaggatgagatcatcgacgtcgagaaggacggacaggagatcgggga

SEQ ID NO: 658483 - DNA, 185 bp, Homo sapiens
gattgatgctgtcacggggctcagtggcagctggccgcctacgcattcacagccctggatgccctgtgctgatgggggtgtgaagatgggacttccaatggcgcctggcgagtccgcctcgtgggtccagtgcccttcctggggtgctgccaatgatgcgtgctgaactcagaaacagcacccag

SEQ ID NO: 658484 - DNA, 279 bp, Homo sapiens
tgagacagagactcactgccacccaggctggagtgcagggacgcaacctaagctcactgaaacctccacctcctgggctcaagcgattctcctgcctcaggctcaaccttgcttaccacttgacttttttaactattactaaacagtttgatattttgctgactttggttcgatccaccttttggtggaaattattaatgcgtaaaatgcataaattagaattaagcaaaacaagcaaagtgattttgctaagaaacctctaagaattaggttatttca

SEQ ID NO: 658485 - DNA, 187 bp, Homo sapiens
  misc_feature (5)..(5): n is a, c, g, or t
  misc_feature (7)..(7): n is a, c, g, or t
gaaangntcatgggccagtaacgggtaggtctctctaacggatctttggctcgttccaaagggacctcaagacttccatcgattttatatcgggggtctagaaaaggagttaatcggtttcccctcataaattcaccaaaatctgtaatcgggtagtccgtaactcttcctccacatccttcactaa

SEQ ID NO: 658486 - DNA, 392 bp, Homo sapiens
  misc_feature (79)..(79): n is a, c, g, or t
  misc_feature (121)..(121): n is a, c, g, or t
  misc_feature (162)..(165): n is a, c, g, or t
  misc_feature (181)..(181): n is a, c, g, or t
  misc_feature (256)..(256): n is a, c, g, or t
ttttttttttggtttttgggttttagattattaaggggtgagaggtataagttttgagtttttgacttttttttttttnggggaacaaaaaaaagaggaaaaaaaatttttttgggggggnggggggggggttttttttttcccccccctttccccccaaannnnccctttaaaaaataanaaattgtttgtgccgaggtctaagagtgcagtggctattcacagatgcgaacatagtacactgcagcctccaacncctagcctcaagtgatcctcctgtctcaacctcccaagtaggattacaagcatgcgccgacgatgcccagaatccagaactttgtctatcactctccccaacaacctagatgtgaaaacagaataaacttccccca

SEQ ID NO: 658487 - DNA, 186 bp, Homo sapiens
acagactaattaactcccactggtatgagcccctgtggatatctaaatacccgctttagttctcttccacagtgagcaggcagaggactcactctcctgggacctcctacacatagaacctccactggcctgagcataccttcggcttggttactcactctctattcaaactctccttcatgatga

SEQ ID NO: 658488 - DNA, 150 bp, Homo sapiens
agacagtattacagactgctgcaccaggacccagcacatgctgcatagattctatggaagtactctcctcatgtccatgtggcatagattcaaatggaaagccagcagatgcagtctacggacagaaagaaatccacagtaaagtgatgt

SEQ ID NO: 658489 - DNA, 345 bp, Homo sapiens
agttcttgagccacaaacccttcctctatagaagtacagtgtggtctgcgagagaatctgtatgtacaccaggcctcccaggatggcgagctccagtaagatgataatggaaagcagcagctggtcggttgtcacttttctggacattgaacggagaatcttccgacttttgctcaagttttcacttgtgtataccagtctactcttggtacgttctaactggtctcgttgttcccccagctcttctatgatttctgagccaatctggtcagtctctgtggcaatccgatgagaacgctcaatactttgggtggcccggttcaggctttcagtgccctgcagaag

SEQ ID NO: 658490 - DNA, 915 bp, Homo sapiens
gctctagcggcgggatttgatggcgtgatgtctcacagaaagttctccgttcccatcacatgggtccctcggtttcctgcctcggaagcgcagtgagcaggcactgttggttgaaggtgaatcagcttccctaatggatgaccctgtcctaagacccggtccactcgtccagcatggccttcctgggatacaatggctggacatggactcacacttcgtgtcggcgagatgtctacaggccgggatccaaggtgaacgagacatggatgtgccgtggaggctgtgaccatcgtggagactccacccatggatggtggtgggcactcgtgggcttacgtggacatctcgccgtcgtaaggcctccgggaactttcgaagaatcttgtctttgctgagcatccgatcgatgtgatgaagtgcaagaatggcgtatctatatagaactttggcgttaacatctaaggaatcaacggctctttaccacatgtagctgcacagaaatcgcgctgggatgaggactggtctgacgacgctatcccctggacgatcgggaccttcgagcgtgcaatgacgaatgtacgtagcctagagtctctcccgtagttctatgtggcgcactacaaccgcatggatgcagcgcatgacgttgccgtctggcggcctgaaaggaacgtgcccctgcctttgttggtcctattccagggtgaagcggaccggcaactagtttggcgcgaaggaatgctggatggtggtgcccagtgcagagggctgggggctcgcttgcgttaccgtgttgagtccccagtcggttggggagcgaaggtgtgaccattgaatgcgttgcggtcatcggtgggtgaccctatggggcaaaggttagctggggggttgtccccagttcggcggggccgccca

SEQ ID NO: 658491 - DNA, 691 bp, Homo sapiens
ggcgccagtagcctttccgtcaattcctgtgctgggcgtacgtcaagatggcggcgtctgtattaaacaccgtgctgaggcggcttcctatgctatctctcttcctgaggttctcacagagttcaggttcccctcacagactctttgcaccaaagctccctctgagagaagattctttgttcctcagtttcccatttctccttataagtgatgagccctggaaatatctggaatcagaagaataccaggagcgatatggttctcgccccgtctgggctgactaccgtcgcaatcacaagggtggtgtacccccacagcggactcggaagacatgtattcgtcgcggacataaagttgcttgggaatcccatgaccccatctgtcagagatcacatggttgcattgtggactttaggaaccgtgacagctcattgagagcaactttggtctgtcgcccacagcgggtatcatcttctatgctccatacacgagggagtctgtgtgaaggcagcacaacgcggttgacccagtgccatccagtaaagccagggatcatggtctcctcatttaccacatcccccaggttgaaccacgggacttgacttcagtacctctcatggggctgtgagtgctactccgtcagcccccaccctggtctcaggtgacccctggtacccatggtacaactgga

SEQ ID NO: 658492 - DNA, 238 bp, Homo sapiens
  misc_feature (204)..(204): n is a, c, g, or t
gctagggagtacaggggcgatctaagctcactgcacctgctccagtgtcaagcaattttcctgctcagccttccaagtagctagtgtctacaggcacgcactgcacctctcccggctaattttttgtatttttagtagagacgggtttcaccatgtggcgaggctggtctcaaactcctgacctcaggtgatccatctgcctcnggctcccaaagtgctggggttacagtcatgagcc

SEQ ID NO: 658493 - DNA, 129 bp, Homo sapiens
  misc_feature (77)..(77): n is a, c, g, or t
tataggtttgacactaaaaaacatagcaaatactcttttatatttagcctaattccgtgatgccttgttttcttaanattaattcatggcgcaatgaatgggggaggaaaaataacaacaacaaatatg

SEQ ID NO: 658494 - DNA, 158 bp, Homo sapiens
tggggtcaaaattagtaaactttatttaaacttcaaaaaaataaaataacagacaaaaggcagtcttaagcttggttcttcccgaggatcagtcggtaaccactcacaggcgaggaactacccctaagtgaagaagtacccctttatacctcaccccc

SEQ ID NO: 658495 - DNA, 338 bp, Homo sapiens
agacacggccgtagtgctccagtggtaccagtacagcagcatcgaaccgaggcaggccatcagcttgtcggcgatgtcacgcgcgcccggatgatatgtggtcgtccttctccggcgccacgcagccgagcacggacacgccggtgcgcatcacgtccatcgggtgcgccgacggcgggcagttcttccagcgccgcctttcaccgcggccgggatgccacggcaagcggacttcagcttgggctatgtagggaaaccagctcggcgccgggtcgggcagcattgccggtgcaccaaagcaggttaggcggggggatccctcttagaagtcggacctg

SEQ ID NO: 658496 - DNA, 642 bp, Homo sapiens
atgtctgctgtgaccacaggctcaggtccgagcctgctgcttggccacagcagtggctgggcgatgtgggaaccactatctcttgtggagcccccaaagagctgggaaagtgctggagggaaccaggcctttcccgcttttgcctggctgcagtggttcggctccgccccgtgccccccagccctcgttgtgtccacatccgcagctgcctctgcccctcgggggactggacacacatcctgccaggaggcgctatgaagcttggcccagatgaagccaggtgggctccgtgttcactcccactctcccgaggggtgctggcctccccagggtttgtcctatctatacggatttagacgaggttcgaggtctcagcctatcatgggcagctctcagtgattgtcattgttcctctttgcctgtgggtttaagttgcgtatttgtttaatcacaagtttgatacaaagatgttgttcatcgtagctctttggagatgcccattactactattcgaattaagctttgtactaattcgcatctggaagctcagcaagtgcacaaggccttactttgcgttaccgtggaaaccactgcctgccctccccgatgtggttgcgctcaataaagaatgctggaattcaa

SEQ ID NO: 658497 - DNA, 264 bp, Homo sapiens
tgcgtgcctgtagtcccatatacttgggaggctgaagcacaagaatcgcttgaacctgggagggtgaggttgcagtgagatgagattgtgccacggcagtacagcctgggtgacagagtgaacacctctctcaaaaaaaaaacgaaaattccagctgcatgcttatacgacctaacacatgaaccccagattccttccagctggtcacagttggacctggccagccatcttggcttcatccttcaacagaccttgcccacagaa

SEQ ID NO: 658498 - DNA, 230 bp, Homo sapiens
agcaggatccccaggtaaagatgcagaggatagggagatcatgttcttggggacagctatttgcgaggaaacaaggctgaggggtccactccgaacctctccacccgtgctgcaggtgctgcctatgatgagagatgagcagatggccatctcagggtggggccacaggtgcactgagacctagtagtttccaaaatccgacactcagacagagcatacttatctgattg

SEQ ID NO: 658499 - DNA, 176 bp, Homo sapiens
ccgaccctggagaattgagattcgtgcacaaattagcacggaaacgcgctccatataaagtcgacaaatcgtctccagagacacaacgaaaaatggacttgataccacaacaagccaacactatcatgaccaggaaaactcgacaacgaacatctttcttctacgaagagcacaac

SEQ ID NO: 658500 - DNA, 681 bp, Homo sapiens
gtgctgagattagttgagccggctaaatggtccattctgcattgtatttcatggctggaaatgaatatattcttttaccagcttttgagagacacattatgaatactatccataaggttaacattggaagctgtgttagttatatcaagagttaactttgcatacctaagtaacataggagagagtaaatatctttgtgagtcacccacattgggtgagacagaaaattgaagtctggttctaaaaatttgtaattatgctaacgttgatttgagttaggtgaaaactgggtacagtggtgtctgacttgagtttacaacatggtaacttgatgaactgtacaaagtagagacgaataagtcaaataattggttaacaaacatacaatacaccattaaaacaacaacagaagaacaaactaatataaaacaacaagatgtgcttcaccgacaacaaatcaaacagagaggcaccgcccagagaggggcgcgaccaccacagacacccacaaaacacgaggacaaacaaaccccaaaaaagcgacaggaacgagagcaacggcggcgtaacaccccaacagaacgagagagggaaaagaaacagtggccggacgggcggcaccaaaagaagcaaaaaaaatgacaagaaaacacaggggagccacacaaaacaaaacacgga

SEQ ID NO: 658501 - DNA, 142 bp, Homo sapiens
agccggtccgtctaacaggcttggggagatgttagcattttcatatatagattatggcatcaggaaatcgaaatagttttacttctatctttccaattggatgcctcttattcttttgtttgtttgtttgttttgttgtctc

SEQ ID NO: 658502 - DNA, 351 bp, Homo sapiens
tcagtcggtacgatcacatagaatgagcaatatgcagagtgaggtgagacggcgattcagcaggaatgtctccatgctctgaaactatgtggtcttatgctatatagttatctacttacagaaaataccaaagacgtccaaggccaccctgtcctgtcaacagaacttgctgctggccactcccaatccatctcataccattgggaattgattagtgctgtttctctatctttgtaaaaagaagtttcacttatttaggggtcgaggaatttaccaggttgagagagggatccttggttcttccaccagatactgttgttccattcccaaaacttggtccggttgcccttg

SEQ ID NO: 658503 - DNA, 462 bp, Homo sapiens
  misc_feature (219)..(219): n is a, c, g, or t
  misc_feature (256)..(256): n is a, c, g, or t
  misc_feature (264)..(264): n is a, c, g, or t
  misc_feature (270)..(270): n is a, c, g, or t
  misc_feature (282)..(282): n is a, c, g, or t
  misc_feature (291)..(291): n is a, c, g, or t
  misc_feature (313)..(313): n is a, c, g, or t
  misc_feature (320)..(320): n is a, c, g, or t
  misc_feature (326)..(326): n is a, c, g, or t
  misc_feature (337)..(337): n is a, c, g, or t
  misc_feature (341)..(341): n is a, c, g, or t
  misc_feature (344)..(344): n is a, c, g, or t
  misc_feature (351)..(351): n is a, c, g, or t
  misc_feature (355)..(355): n is a, c, g, or t
  misc_feature (365)..(365): n is a, c, g, or t
  misc_feature (373)..(373): n is a, c, g, or t
  misc_feature (385)..(385): n is a, c, g, or t
  misc_feature (398)..(399): n is a, c, g, or t
  misc_feature (444)..(444): n is a, c, g, or t
agccacgtgggcatccactccttttcctgcaagagatgatggttccattgctcttggcttcatggtgttcctggaaggcagatgagctggtcatttcgcctgggactcggcacctttccgagtgcagctggagggatctgagcgcaggaagacgcagaacaacagaaatagccgcccctccccgcccactgtcctgttggctatcatagatctctatgntcttgactttgtctctcctttccgagtcaatggtggnttacactnatcctngttccactgatnactctctcngacgagtccatcacctgcaacntaaatgnacaagnttacatcccantttngantgaagantttngaggtttttnttttaaanggctgtgtacanttatacttttttnntacacctgttcatttctacttaaatttatggcacagatttgatgngcaccagtcttgaggaaa

SEQ ID NO: 658504 - DNA, 405 bp, Homo sapiens
  misc_feature (349)..(349): n is a, c, g, or t
  misc_feature (382)..(382): n is a, c, g, or t
  misc_feature (392)..(392): n is a, c, g, or t
atttttttatattgactcatatatttaatgtagtaaacatttaatgtattaaactcctcatttcttcctgtaaataccaatttttatctggcatagtttcctttcggccccaaacacattctttagtatttatttcaatgcagttctgctggaaacaaactcttacaacttctgattatcagaaaatgtctttatttttgcagccatattcgagcagtatgtattggatataaaattctgggttagcatcatttttgttttttactttcagttctttaaaggttgctctattatcttttggcctttgttgtttcttatgagaagtcgcgtcatgcatattgctggcccnctgtaggtttatttgcttatgctgtttccaggnttgacctcancttgtttttttat

SEQ ID NO: 658505 - DNA, 1006 bp, Homo sapiens
  misc_feature (214)..(214): n is a, c, g, or t
ccacgacgtcgctgagagacagaggcagcgtgttggagctggctggtgcggtggtcagcgcgatgcccaaggccaagggcaaaacccggaggcagaagttggttacagtgtcaacgcgaaagcgtccgtgaaccggaatgctcgacggaaggtagcgccgtggatcgaatgctcccacatccgacatgcctgggaccacgctaaatcaggtacnggcgagaaccgtggccggagatggggttggatgtggaggcccgaacaggggggtgcacacatccggtaagagcaaaggtgaaggcccatggaggtggacgatagaggagagggcttaaagagcttgttcgggaagccacttgatgtgctgaatgaacgtggaggctagaagacagcattcgcgagataagaaggggaagatacatctgtcttggggatcgtcaattgaatatgtacgctacatggtagagaaccaccggggaggactataagagtgggcaagatttcctcgatacttgcaagaagaggaagatggaggtggagtgactggttgacactcaacagtgtggccctaggctgaggcgtccccgggaccagtgaaggctggagccaggggtgtaagggcaaggaggtgcttgtgtggttccacgaggagctggcaggtcccatgggaatcagacaggttacacacaacaccggtgcatagttccacggttctggggaagaagtgtcctcagaggtttcaatgatattcatctggggtcaggagaggcgaacgcggttgcggtggtggaggtatttgtgtgtcctatagcaattttaaggaagacaaagggggggctgagtacccggggccactagggatccggtggaaagggccaagaaggataaaggagagttaagagaggaaagtttggattaagggtttgggaaagagaacacagaaggaaatagggaagtggtggaggtttaatgcgtagataaaaaagagagtgagaatagcgtactttca

SEQ ID NO: 658506 - DNA, 247 bp, Homo sapiens
cccagatactggaggctgcagtgagctatgattgtacatgcacttcagcgctgggcaacaaagggaagccctgtctgaaaaaaaaaaaaaaaaaaaaaaaaaaattaaatcaaaattaaattatacacgcggcccccttcaaatgcaatcccgtgcccctttccttttctttctttttccctggtcgcctttcacttttgaacttactacatatagcgattaattacattcgtcactcttccttggc

SEQ ID NO: 658507 - DNA, 306 bp, Homo sapiens
actcaatctagtctggccctggtgactcacgcctttcggaggcagaggtgggagaatcgcttgagcccagaagtttgagaccagcctgggccacacgacaaagccccatttctacaaaaaaaaaatacaaaaaaaaagccagatgtggtggcatgcacctgtagtttaagctacttgggaggatgaagtgggaggactgcttgagccggggaggtggaggctggagtaaactgagatcgcgccacagaactccagtttgagcaacagatcgagaccctgcctgaaaataaatcaataaatacactc

SEQ ID NO: 658508 - DNA, 100 bp, Homo sapiens
tagtgttctagacggatcccttttcatagaggccacggaacctagaatcaggaagcacatggccacccacgatctaaagcagaaatccaggaaatcccat

SEQ ID NO: 658509 - DNA, 177 bp, Homo sapiens
cacattaatgccacatggccccgttcctcttcagtgagaacttcagttgaactagccagaaatcaggttgaggaagaaaacggggagccatggcctcgatgccctttctgtaccatttcattgtgctccccacactttaagccggattggctcccattgtcgggtacctgtatgctc

SEQ ID NO: 658510 - DNA, 131 bp, Homo sapiens
tgtctgtagcatatgagggttctgatttttccacgggtttgaagtggtatctcatggtggttttaatttgcatttccctaatgactaatgcaacctttcgtatgcttgttgtccatttgtatatctttgga

SEQ ID NO: 658511 - DNA, 119 bp, Homo sapiens
agaactaccaagtagaacaattaaagggttcaaatttggttggaaagaaaaaatcggccagtgggagtaggctcatgcccatgtaatctcaacactatggaaagctagagcgtaggagg

SEQ ID NO: 658512 - DNA, 443 bp, Homo sapiens
ctgctcaatagctaaagcgccgggaaagagggcatacggagtggtgtccatgtgcatcgggactggaatgggaccccctcccgtctttgaataccctgggaactgagtgaggtcccaggctggaggcgctacgcaaacagtcctgttgttttagcagcaaggcagtaaccccccaaaagcaaacccccatgggaaaactcagccctggtggtggtggcagtggacagatcaaggcccttcaactcatttggaaaatgtgacccctaataacatggtataggagtgggtggggtgttgagccacccatcagcccctctttagttgtgcaaaataaaaccagcctgggtcccccaggccccaaggccatggttaatttttaaggcaaggcaaatccatggatgaaaagtgcaatgggcatagtaaaagggcatgaatttttttta

SEQ ID NO: 658513 - DNA, 486 bp, Homo sapiens
catggctagaggtgggaggatacttgagcccaggaggcagaggttgcagtgaaccaagactgcaccactgcactccagcctgggcaacagagcaagactctgtctcaaaaaaaaaaaaaataccataggagggcaaggtcaggaagagactacttaggcgattaaataatgatccttaccacaaggccgggcatatagtaatctccccttaacaggtggctaccaggcggggcgtggtggctcacacttgtaatcctagcacttggggaggcaaggcagcggggatcacagggtcaggagatcaagaccaccctggttaacgcagtgaaccccggtctctactaaaattacaaaattagccaggcggggtgggcacgcgcttgtagtctcagctactcgggaggctgaggcagaagaatcgtttgaccccgggagccagaggttgcagtgagctgagatcatgtcatggccctccagccttgtcgg

SEQ ID NO: 658514 - DNA, 241 bp, Homo sapiens
  misc_feature (22)..(22): n is a, c, g, or t
  misc_feature (37)..(37): n is a, c, g, or t
  misc_feature (86)..(86): n is a, c, g, or t
  misc_feature (100)..(100): n is a, c, g, or t
gagcagcccccgcgccagtagngcgcggggaggcagncggcgcgctggggttccgccgcgccctcgcggcactcgcagaagccggnctcgttgcaccggncgagcacggagcctatctggttgcagatacactcaatgcagacgttctcatcatccagctctgccgagccgctgcgagacgagcccagccggcagtgctggcagagctgacctcgcgtgttgtgcttgcagctgacgcagg

SEQ ID NO: 658515 - DNA, 619 bp, Homo sapiens
ttactccagttaggatggctataatagaagagacaaaaataacaaatgctgacaaagacgtgaagaaaagggactttttttttgtcagaatctcactctccgtccaggctgaagtgcagtggtggtgtaacctggctccctctgcttctagggttcaaatagttctcctccctcagcctcctgagtagctggagaaaaaggaactcttatgcactgttggtaggaatgtaaattagagcagccagtatggagaacagtattgaaacacctcaagcaatcccactactgggaatttatccaaaggaaagaaaagcattatattgcagagacatctgcatccccatgtttattgcaacagtgttcacaatagccaagatatggaatcaacctaggtttccaacaacagatgagtggatttttaaaatacggtatatatacaccaaggaatgctatttagccataaaaaagaataaataaaaccctgtcattctcagcaacatggatggaactggaggatataatgttaagcaaaataagccaggaatagaactttaacaccacatgttctcactcacgcagaagctaaagaaagttgatctcatagaagtaagagtagaca

SEQ ID NO: 658516 - DNA, 111 bp, Homo sapiens
  misc_feature (33)..(33): n is a, c, g, or t
  misc_feature (36)..(36): n is a, c, g, or t
  misc_feature (106)..(106): n is a, c, g, or t
gatcgactatgagacagcaaaggggcctacctnctnatggagttagccaagagccaggacaagagtctcaagatttatgacggtgcctaccatgttctccacaagnagctt

SEQ ID NO: 658517 - DNA, 225 bp, Homo sapiens
tcttaataagcataaactattacatgcataaactattacagcataactattacagcataaactattacagcataaactattacagcataaactattacatgcataaactattacatgcataacctattacagcataaactattacagcataaactattacagcataaactattcccgcataaactattacatgacataaacttggaacacttctggacttccata

SEQ ID NO: 658518 - DNA, 958 bp, Homo sapiens
gcgtgcgtgttctgtcggtcccgataccgccgagtgacgagtgctatatgcgcgcccggcgatcgccggacctgttgcgaatgcgagagaatagcggagtacgggaaccttcggtcaggcgcgccagattggtgccggagacgcaggtatagatcatggaatgggaagactgaggcccgtagtgtttgaggccatccgaagtagtcacatcgtcaggcacaattgcgacgggagggaattgtggattgatgtgatcagtggattcgaggatcgagcaagaatatatgtgagtgtaggactaattatttatgggagcggtattgggttgcagagggaacaggggagattgtgatatgggatttggctctgagatgaaaggagtttggcagaagatggtggcgtcccatcgtctaggagggctacaggcaagccggcgaaggcatacaggctctatgtatagtcaaggcgagcgtgtgccaaggaatcatgcctgcaagcatggggggagccttccgtgggcgctgacgattccttgcagaagcatgtcagtgcgggatgggatgtcacggatttgtagcaaggaccaccggtgattgtgaatcctgcgtggagcatgcgggggagaactgatgcctctatgcggaagaatggtggtctgaaagcgtatctgggatgcccaacaggttttccagggagaaaggtcttgaagcccagggcggttggttagtggagccaagtgagacatgtccaggaagcagtctggagccaaagaaagaagcgacgtagcgtcaggacacgtttactaagggccctcagaactgtggttggagcaattggagagagtgaggccccaccaaggttaagaccgccaaaaaaacctcgggggttcccacgggctattcgaggagggtgggccctttacccagccggtctggagaaccccggggatcacctggac

SEQ ID NO: 658519 - DNA, 257 bp, Homo sapiens
tgttttcaatccggattggcgttcatgtagcgcgagtagttctcgacgtagtcggtgaggttctcctccagcatcaggcggaactcctcaaggaaatagtccaccgcctgctgcttggacgctgccagttcctcggcattacggcagccgcaggcgctgacccaggcgctgaagcgcgcgttggcatacatcagcgaggcgctggccttgccgcggctgctgtcggcgatgtgggagttggtcaactcgatgatggc

SEQ ID NO: 658520 - DNA, 189 bp, Homo sapiens
atctctttttttggaatggtacacaaacatttcctacataatccaacatacaacagagaaagggtacatctttttctttcaattggcatacaagggaaaaccaagttatatattatattttacaaagtttacctaataagacactagagcaaatggacagtttaagtctataggtgagaaattatctag

SEQ ID NO: 658521 - DNA, 205 bp, Homo sapiens
ggctgacctagaggatccaagctccaacaagatagctgcagccccagagagagctctgacgtacaagtacaggccagctcaggcccaactcgccagctctcccgctctgatctgcactctaacactcgactctgctgctcatgggaagaacagaattgctccttgcatgcaacttaattcaataaaactgtcttgttgggagctt

SEQ ID NO: 658522 - DNA, 131 bp, Homo sapiens
atagtaggcttgtatccaagattctcagcagatagaaagggatatttctacagatacgagatacatggcaataaagcaggataaaggaaagatcaaaacaaggctgtgaaccaaactataaatccaagagc

SEQ ID NO: 658523 - DNA, 93 bp, Homo sapiens
aaagagcagcccagcccaaaggggggctttggtggccttttttggggctttgttatatgttcctaaccccccataaaagcaatgttggctcca

SEQ ID NO: 658524 - DNA, 333 bp, Homo sapiens
agccccaaaaggccctggcagggttagctgtcttcaagatgagcaagacccagccgggcgcggtggctcaagcctgtaatcctagaacttggggaggccgaggcaggcggatcacctgaggttgggagttcgagaccagcctgaccagcatggagaaaccccatctctactaaaaatacaaaataagccaggcgtggtggtgcatgcctgtaatcctagctactcaggaggctgaggcaggagaatcgcttgaaccctggaggcggaggttgtggtgagctgagatcgcaccattgcactccagcctgggcaataacagcgaaactctgtctc

SEQ ID NO: 658525 - DNA, 995 bp, Homo sapiens
gtcttgtcttgtttagggtcttatccgcgtggcattgagggcgccgtgactgctgcttatggacgatttggtattggagtgggcggtttctatggtggacccacatgaactcaggtgtgggatcatccccgcgaactgagcctgaggtggcctcgagacagtcgacatttgtcaggatgcatcctcagaccaataagaagggcgtgaagatcccacatccccaaagagggtggagagactatctcccagttggacagcggtatgcctgggtactcgtttctattgctttcacaagtcccttttgcaagatcagttctgatcctagtaaactgtgactccagaacgaatggcttttctacccctcttgtgatctgtatttagcaaaatccgatgacatcgaactgaagagcttggactggattatcgatttaagaatatactcaaacgatgttaataaatagcagagggattttggcaatgaaaagcatgattcgttatgggtatagaagtgtttcatcacgtcttggatcatcaacgtgtctcttgaatgactgagtacatagtattttaatattttcatggaccacgcatgcttgaatgggggtatgttctgaaaagaactgaattgaacgaattgtggataaaatgtgtagttggtggttcaactggtacccaatgtgtgtataggagcgactggctaaccacagtttgcagactattgtctgactcgatgtaaaacggcgtgacggcccgcattgagtgcctgttgacttgcttccagtaaggtggccgggggaccttggctaggcaggtgataccactatttttgaacgaacttagaaaagggcctaatcataccatagattgggacattcccgggtgggccggggtcaagcaggagtttgcaaaagcccagcgagtcttcattcgaccggggtacacacttaggctggtgtaacggacgcaaggggatcctcaacacgaccacacgggct

SEQ ID NO: 658526 - DNA, 1217 bp, Homo sapiens
atgtgctcttgcccgccccctgttattttggtgcccccaaagtttttttgggagaagagtttttgttggtgttgaaattattttaaataggggagccactctttcctccgggccatatgtgtttactgaccggagacagttctcgactgttatttttccccgggggacactaattggcgcacacagagttttttgtgtgagcccggacgcgttttcctccaggggggacacagtctgcttgtgtgccaccagggcctttttgtttgggagcttctccccacccccacgattttctgttgtggaccacactctcccgggatggcgagtgtgtttcccgggggcccacgtgttctgctttccctcgtgtcacagcactggcgcgtgtgtgtgcccccctttttttccccccctcaggctatgtgggcgcccacgatggtgggtttccctcggggccgcgtttgggttcacgggagtaacccctctcggagatgtgtgataggcccacccctcaccccgtctcctccccacgggattttgtggccccaaggttctgtggaaggcccccacgcggttttttgcccacattttgtgcccttttgagaagagaagagagttttttggagaagagagttccacaggggtcacacatttgtgagcccctattctaacacacagtgtttcgcccctttccacgtcccttgagatgggacacacgagggctatacacgcacaggcgcgccgcgccgagaagaattggtttatacctccccgtgatttcccactctatactctttcgagacccccacgtaatcttttgagaatcttgagagtttgtagagggctctataagaaagtctcgcgaattttccttcccgggccttggtggcgtacacaggcccttatattcccacccacctcttttttttataaggcacggcggagtcaccctcgaaggtaccaggagagtttataagaaccccgcctgagccacgcacatggaggaaacctctgtttttatcttaaaaatatccacaaatttatgcccggcacatggtggcacacacacgccctgtatgtcccacgctatactcgggagaggctgaaggccaggagagaaatcaaccttgaacccgggagaggacacaaggttcccgtgagactgagatcacgtccttgcactccctcctgagcccaccagggccaaactccctttccta

SEQ ID NO: 658527 - DNA, 1507 bp, Homo sapiens
  misc_feature (219)..(219): n is a, c, g, or t
gtgacgcgctggcatccatattgtgcaataatactttctatcttactaccagagcaaccttagtccaagccatttactctctacatgcacatcgtattaagtgtccgactacgcagaatttggatggacgcttggccagcgacaataacattagttaggtgatcagcgaatggtgcaatcgtatgcaaccgctgtatatctgtatcgccaaggcactanatcaatatgctgatgggatctatacttctccttcatatcggtatctgacactaccttgaataattcacgcggtaagggaaatattagagcgtattttgtcgcaagtgaatgtatccccccatatagcatataatcaggcgctcgccgcatagagtcatagtacggcatgtattactcctcagtagatcaggagctacaaatgaagcgactagctcgcatgcttcttattagttatgccgacatacattcattctctgtaagctaccattgtatatcatcgtgtgcctagatgcgtgactgacagatagagacccgtgaccccggacgctccttgggagttagcattgaggggcttgagagctttcgtttcctaaactcgacgtgaccacatctgctatgacttgtgtgcaaaccttatcgtacatctactgtctcagctcggcatcagacgcatagcctcacttactaaatacctttacacgcactattagtggaactagtcacctgtactaatctggcgtcttcagtggtctccgcagttcagttgatgcggataccaaagtactctcctttactgggtggaggcacacttgacagcagtactttggacaataccactttaaagttccagggactgaattggacttgtttacatcacatattttctaactcccgttctggccgcattttaaagttcaccgggggcgcttaattaccagaaggtacagggccccaccatccaatattctgaatgacgttaggatattgccccggtttccccattaggcgtttcgaaagaaagaccaggattcatttaaaccctttacttaacttattttccctatcatacccacttaagtttcatcttaggaacctctttcccttggcaaatatccgcgcgttaatttagggggaacctcaaaagtccatgaattccgaggccgccttatttaggaaaacgaaacctttcagtttgtttatcgcagagttacaccgtttaccagatggaaaagtggacaagtttatcctccccattttccgggcagtttcacagaccatagccgtatattatggaatgtagtaaaggccagcacggggtagaaaccatcggaacgatgaagaaagtaaagatacatagcgcccccagggtaagtacgcaataaccacacagatagctcctcacagacgcagagagttacagttattctacaacacacactctgactagtcgttatagcaccacaaacaagttccacaggggagcaaagtgtacaccacaacacacggg

SEQ ID NO: 658528 - DNA, 321 bp, Homo sapiens
tcgcctatgagatccggacagtgacctcacgaacaaaaagaaatgatcctcttcactccaaagtgtgttcgtgagactcatgactccatgccctcacatggccacatcctcttacaggagacagcttcactaccgctccagccccggtactgcggtctgtggtaatttacatgggcaatgggctgcagcatctagtcagtttcagcatccgcatgcaattttgaggcagggttagtcaataaaccaataaatccaatctatgcagtcatttacacaatatccattgcagcagttgtgccccacttcgcattctccgcacgg

SEQ ID NO: 658529 - DNA, 437 bp, Homo sapiens
atatatacactctgtatatccatgtgccagcagaaagcttgtatcgatgggaaatctaactacctataaaaagtgatcagagtacggataccacctacttaaagaatgcagaggactctgtgtctatcatgcaggtctatatgctgaatgtgtgttgctgtattcttctatcatagtgctttacctctgctcaactaatccaggtatcagccttcgttctgcggtagaatgagacacacggtaggcatatgcttagttgtttactggttagatctatctcactactgtaaaaaaagctaacgcttgtcacagacgccaagcatactagtgacaagcacagcacacaccaccacagattcaaacaacagtaatgtacagactatatttatacagaagtaggaatagatccaacagtcccaggcaatcactttaatcag

SEQ ID NO: 658530 - DNA, 159 bp, Homo sapiens
agtcgacggcgagagataggctatctcccactccacctactccccatatatcccgtttgacagcttagcctctagtgccctctcactttggcatccaggcacatcagattctcctccactggagccctagcttccttgtccctcttccccataaactct

SEQ ID NO: 658531 - DNA, 196 bp, Homo sapiens
cctccgccatccctggtatttaaattatttaaggtttttgggaagggctggggcaaagcatttgtggggtggggttttccccttgctgctattgtaagggtggggactggtttttttttgccccagccagtttgggggtggttcccccattttgaattgtttatcccttttttataattaaagttttaaaacatca

SEQ ID NO: 658532 - DNA, 1651 bp, Homo sapiens
  misc_feature (1154)..(1154): n is a, c, g, or t
gtccagttccggcgttcgggtttcgtctgcacggtcggaatggaatgaagagatcgcacgcgctggtcatcgacaatgtgctaccgggcatgtgcatagagctgggttgtcgctggggatcgaacggctccactcgcagccagtggtgtgtcctttcgcagtgcggtcgtggcggctcctcatgactagcagggtgcggtcactggtggggcatggtgcgcagacagggactgccttacggtggagctgacgacggtggccagagacagaggcgtgtgcatcgcatgacccgtgtagagtgaccgcctatttggaggccgacttggacaatcgttccgagcgcagatcctgggggaaccgacgagtaggtacgtagatgaatcattggccaacccaacaaccgtgtcctaacagatggacgcttgcagacggtggcaccctggaaggactggacgcgcgatgggcactagcgtggaactcagagaggcctcgcgcgcttgtagaaccctcataggggcccacaacaaggaagaacgacaatgaactgatcgtacaaagactatcagtcgtgtttgaggaacccttgtccaaaacaaacgacaccgggacactacttgtaagcaggttgggcccgatacccagagggtccagactgtccttgatgcgcgcatcttaaccgggccattccttgaggtgacggcaacccaccgtgggccagtgtggtaacactagggacaacatccatgggctacgcaacagggacgtgcttcaatcgtacgaaacaagggggggtggacccgcgagatccttaaacctggacggggggacctgaactggcgcccccgtacacacgccctcacatcagcccctaattccgcctggacagaataaccttggggaccgcgtgggggagtatggagacacgcggggaccccttgaaacccgtagacagcttaaggccctcccacctgggacgatggtagattacgctcacaccgtgggaagtgccggcacgggcattaaaccgagcagcgttatccacccgcgaaccaccgaagcgggggcctcccggaatagcgggggggacaaacgaactaccgaatgggccgggccgggaaacacttctgcacaggcggactgcgaaacgccctcgngtcgggcctcgagacaggaactaggccacccctagggggagacactgtccggaagtggcgagcggacaacacgtgggggcgccacactcggggccaggcacaaattgcgcgttgcccatatccttctcgacactctgggggacacgaaaaaacaaggcctaacaggaaagacagtggggctcccgcgaattgtgtcacacagcggtcagaatcaacccgagagtgggggccaccatgcaacgccgggggacacgggccagcgtaccaggaaaacgacggacaatgatacccgatacccacgacagtcaacctgcgggcatcgggaccatccggtccacgcacacaccccagggaggaacccacacgtcaagacgcacagcacagacaaagttgtgacacagctgtggagaaccaatgcgcacgacaaccaagcagtgacgcagcacacacgcaagcaccatcacatgagtggtgacgacaacaaggtgaaccactga

SEQ ID NO: 658533 - DNA, 648 bp, Homo sapiens
agcgctgcggagccttgcagtacgcgcatcccgaggccgtgggcgtgcgccatgggggtgccgatgtacgcgcccacgaccgtgtgctgcaaacgccgctcagccgagaccctgtttaagatctgaagtgcacatccttgggcgcggcggtgacctggcgtgccttaggtgcgccagtcgtcccgaagacatggtcaatttcatcaatcatgtgtccattcaaccaaagggaggacgagtagccacttacttggacccttcgcttggataagtgaaagccctagcctttgaatcttcatcccacgcctcttaactatttacatgtaccttcgcgaacagtcttgtgtctcgcctctatacaagctcactctagtaacccgatcgtgccaccaaggctgggcacatacctagaaactaacaactcaaagtgactgttgaaactagctgtggcacagtgatgtagccaagtcctttgcatccagaccacactgctgcaacaactcgtatgtcccaataccgtgcgctcaccttgcactgacaccttcttgtgttgcacgttcattgtccgcacatgaatcatacactttcctttgaccaacaccacaaatagtatggaaacaactacgtgacgtactacacttaatctat

SEQ ID NO: 658534 - DNA, 550 bp, Homo sapiens
  misc_feature (542)..(542): n is a, c, g, or t
ccgagcttaagggctaccccctacttagagagatgaacattgctgattttacccactacaggtcttggacttaacgtgtgcggacgacgtagggccctggcaacactcccatacatgcccaggcacacacacacagagactttcctttcacaaaagaagtttaacttgggacaagctaataacaaacttactattagaaacttcagaatgctgttatgtaggtttcagcatatgcagaattttgtcttttgatgattagtatttttattttgaagtccgcactgaggagagagagtgagaaacatgaagtcatttcactctgtggggactctaaagagcttctttccaccctcaggatggtgggtccagcgtgtgttgcttaagggtgggaatattttctgggaagtgcatcttcaggcaacttcatagctgagcaaacatcatagaggtacctacacagacctggatggtatagcccactatacacctgggctgtgaaggatcgtctcttgctcctgggctataaaacccgaacagcatgntactgtac

SEQ ID NO: 658535 - DNA, 181 bp, Homo sapiens
gtcttttaaaaaaaccttttatttttcggtggccaagattaacttttaagtttattagaagaggatcctgattatagtgaataaaaaaatatagatgagagaattccaatattaggttataccaagttagtttttttaaaatccttgtccccccaaattttcagggctttggagttttcca

SEQ ID NO: 658536 - DNA, 228 bp, Homo sapiens
  misc_feature (55)..(55): n is a, c, g, or t
  misc_feature (200)..(201): n is a, c, g, or t
atgccccgtgatgttatcgcccacacctaccaaccttacaaatgttttctcaggncagtctcccaaagcaacagaaataagagcaaaaataaaccaatgggacctaatcaaactgacaagctttcgcacagcaaaggaaaccaaaaagaaaacaaaagacacttatggaatgggagaaaatagtttcaagagcactgaannggctaatccgtgttggggataacatca

SEQ ID NO: 658537 - DNA, 234 bp, Homo sapiens
ggttcaggttagaacacacaagttcgggacctttgtaaaacagccgcaacaggcgcgtatgggacaaatttataaaaagaccactaaaaagaaagattaaatggcttcttgccagtttgagcctaatctgattcttacagttttaccttcttgaaccaatgtaaaagtttttttaatgttaaatgattaaattctcagtgaggctaaaaaaaaaaatctttttttttggcctca

SEQ ID NO: 658538 - DNA, 172 bp, Homo sapiens
tctattccgtcataaaaagcactcatactttatgcatccccgcagctacacacagacggacacacagcacacgcataacacagcagacacacgagcacagcacacacacgagcatacagcacacacacaaacgcacagcacacacagcacacagatgagcacacagcacaca

SEQ ID NO: 658539 - DNA, 140 bp, Homo sapiens
tacgggcttgtaccttcgaggatgtggccgtggagttcaccaggaggagtgggcgttgctggaccctgtcccaaagggacactgttacaagggatgtgtatgcttggaggacttcagggaccctcggcctcactaggggg

SEQ ID NO: 658540 - DNA, 911 bp, Homo sapiens
taataataaaacacagtaaacattctatttctctatggtctacagcatgccagtaaataatatgtaggaccaataataaattatcaattacacattttgtgttaactaattaaaagcatagtgtataagtgagtacactctaattaacttgcttctgttgcactttagttttctacctgcatatggactgcatttttttttttttaacacagtcagtatgtaaaaggggatgtatccttctgcggcggcttattaaataaagaaagcctgagtgtccttagatggggtatcctgagaatgagggtcttagccaacagtccttttcggaacatgaaaggtgcttggtttttcaattcatatccatcttttcagggtaacattggttcttcctgagttctcgtaaggctcattttacatgcggctactagctttttttttcaaacaaacgtaaaacgtggcggcttctaaaatattaatggcctatattcgacaagtgccattgcgccgtaagtagactatgtattcctataaaggatgtcggatattctacatagggcaccccgaccacccatatgccgacaggttgaagcctataaacctgtatttaagctggcctaaatccctgtgattcacaaactggctggctcataaaatatctctcatttattttgcgccaacgacggagatctctaccccgtggtaaacaacatattgcctcagcgtaagtagtctctaacaaatcggacggtcactgacacaacacctgactcagtcacaagattcgtgggcaaccgccggcgtaacacattgtgacacacatacgcaacgcaagccacaccgtatcatacaaactaaatggcgcaccactatgagcgagacctcaatgtcagagcgtagccacatgcagcata

SEQ ID NO: 658541 - DNA, 915 bp, Homo sapiens
  misc_feature (1)..(1): n is a, c, g, or t
nacagcaacaaagcggagggtgcgacagcgtgttgctggcagtgcgtcgccaccgcagtgttctgtcatgttgtggaccgcgttttgggcacgggtcctacgagttttcgccagacgtgagagtgtgccgccgcacggatgcgcgtttctagagactggaccctccagcaaactcccgcgtcctttaagactgtgcgcgattttttcctccttgtggcatcttgaggccccttcgtgggttgtcttggagagctctccggctgtgcccgcttagaggagctccccatattcgcggctttccactgtttatcggcgaacacgggccggtttgttgtgtccataccccggcagagttatgatagtggcccgtgtgacccgggcgctttctcttaggagttcctgccccccgcggtttctcccgcggatccaccctcgcgggggtcctgttgcccccaatgctatgaaggtgttgtccccccgcagccttctgctgcaggactttattgggccctgccatgatgtcgcccttcagtccttcttgttggtggtcttattgcccgctcgccgccgcttgtttttgattcctctcggtctttttgtgatggggttaaccgctaaacatatgtttcgccaaaaatgggagaggttttctttttatgataaccccctcggaaatgcgtgaacaaacttgggttgtaaaatctagaactgggcgctaaacaatcaagtgaaaatgggcgctagagttatgagggctgtattacaaaagtgaaacctcggtcccctaaatgtggggggccaccacccctctaggggtcaaaccccaatcttgtcccagttcttcttccgcttgatgtttttcaaaaacagggcttcccccccttttttttaaaaaaccttttcaaaaccaaaaca

SEQ ID NO: 658542 - DNA, 474 bp, Homo sapiens
  misc_feature (121)..(121): n is a, c, g, or t
aggatcccgctgctccctcttcatttgtacagctccacaaacagctctctccaaagttcataaccacctgcatattccagaatacgaaggacacttccccattcttatctcacttaatctntctgtgcacaacccttgactgcatccttcttgagggtctctttcctcagcttacatgttctcacactcctctagttttcctcctccctctctgccaactgagatgaagtcttctttgatgctgttcttcttgtgctcaaaatttacatgctaatattattcagggtcccaggattattctttctcactcttctcagggtgatctcatccactctaatggttaaaatacatgctgatgtttcctttactcagggataccactagtgaatacattcctttcctcttggcttctgtctcccctaaaagactgggagcttcctgaagagggagcagcagggatcctctagatcaccc

SEQ ID NO: 658543 - DNA, 440 bp, Homo sapiens
  misc_feature (440)..(440): n is a, c, g, or t
ccaggataggtatgacgagcttcatacacaggtaggtctactaatttgaggcatggacacggtcactctgacgatcctgacgcccatcaggatgtaactacagttgtcagtctgtccttgaggttgacatgaccaggctggactggccctttcttaacagtgagagtgcatattcgtggaggcagacgtaagataaactggctgctccatgttcggtgatgcgagcattcatcttatgcttttactcatctttatttccttgttgatttacactttcttcgcagataagatgctgtgttacactaaaaagttccagctactgcaatagtttaaaagcaccaggttttgcgtattgaactttgaaagtctttttacattacaagcaagttctcttgtagaatcagccagctaaaggcgtctaatttttgcccttgaggttn

SEQ ID NO: 658544 - DNA, 308 bp, Homo sapiens
  misc_feature (117)..(117): n is a, c, g, or t
acgggtggaggggcggtgaggtccatcgccggggaggcgaaaggccttggtggaactgtagctcagtattggcagcattccatactgcctcatcagaaatggggcaccagcagctanccatcggggagtggggacagaaaccagacctctgaccttagtagcaacatccaatggcacccagattgcagttcagcttggagaacagccatctctggaagaagccatgagaatagcgtctagaatccaacaaggagaaacgccagggttggatgattaattctgagaacaatggagcaataaagcagaag

SEQ ID NO: 658545 - DNA, 100 bp, Homo sapiens
ggtagcagaagcaggcggcggtccgggcgtccagtaggctgcagatgcatccaggctgcgggtatatacctactggcagtggcctgcctctcgcacagca

SEQ ID NO: 658546 - DNA, 298 bp, Homo sapiens
tttaaaaaaaaggggggcccaggggctcccccccctggggtggggggcaaaaaccaccccccaaagtttggggcccttggggcctggggtggtgtttcctttaaaacggctttgggccggggccctacttggtttttttggtttttagggccctcccgggtgggcccgggtcccccccccccctaagggggtttgggggaaaaccccccccccccccccttcctttttccccccctttgggggcccccccgggcgggtggttttagggccccccggttggtcattaacccccggtgga

SEQ ID NO: 658547 - DNA, 129 bp, Homo sapiens
cggcacagtatcttgttgcaagcaggcataggttcagcaaggcattcatggcatgcgagttgctttgcgttgcaatccatcactttgcttgggctaggtgtcccgcagctcgcaattcgtcaatccatg

SEQ ID NO: 658548 - DNA, 492 bp, Homo sapiens
  misc_feature (462)..(462): n is a, c, g, or t
tcctgcgtcccaacccggtccctgagagggcactgcgccctctccaccactgcgttccctcggctaagaatcccccgaaccccagccccgcgatcgcggcgcccacctgatggagtgcctgccctgaggatgtgtgtgctgctggtggtgtctgcgaatgccctgcagcccctggaacaccaggaccccagcctgagactggagcctggacccagccgcctcccgggcccttccaccgcagccatccgcacgggaggcctcgcgattgctcggaaccatcccgcaggagttcagctgatatttactagtgtggggcgagagattatgtgagagcgcatttaaggggtaaaatgttgtgactgctgccttgtatatatttattttctttcttggaactggcctcgccctcctcccactgacatgatggcccagtccaagccaatggctcgcactatgcgctgnacgccatcggcttggggatgctggtccttg

SEQ ID NO: 658549 - DNA, 142 bp, Homo sapiens
  misc_feature (47)..(47): n is a, c, g, or t
  misc_feature (93)..(93): n is a, c, g, or t
  misc_feature (102)..(102): n is a, c, g, or t
gttagtgcaccgtacttctctgattttctttcagctgcttcaagganatccatgtgttcaaaatgcttgctcgcagttagctccataccaaanggttgcttnacccaaatatctgagcagcaaattgagctgatccttctag

SEQ ID NO: 658550 - DNA, 166 bp, Homo sapiens
tagtggttgatatgacacgtgaaggtgtgatttatctcaggagctggaatcttagacaaagccttgtaatgcctatattgtgcgcttctaacgtctttaatggcagcacttaagacgagattagattggctcttctggatttgttcctcatttgtcacaggtgtct

SEQ ID NO: 658551 - DNA, 434 bp, Homo sapiens
ttttttttttctccaacagttagtttttaatacattcaggtaggttatacaaagagtgggtcccgaggccggggctggcggctggggcccggggaagtgacagcagcccggttgtagggttttcaaagatcaggcggggggacccacacctgggcctccaggcctaaggaggagggttacgtgcagtagcaccggggggtgtgatcccaaccaggacggggtctgccggggtgctccacacaccaccagggcctagcccgggttcggcccatggactctcccttaacttcctcggggcctgggggttctcctcggtaaaaggggggggagagaggggcattttcactttctcgcacattacggagcccacatcatgagccagacggtgggccaagcacaggtaagatgatgaagacggcaaaacaaggtctgga

SEQ ID NO: 658552 - DNA, 364 bp, Homo sapiens
  misc_feature (23)..(23): n is a, c, g, or t
  misc_feature (33)..(33): n is a, c, g, or t
  misc_feature (237)..(237): n is a, c, g, or t
  misc_feature (286)..(286): n is a, c, g, or t
atttagatgtatccatccttttnctattaagantacaaatgctgggctgggcacagtggctcacgcctgtaatcccaacaccttgggaggccaaggcaggcagatcacgacatcaggagatcgagaccatcctggctaacacggtgaaacctcgtctctactaaaaatacaaaaaaaattagtcggatgtggtggcaggtgcctgtagtcccagctactctggaggctgaggcaggngaatggcgtgaacccaggaggcggagcttgcagtgagcagagatcacgncactgcactccagcctggatgacagagcgagactccgcctcaaaaaaagagtacaaatgctccaacattattttttat

SEQ ID NO: 658553 - DNA, 995 bp, Homo sapiens
  misc_feature (285)..(285): n is a, c, g, or t
  misc_feature (339)..(339): n is a, c, g, or t
gtgcgaccactcgggggcgcgcggtgcgagtggcatggttcaagatgccgataggggtgactgagcgaagtgcgtggtctggaataatgcgggctcctcacctgttgccaacgtctgccgcgggtgcccaccgaagggtcgcgtagagatgcagatggagttcggaaggcatcacggggttcgaatatacgggagatcgcagcgggagattgcaggtgtgtgagttagacgcgccactgccgtgtgcggtgtccactaaggacaggctgtggctacttggtatgngaaaatgtgccgccaatggaaaggacagagaaggtgggagcgtcttcgtcgaancaactcatttcaggaaggaacactattttcttggttggcgcttgcttgagccttagtttgcatgaaggtataaatcagggcctcacataaattgctagtagtaggggctcttgttaggtttattctcaagggggtggagtgtccatagacaatagtgccaagggtcggccaaggaatgtgatggcttatacatgtatggtggggggccatggtgttggtgagatgattgagatgccagtgtatggtaaggtggtgaatttgatgatgactcggggatgatgtacctggtgcggtctacagctggtatatggtagaataatataccgtggtttagttagtacaaattctgacactgaaatgaaggtcaaatgtgcatattggattccaatcccacaccaatgataatagaacacctatttaggcgtgaaactcttgtgataaggacatggcgagagggggtgactgaatatgacggcgtactgagacggagacggttgtcgaaccagatggttttgcagacacgtagactcgtggacctagggggaaaggacagggggatgggaatgcatcgggggaaaggtatccgcgcgagaacgatgggtggttagagcatggtttatagagaaagagagacaagtgcggtagataggggagat

SEQ ID NO: 658554 - DNA, 483 bp, Homo sapiens
ccttaatatcacaccaccatgcttttgttactatctctaaacgtatgtctgcttcttctagagagtccacatctgacttatacccaataaaggtgacccttgcctatgattgcgctcctggctttcagctgtgatctcagctgcttcaatagcttcaattgttacctgtgcgaagatgaccttcaaaagggcatctgtgtgtctatctgtaccttgagcctaccactatcccctaactgggccaattgcaattttctgataactctgccacctggagatgttagctccatttcacattaaccaagtctcaggccacacccattcccactcctgtcccaaacttcacgtttgttacctgtagttctgctgaagatgccaccaagcatatgactgactaagatgtgcaatattagactactgtctctcccttatcccattgtccataccgcttttgcaaggactttagcatgcatctttttctat

SEQ ID NO: 658555 - DNA, 527 bp, Homo sapiens
  misc_feature (192)..(192): n is a, c, g, or t
  misc_feature (194)..(194): n is a, c, g, or t
  misc_feature (329)..(329): n is a, c, g, or t
  misc_feature (365)..(365): n is a, c, g, or t
  misc_feature (458)..(458): n is a, c, g, or t
ccgcccagcctcggcctcctgttttgttttctagaatgttacacatcgattaggtaatggctatcagtctcacttcatacactctggaacatgaaagactccatttctgattttttaaacccattttaacctgccttgcattcctatggccctggacaggtaagcaatctcatcctggctttactgggatcncngggcttggaggggctatgagtggtcgcagcagtggagggaagcctggctcccggtgccaaagagccccgtggcccccccaggcccaccagcaagaccctctgccctgttttagggctggggttgcaagacacgantacaaggacaatccaattgaatttcaaatttcaagntaaataaggaatcattttttaagtgtaagtctatcccatgcagtaatgttggacatactttgacctaaaaaatgattcatcattttttctggnaattcagattttaatgggatgttccgcagttttcttttgggttaactccgggaagcctgttgcagaata

SEQ ID NO: 658556 - DNA, 970 bp, Homo sapiens
  misc_feature (970)..(970): n is a, c, g, or t
tgacgcccccgactgaatggtgttatcctgcctggagtggtcacgacatgagtctactggacatggctcagacctggggtgagttccgggtggctgagagcagcacgatcaccaatgaagcagttgctgcgagtgccctggaggagggccgcgtgcgggaagatctttggctcgggctccgcttgccatgtctgcccatgtgcaccgaattcctgtactagacagactaggatatcactctccacatatcccgaccgatgtgtagatagatgtgtgccttgatgctgtatcctccgcttccagaaaggagctgatggagatccagtacgcgatatcaggatgtccctagctgagtggatgttcccggtgtgaatgcttgcaggctgtgctccagatccacctgaatccgtgagcatctcgttcacgcactacgtcaactcggctcttccctaacgcatattgactctagtctgaaatgtgcaagtggcagaatagtattaaatggcccagcgggactggtaggtctgaggctctctgggtgccccctatgtggtagctagcgcatcccgaatccgtgcaggtgctcgtcccagcgcagtcttgttgcgtcccacaagccccttcgtttgcggggttccggagtccagctccagttaacttgctgtgttcggctgcggtcagagtgactcgcagctgtgggcccccgatttccggcgatgctactccgttgcttcaagtgctcaagcactccccattgtgtttgcttcgcgcagttttgaacttttttatcttattacttccttgatcctttgtggccttgcaacatttttctaggaaaccatttaacattatttgcccagggaaggaaacatataactcggctacacataccacattcggaacagcccctcactaccaagacaaccatagggcgggggtgatgagcttcctacatatggtggcaccttcn

SEQ ID NO: 658557 - DNA, 132 bp, Homo sapiens
ctcgactcgcggtactggttggatctctagagtctgacaggctccagcttaacgatatttgcaggtcagcactggtgctcactgtgttgacggaacttgtacagggaggcatgcaccgcgaggggtgaatac

SEQ ID NO: 658558 - DNA, 550 bp, Homo sapiens
  misc_feature (26)..(26): n is a, c, g, or t
tctcttaatgcctcctgttttgtganccccccccttttacaacacgggaacaaccctcaaagttcctgggttggaaattgggaccccagaaaatgacctatagctttaaccttcctaatatttgtgttgattaatgccttgaaaattatatcctaataattccatagtcacctaaaaagaaaaatttgaagtgaaatatttgataagtagcttatccctcttaaagtttacagaccctcaggcccaggctgattcctcattagggcccaggcatgctggctcaggcctgtaatcctcagtgctttgggaagatctcttgaggtcaggagtttcagaccagcctgggcaacatagtgagagcctgtctttaaaaatacatatattaaaaattaggtgggcatgatggcgtacatctatagccctagcttcttgggaggctgaggcaggaggatcacttgagcctgggagtttgagtttacagtgagctatgatcacgccactgcaccactccagcctgggctacagtgaggccctgtgtctttaaaaaaaa

SEQ ID NO: 658559 - DNA, 121 bp, Homo sapiens
tcatcgagctcggtcccggctttcgggtggcgcatggggtggagagggtgatttgggggagaggacgccacacaggtgcaggaactcgcagcaggtgactgagagtggaaggcacaaggag

SEQ ID NO: 658560 - DNA, 3750 bp, Homo sapiens
aacgaatattatagcgcgatacctggtgtaatttcgtacgagggccgtcgttcgttgtagagcttggtgaactgtctccgccgagagcccggcgggaaccgcctccggtgtgtgctgctctccaacctcagcagcacctcccacgtcccggaggtggacccgggctccgcagaactgcagaaggtgttgcagggagacctggtgatgaacgtctaccgcgacggggcctggggggctttccgccacttcctgctggaggaggacaagcctgaggagccgacggcacatgcctttgtgagcaccctcacccggggggacctgtcctccatccgctgggtctgctcctcgctgcgccatgcccagcccacctgccctggcgcccagctctgcacggtctactacgcctccctcaacttccgcgacatcatgctggccactggcaagctgtcccctgatgccatcccagggaagtggacctcccaggacagcctgctaggtatggagttctcgggccgagacgccagcggcaagcgtgtgatgggactggtgcctgccaagggcctggccacctctgtcctgctgtcaccggacttcctctgggatgtgccttccaactggacgctggaggaggcggcctcggtgcctgtcgtctacagcacggcctactacgcgctggtggtgcgtgggcgggtgcgccccggggagacgctgctcatccactcgggctcgggcggcgtgggccaggccgccatcgccatcgccctcagtctgggctgccgcgtcttcaccaccgtggggtcggctgagaagcgggcgtacctccaggccaggttcccccagctcgacagcaccagcttcgccaactcccgggacacatccttcgagcagcatgtgctgtggcacacgggcgggaagggcgttgacctggtcttgaactccttggcggaagagaagctgcaggccagcgtgaggtgcttggctacgcacggtcgcttcctggaaattggcaaattcgacctttctcagaaccacccgctcggcatggctatcttcctgaagaacgtgacattccacggggtcctactggatgcgttcttcaacgagagcagtgctgactggcgggaggtgtgggcgcttgtgcaggccggcatccgggatggggtggtacggcccctcaagtgcacggtgttccatggggcccaggtggaggacgccttccgctacatggcccaagggaagcacattggcaaagtcgtcgtgcaggtgcttgcggaggagccggaggcagtgctgaagggggccaaacccaagctgatgtcggccatctccaagaccttctgcccggcccacaagagctacatcatcgctggtggtctgggtggcttcggcctggagttggcgcagtggctgatacagcgtggggtgcagaagctcgtgttgacttctcgctccgggatccggacaggctaccaggccaagcaggtccgccggtggaggcgccagggcgtacaggtgcaggtgtccaccagcaacatcagctcactggagggggcccggggcctcattgccgaggcggcgcagcttgggcccgtgggcggcgtcttcaacctggccgtggtcttgagagatggcttgctggagaaccagaccccagagttcttccaggacgtctgcaagcccaagtacagcggcaccctgaacctggacagggtgacccgagaggcgtgccctgagctggactactttgtggtcttctcctctgtgagctgcgggcgtggcaatgcgggacagagcaactacggctttgccaattccgccatggagcgtatctgtgagaaacgccggcacgaaggcctcccaggcctggccgtgcagtggggcgccatcggcgacgtgggcattttggtggagacgatgagcaccaacgacacgatcgtcagtggcacgctgccccagcgcatggcgtcctgcctggaggtgctggacctcttcctgaaccagccccacatggtcctgagcagctttgtgctggctgagaaggctgcggcctatagggacagggacagccagcgggacctggtggaggccgtggcacacatcctgggcatccgcgacttggctgctgtcaacctggacagctcactggcggacctgggcctggactcgctcatgagcgtggaggtgcgccagacgctggagcgtgagctcaacctggtgctgtccgtgcgcgaggtgcggcaactcacgctccggaaactgcaggagctgtcctcaaaggcggatgaggccagcgagctggcatgccccacgcccaaggaggatggtctggcccagcagcagactcagctgaacctgcgctccctgctggtgaacccggagggccccaccctgatgcggctcaactccgtgcagagctcggagcggcccctgttcctggtgcacccaatcgagggctccaccaccgtgttccacagcctggcctcccggctcagcatccccacctatggcctgcagtgcacccgagctgcgccccttgacagcatccacagcctggctgcctactacatcgactgcatcaggcaggtgcagcccgagggcccctaccgcgtggccggctactcctacggggcctgcgtggcctttgaaatgtgctcccagctgcaggcccagcagagcccagcccccacccacaacagcctcttcctgttcgacggctcgcccacctacgtactggcctacacccagagctaccgggcaaagctgaccccaggctgtgaggctgaggctgagacggaggccatatgcttcttcgtgcagcagttcacggacatggagcacaacagggtgctggaggcgctgctgccgctgaagggcctagaggagcgtgtggcagccgccgtggacctgatcatcaagagccaccagggcctggaccgccaggagctgagctttgcggcccggtccttctactacaagctgcgtgccgctgagcagtacacacccaaggccaagtaccatggcaacgtgatgctactgcgcgccaagacgggtggcgcctacggcgaggacctgggcgcggactacaacctctcccaggtatgcgacgggaaagtatccgtccacgtcatcgagggtgaccaccgcacgctgctggagggcagcggcctggagtccatcatcagcatcatccacagctccctggctgagccacgcgtgagcgtgcgggagggctaggcccgtgcccccgcctgccaccggaggtcactccaccatccccaccccaccccaccccacccccgccatgcaacgggattgaagggtcctgccggtgggaccctgtccggcccagtgccactgccccccgaggctgctagatgtaggtgttaggcatgtcccacccacccgccgcctcccacggcacctcggggacaccagagctgccgacttggagactcctggtctgtgaagagccggtggtgcccgtgcccgcaggaactgggctgggcctcgtgcgcccgtggggtctgcgcttggtctttctgtgcttggatttgcatatttattgcattgctggtagagacccccaggcctgtccaccctgccaagactcctcaggcagcgtgtgggtcccgcactctgcccccatttccccatttccccgtggggtgctgcccttatgcccggcgccgggcaccaactccatgtttggtgtttgtctgtgtttgtttttcaagaaatgattcaaattgc

SEQ ID NO: 658561 - DNA, 149 bp, Homo sapiens
ctccgtatcactcccaattaatctttccattttcgtctgcgtttagtaaatagcgttaactaggctttcaaatgacgccacttctccctgcgtcatggattcaaggtcttataatcaccttaggtaaactctctattttcaacagcatc

SEQ ID NO: 658562 - DNA, 7434 bp, Homo sapiens
  misc_feature (7341)..(7341): n is a, c, g, or t
  misc_feature (7343)..(7343): n is a, c, g, or t
  misc_feature (7351)..(7351): n is a, c, g, or t
atggaggaggtggtgattgccggcatgttcgggaagctgccagagtcggagaacttgcaggagttctgggacaacctcatcggcggtgtggacatggtcacggacgatgaccgtcgctggaaggctgggctctacggcctgccccggcggtccggcaagctgaaggacctgtctaggtttgatgcctccttcttcggagtccaccccaagcaggcacacacgatggaccctcagctgcggctgctgctggaagctacctatgaagccatcgtggacggaggcatcaacccagattcactccgaggaacacacactggcgtctgggtgggcgtgagcggctctgagacctcggaggccctgagccgagaccccgagacactcgtgggctacagcatggtgggctgccagcgagcgatgatggccaaccggctctccttcttcttcgacttcagagggcccagcatcgcactggacacagcctgctcctccagcctgatggccctgcagaacgcctaccaggccatccacagcgggcagtgccctgccgccatcgtggggggcatcaacgtcctgctgaagcccaacacctccgtgcagttcttgaggctggggatgctcagccccgagggcacctgcaaggccttcgacacagcggggaatgggtactgccgctcggagggtgtggtggctgtcctgctgaccaagaagtccctggcccggaaggtctacaccaccatcctgaacaaaggcaccaatacagatggcttcaaggagcaaggcgtgaccttccctcaggatatccaggagcagcctatccgctcgttgtaccagtcggccggagtggcccctgagtcatttgaatacatcgaagcccacggaccaggcaccaaggtgggcgacccccaggagcgtaatggcatcacccgagccctgtgcgccacccgccaggagccgctgctcatcggctccaccaagtccaacatggggcacccggagccagcctcggggctcgacgccctggccaaggtgctgctgtccctggagcacgggctctgggcccccaacctgcacttccatagccccaaccctgagatcccagcgctgttggatgggcggctgcaggtggtggaccagcccctgcccgtccgtggcggcaacgtgggcatcaactcctttggcttcgggggctccaacatgcacatcatcctgaggcccaacacgcagtccgcccccgcacccgccccacatgccaccctgccccgtctgctgcgggccagcggacgcacccctgaggccgtgcagaagctgctggagcagggcctccggcacagccagggcctggctttcctgagcatgctgaacgacatcgcggctgtccccgccaccgccatgcccttccgtggctacgctgtgctgggtggtgagacgcggtggcccagagtgcagcaggtgcccgctggcgagcgcccgctctggttcatctgctctgggatgggcacacagtggcgtggaatggggctgagccttatgcgcctggaccgcttccgagattccatcctacgctccgatgaggctgtgaaccgattcggcctgaaggtgtcacagctgctgctgagcacagacgagagcacctttgatgacatcgtccattcgtttgtgagcctgactgccatccagataggcctcatagacctgctgagctgcatgggacctgaggcagatggcatcgtcggccactccctgggggagtggctgtcggtacgcgacggctgcctgtcccaggaggaggccgtcctcgctgcctactggaggggacagtgcatcaaagaagccccacttcccgccggcgccatggcagccgtgggcttgtcctgggaggagtgtaaacagcgctgcccccctgcggtggtgcccgcctgccacaactccaaggacacagtcaccatctcgggacctcaggccccggtgtttgagttcgtggagcagctgaggaaggagggtgtgtttgccaaggaggtgcggaccggcggtatggccttccactcctacttcatggaggccatcgcacccccactgctgcaggagctcaagaaggtgatccgggagccgaagccacgttcagcccgctggctcagcacctctatccccgaggcccagtggcacagcagcctggcacgcacgtcttccgccgagtacaatgtcaacaacctggtgagccctgtgctgttccaggaggccctgtggcacgtgcctgagcacgcggtggtgctggagatcgccccgaccccgtgccctcaggctgtcctgaagcgggtccgtaagccgagctgcaccatcatcccccgtatgaagaaggatcacagggacaacctggagttcttcctggccggcatcggcaggctgcacctctcaggcatcgacgccaaccccaatgccttgttcccacctgtggagtccccagctccccgaggaactcccctcatctccccactcatcaagtgggaccacagcctggcctgggacgcgccggccgccgaggacttccccaacggttcaggttccccctcagccaccatctacacatgcacaccaagctccgagtctcctgaccgctacctggtggaccacaccatcgacggtcgcgtcctcttccccgccactggctacctgagcatagtgtggaagacgctggcccgcgcctgggctgggctcgagcagctgcctgtggtgtttgaggatgtggtgcagcaccaggccaccatcctgcccaagactgggacagtgtccttggaggtacggctcctggaggccaccggtgccttcgaggtgtcagagaacggcaacctggtagtgagtgggaaggtgtaccagtgggatgaccctgaccccaggctcttcgaccacccggaaagtccccaccccaattccccacggagtcccctcttcctggcccaggcagaagtttacaaggagctgcgtctgcgtggctacgactacggccctcatttccagggcatcctggaggccagcctggaaggtgactcggggaggctgctgtggaaggataactgggtgagcttcatggacaccatgctgcagatgtccatcctgggctcggccaagcacggcctgtacctacccacccgtgtcaccgccatccacatcgaccctgccacccacaggcagaagctgtacacactgcaggacaaggcccaagtggctgacgtggtggtgagcaggtggccgagggtcacagtggcgggaggcgtccacatctccgggctccacactgagtcggccccgcggcggcagcaggagcagcaggtgcccatcctggagaagttttgcttcactccccacacggaggaggggtgcctgtctgagcgcgctgccctgcaggaggagctgcaactgtgcaaggggctggtgcaggcactgcagaccaaggtgacccagcaggggctgaagatggtggtgcccggactggatggggcccagatcccccgggacccctcacagcaggaactgccccggctgttgtcggctgcctgcaggcttcagctcaacgggaacctgcagctggagctggcgcaggtgctggcccaggagaggcccaagctgccagaggaccctctgctcagcggcctcctggactccccggcactcaaggcctgcctggacactgccgtggagaacatgcccagcctgaagatgaaggtggtggaggtgctggctggccacggtcacctgtattcccgcatcccaggcctgctcagcccccatcccctgctgcagctgagctacacggccaccgaccgccacccccaggccctggaggctgccaggccgagctgcagcagcacgacgttgcccagggccagtgggatcccgcagaccctgcccccagcgccctgggcagcgccgacctcctggtgtgcaactgtgctgtggctgccctcggggacccggcctcagctctcagcaacatggtggctgccctgagagaagggggctttctgctcctgcacacactgctccgggggcaccccctcggggacatcgtggccttcctcacctccactgagccgcagtatggccagggcatcctgagccaggacgcgtgggagagcctcttctccagggtgtcgctgcgcctggtgggcctgaagaagtccttctacggctccacgctcttcctgtgccgccggcccaccccgcaggacagccccatcttcctgccggtggacgataccagcttccgctgggtggagtctctgaagggcatcctggctgacgaagactcttcccggcctgtgtggctgaaggccatcaactgtgccacctcgggcgtggtgggcttggtgaactgtctccgccgagagcccggcgggaaccgcctccggtgtgtgctgctctccaacctcagcagcacctcccacgtcccggaggtggacccgggctccgcagaactgcagaaggtgttgcagggagacctggtgatgaacgtctaccgcgacggggcctggggggctttccgccacttcctgctggaggaggacaagcctgaggagccgacggcacatgcctttgtgagcaccctcacccggggggacctgtcctccatccgctgggtctgctcctcgctgcgccatgcccagcccacctgccctggcgcccagctctgcacggtctactacgcctccctcaacttccgcgacatcatgctggccactggcaagctgtcccctgatgccatcccagggaagtggacctcccaggacagcctgctaggtatggagttctcgggccgagacgccagcggcaagcgtgtgatgggactggtgcctgccaagggcctggccacctctgtcctgctgtcaccggacttcctctgggatgtgccttccaactggacgctggaggaggcggcctcggtgcctgtcgtctacagcacggcctactacgcgctggtggtgcgtgggcgggtgcgccccggggagacgctgctcatccactcgggctcgggcggcgtgggccaggccgccatcgccatcgccctcagtctgggctgccgcgtcttcaccaccgtggggtcggctgagaagcgggcgtacctccaggccaggttcccccagctcgacagcaccagcttcgccaactcccgggacacatccttcgagcagcatgtgctgtggcacacgggcgggaagggcgttgacctggtcttgaactccttggcggaagagaagctgcaggccagcgtgaggtgcttggctacgcacggtcgcttcctggaaattggcaaattcgacctttctcagaaccacccgctcggcatggctatcttcctgaagaacgtgacattccacggggtcctactggatgcgttcttcaacgagagcagtgctgactggcgggaggtgtgggcgcttgtgcaggccggcatccgggatggggtggtacggcccctcaagtgcacggtgttccatggggcccaggtggaggacgccttccgctacatggcccaagggaagcacattggcaaagtcgtcgtgcaggtgcttgcggaggagccggaggcagtgctgaagggggccaaacccaagctgatgtcggccatctccaagaccttctgcccggcccacaagagctacatcatcgctggtggtctgggtggcttcggcctggagttggcgcagtggctgatacagcgtggggtgcagaagctcgtgttgacttctcgctccgggatccggacaggctaccaggccaagcaggtccgccggtggaggcgccagggcgtacaggtgcaggtgtccaccagcaacatcagctcactggagggggcccggggcctcattgccgaggcggcgcagcttgggcccgtgggcggcgtcttcaacctggccgtggtcttgagagatggcttgctggagaaccagaccccagagttcttccaggacgtctgcaagcccaagtacagcggcaccctgaacctggacagggtgacccgagaggcgtgccctgagctggactactttgtggtcttctcctctgtgagctgcgggcgtggcaatgcgggacagagcaactacggctttgccaattccgccatggagcgtatctgtgagaaacgccggcacgaaggcctcccaggcctggccgtgcagtggggcgccatcggcgacgtgggcattttggtggagacgatgagcaccaacgacacgatcgtcagtggcacgctgccccagcgcatggcgtcctgcctggaggtgctggacctcttcctgaaccagccccacatggtcctgagcagctttgtgctggctgagaaggctgcggcctatagggacagggacagccagcgggacctggtggaggccgtggcacacatcctgggcatccgcgacttggctgctgtcaacctggacagctcactggcggacctgggcctggactcgctcatgagcgtggaggtgcgccagacgctggagcgtgagctcaacctggtgctgtccgtgcgcgaggtgcggcaactcacgctccggaaactgcaggagctgtcctcaaaggcggatgaggccagcgagctggcatgccccacgcccaaggaggatggtctggcccagcagcagactcagctgaacctgcgctccctgctggtgaacccggagggccccaccctgatgcggctcaactccgtgcagagctcggagcggcccctgttcctggtgcacccaatcgagggctccaccaccgtgttccacagcctggcctcccggctcagcatccccacctatggcctgcagtgcacccgagctgcgccccttgacagcatccacagcctggctgcctactacatcgactgcatcaggcaggtgcagcccgagggcccctaccgcgtggccggctactcctacggggcctgcgtggcctttgaaatgtgctcccagctgcaggcccagcagagcccagcccccacccacaacagcctcttcctgttcgacggctcgcccacctacgtactggcctacacccagagctaccgggcaaagctgaccccaggctgtgaggctgaggctgagacggaggccatatgcttcttcgtgcagcagttcacggacatggagcacaacagggtgctggaggcgctgctgccgctgaagggcctagaggagcgtgtggcagccgccgtggacctgatcatcaagagccaccagggcctggaccgccaggagctgagctttgcggcccggtccttctactacaagctgcgtgccgctgagcagtacacacccaaggccaagtaccatggcaacgtgatgctactgcgcgccaagncntgtggctnggggcccctctcggccggccttggctcagcccgctgagtggggggtcgtgggccacgtccccggaggaggctggtggccttta

SEQ ID NO: 658563 - DNA, 254 bp, Homo sapiens
  misc_feature (170)..(170): n is a, c, g, or t
gttccctatacacgagatacactggctgggtggtttataacctgtataacccaactaagtaatctttcccctctctttaacttttatgcaccaccctggcgcttctagatactatacactcacactaaataataataaaagaccacaccttccatctgatcattctgggncggaaactgaatacagttttgagccgatctttcgagaaagattcatatacacgagaaattaactagttctgttggtggtatcag

SEQ ID NO: 658564 - DNA, 7990 bp, Homo sapiens
atggaggaggtggtgattgccggcatgttcgggaagctgccagagtcggagaacttgcaggagttctgggacaacctcatcggcggtgtggacatggtcacggacgatgaccgtcgctggaaggctgggctctacggcctgccccggcggtccggcaagctgaaggacctgtctaggtttgatgcctccttcttcggagtccaccccaagcaggcacacacgatggaccctcagctgcggctgctgctggaagctacctatgaagccatcgtggacggaggcatcaacccagattcactccgaggaacacacactggcgtctgggtgggcgtgagcggctctgagacctcggaggccctgagccgagaccccgagacactcgtgggctacagcatggtgggctgccagcgagcgatgatggccaaccggctctccttcttcttcgacttcagagggcccagcatcgcactggacacagcctgctcctccagcctgatggccctgcagaacgcctaccaggccatccacagcgggcagtgccctgccgccatcgtggggggcatcaacgtcctgctgaagcccaacacctccgtgcagttcttgaggctggggatgctcagccccgagggcacctgcaaggccttcgacacagcggggaatgggtactgccgctcggagggtgtggtggctgtcctgctgaccaagaagtccctggcccggaaggtctacaccaccatcctgaacaaaggcaccaatacagatggcttcaaggagcaaggcgtgaccttccctcaggatatccaggagcagcctatccgctcgttgtaccagtcggccggagtggcccctgagtcatttgaatacatcgaagcccacggaccaggcaccaaggtgggcgacccccaggagcgtaatggcatcacccgagccctgtgcgccacccgccaggagccgctgctcatcggctccaccaagtccaacatggggcacccggagccagcctcggggctcgacgccctggccaaggtgctgctgtccctggagcacgggctctgggcccccaacctgcacttccatagccccaaccctgagatcccagcgctgttggatgggcggctgcaggtggtggaccagcccctgcccgtccgtggcggcaacgtgggcatcaactcctttggcttcgggggctccaacatgcacatcatcctgaggcccaacacgcagtccgcccccgcacccgccccacatgccaccctgccccgtctgctgcgggccagcggacgcacccctgaggccgtgcagaagctgctggagcagggcctccggcacagccagggcctggctttcctgagcatgctgaacgacatcgcggctgtccccgccaccgccatgcccttccgtggctacgctgtgctgggtggtgagacgcggtggcccagagtgcagcaggtgcccgctggcgagcgcccgctctggttcatctgctctgggatgggcacacagtggcgtggaatggggctgagccttatgcgcctggaccgcttccgagattccatcctacgctccgatgaggctgtgaaccgattcggcctgaaggtgtcacagctgctgctgagcacagacgagagcacctttgatgacatcgtccattcgtttgtgagcctgactgccatccagataggcctcatagacctgctgagctgcatgggacctgaggcagatggcatcgtcggccactccctgggggagtggctgtcggtacgcgacggctgcctgtcccaggaggaggccgtcctcgctgcctactggaggggacagtgcatcaaagaagccccacttcccgccggcgccatggcagccgtgggcttgtcctgggaggagtgtaaacagcgctgcccccctgcggtggtgcccgcctgccacaactccaaggacacagtcaccatctcgggacctcaggccccggtgtttgagttcgtggagcagctgaggaaggagggtgtgtttgccaaggaggtgcggaccggcggtatggccttccactcctacttcatggaggccatcgcacccccactgctgcaggagctcaagaaggtgatccgggagccgaagccacgttcagcccgctggctcagcacctctatccccgaggcccagtggcacagcagcctggcacgcacgtcttccgccgagtacaatgtcaacaacctggtgagccctgtgctgttccaggaggccctgtggcacgtgcctgagcacgcggtggtgctggagatcgccccgaccccgtgccctcaggctgtcctgaagcgggtccgtaagccgagctgcaccatcatcccccgtatgaagaaggatcacagggacaacctggagttcttcctggccggcatcggcaggctgcacctctcaggcatcgacgccaaccccaatgccttgttcccacctgtggagtccccagctccccgaggaactcccctcatctccccactcatcaagtgggaccacagcctggcctgggacgcgccggccgccgaggacttccccaacggttcaggttccccctcagccaccatctacacatgcacaccaagctccgagtctcctgaccgctacctggtggaccacaccatcgacggtcgcgtcctcttccccgccactggctacctgagcatagtgtggaagacgctggcccgcgcctgggctgggctcgagcagctgcctgtggtgtttgaggatgtggtgcagcaccaggccaccatcctgcccaagactgggacagtgtccttggaggtacggctcctggaggccaccggtgccttcgaggtgtcagagaacggcaacctggtagtgagtgggaaggtgtaccagtgggatgaccctgaccccaggctcttcgaccacccggaaagtccccaccccaattccccacggagtcccctcttcctggcccaggcagaagtttacaaggagctgcgtctgcgtggctacgactacggccctcatttccagggcatcctggaggccagcctggaaggtgactcggggaggctgctgtggaaggataactgggtgagcttcatggacaccatgctgcagatgtccatcctgggctcggccaagcacggcctgtacctacccacccgtgtcaccgccatccacatcgaccctgccacccacaggcagaagctgtacacactgcaggacaaggcccaagtggctgacgtggtggtgagcaggtggccgagggtcacagtggcgggaggcgtccacatctccgggctccacactgagtcggccccgcggcggcagcaggagcagcaggtgcccatcctggagaagttttgcttcactccccacacggaggaggggtgcctgtctgagcgcgctgccctgcaggaggagctgcaactgtgcaaggggctggtgcaggcactgcagaccaaggtgacccagcaggggctgaagatggtggtgcccggactggatggggcccagatcccccgggacccctcacagcaggaactgccccggctgttgtcggctgcctgcaggcttcagctcaacgggaacctgcagctggagctggcgcaggtgctggcccaggagaggcccaagctgccagaggaccctctgctcagcggcctcctggactccccggcactcaaggcctgcctggacactgccgtggagaacatgcccagcctgaagatgaaggtggtggaggtgctggctggccacggtcacctgtattcccgcatcccaggcctgctcagcccccatcccctgctgcagctgagctacacggccaccgaccgccacccccaggccctggaggctgccaggccgagctgcagcagcacgacgttgcccagggccagtgggatcccgcagaccctgcccccagcgccctgggcagcgccgacctcctggtgtgcaactgtgctgtggctgccctcggggacccggcctcagctctcagcaacatggtggctgccctgagagaagggggctttctgctcctgcacacactgctccgggggcaccccctcggggacatcgtggccttcctcacctccactgagccgcagtatggccagggcatcctgagccaggacgcgtgggagagcctcttctccagggtgtcgctgcgcctggtgggcctgaagaagtccttctacggctccacgctcttcctgtgccgccggcccaccccgcaggacagccccatcttcctgccggtggacgataccagcttccgctgggtggagtctctgaagggcatcctggctgacgaagactcttcccggcctgtgtggctgaaggccatcaactgtgccacctcgggcgtggtgggcttggtgaactgtctccgccgagagcccggcgggaaccgcctccggtgtgtgctgctctccaacctcagcagcacctcccacgtcccggaggtggacccgggctccgcagaactgcagaaggtgttgcagggagacctggtgatgaacgtctaccgcgacggggcctggggggctttccgccacttcctgctggaggaggacaagcctgaggagccgacggcacatgcctttgtgagcaccctcacccggggggacctgtcctccatccgctgggtctgctcctcgctgcgccatgcccagcccacctgccctggcgcccagctctgcacggtctactacgcctccctcaacttccgcgacatcatgctggccactggcaagctgtcccctgatgccatcccagggaagtggacctcccaggacagcctgctaggtatggagttctcgggccgagacgccagcggcaagcgtgtgatgggactggtgcctgccaagggcctggccacctctgtcctgctgtcaccggacttcctctgggatgtgccttccaactggacgctggaggaggcggcctcggtgcctgtcgtctacagcacggcctactacgcgctggtggtgcgtgggcgggtgcgccccggggagacgctgctcatccactcgggctcgggcggcgtgggccaggccgccatcgccatcgccctcagtctgggctgccgcgtcttcaccaccgtggggtcggctgagaagcgggcgtacctccaggccaggttcccccagctcgacagcaccagcttcgccaactcccgggacacatccttcgagcagcatgtgctgtggcacacgggcgggaagggcgttgacctggtcttgaactccttggcggaagagaagctgcaggccagcgtgaggtgcttggctacgcacggtcgcttcctggaaattggcaaattcgacctttctcagaaccacccgctcggcatggctatcttcctgaagaacgtgacattccacggggtcctactggatgcgttcttcaacgagagcagtgctgactggcgggaggtgtgggcgcttgtgcaggccggcatccgggatggggtggtacggcccctcaagtgcacggtgttccatggggcccaggtggaggacgccttccgctacatggcccaagggaagcacattggcaaagtcgtcgtgcaggtgcttgcggaggagccggaggcagtgctgaagggggccaaacccaagctgatgtcggccatctccaagaccttctgcccggcccacaagagctacatcatcgctggtggtctgggtggcttcggcctggagttggcgcagtggctgatacagcgtggggtgcagaagctcgtgttgacttctcgctccgggatccggacaggctaccaggccaagcaggtccgccggtggaggcgccagggcgtacaggtgcaggtgtccaccagcaacatcagctcactggagggggcccggggcctcattgccgaggcggcgcagcttgggcccgtgggcggcgtcttcaacctggccgtggtcttgagagatggcttgctggagaaccagaccccagagttcttccaggacgtctgcaagcccaagtacagcggcaccctgaacctggacagggtgacccgagaggcgtgccctgagctggactactttgtggtcttctcctctgtgagctgcgggcgtggcaatgcgggacagagcaactacggctttgccaattccgccatggagcgtatctgtgagaaacgccggcacgaaggcctcccaggcctggccgtgcagtggggcgccatcggcgacgtgggcattttggtggagacgatgagcaccaacgacacgatcgtcagtggcacgctgccccagcgcatggcgtcctgcctggaggtgctggacctcttcctgaaccagccccacatggtcctgagcagctttgtgctggctgagaaggctgcggcctatagggacagggacagccagcgggacctggtggaggccgtggcacacatcctgggcatccgcgacttggctgctgtcaacctggacagctcactggcggacctgggcctggactcgctcatgagcgtggaggtgcgccagacgctggagcgtgagctcaacctggtgctgtccgtgcgcgaggtgcggcaactcacgctccggaaactgcaggagctgtcctcaaaggcggatgaggccagcgagctggcatgccccacgcccaaggaggatggtctggcccagcagcagactcagctgaacctgcgctccctgctggtgaacccggagggccccaccctgatgcggctcaactccgtgcagagctcggagcggcccctgttcctggtgcacccaatcgagggctccaccaccgtgttccacagcctggcctcccggctcagcatccccacctatggcctgcagtgcacccgaggcaggtgcagcccgagggcccctaccgcgtggccggctactcctacggggcctgcgtggcctttgaaatgtgctcccagctgcaggcccagcagagcccagcccccacccacaacagcctcttcctgttcgacggctcgcccacctacgtactggcctacacccagagctaccgggcaaagctgaccccaggctgtgaggctgaggctgagacggaggccatatgcttcttcgtgcagcagttcacggacatggagcacaacagggtgctggaggcgctgctgccgctgaagggcctagaggagcgtgtggcagccgccgtggacctgatcatcaagagccaccagggcctggaccgccaggagctgagctttgcggcccggtccttctactacaagctgcgtgccgctgagcagtacacacccaaggccaagtaccatggcaacgtgatgctactgcgcgccaagacgggtggcgcctacggcgaggacctgggcgcggactacaacctctcccaggtatgcgacgggaaagtatccgtccacgtcatcgagggtgaccaccgcacgctgctggagggcagcggcctggagtccatcatcagcatcatccacagctccctggctgagccacgcgtgagcgtgcgggagggctaggcccgtgcccccgcctgccaccggaggtcactccaccatccccaccccaccccaccccacccccgccatgcaacgggattgaagggtcctgccggtgggaccctgtccggcccagtgccactgccccccgaggctgctagatgtaggtgttaggcatgtcccacccacccgccgcctcccacggcacctcggggacaccagagctgccgacttggagactcctggtctgtgaagagccggtggtgcccgtgcccgcaggaactgggctgggcctcgtgcgcccgtggggtctgcgcttggtctttctgtgcttggatttgcatatttattgcattgctggtagagacccccaggcctgtccaccctgccaagactcctcaggcagcgtgtgggtcccgcactctgcccccatttccccatttccccgtggggtgctgcccttatgcccggcgccgggcaccaactccatgtttggtgtttgtctgtgtttgtttttcaagaaatgattcaaattgc

SEQ ID NO: 658565 - DNA, 1221 bp, Homo sapiens
tgatccgctgctgaatctgagcgcatctggcgatgtatctccgcagggctgtgtccaagactctggcgctgccccggagggcgcccccgggtcccgcgccgctggggaaggacgcatctcttcgccgaatgtcatccaggaaattccctggaacatctggctccaatatgatctattacctggttgtaggtgtgacagtcagtgctggtggatattacacttacaaggctttaacatcaaagcaagtgagacgtacagaacatgtagctgaaccgaaagaacaaacaaaggcggagttgcaaccacttccaggtgaaaaggaagagcatgtggcagaagccgagcaagtgtgttcagagcctggagacactgctgtaacggaagctgaatcggtagatgctgaggaagtcccagaggctgcagttgtgcttccagaagagtctcaggcctccgccccctccgaggtccctgccgaagctgccgtggtggaggcatccttatcgagctcagagcctgagctgaagataaccgaggcttccctggtggagactaccgagagtgtccctgagtctactcaggaggtggagagtgcagccccagaccaggatgacgtttgcaatgagggggctgatactagccaggagggcgctgataccagccaggagggggctgataccagccaggagggcgctgataccaccaaggaggaggctgataacagcaaggaggctgaaggtaccactactgaggacccgcgctcgatctccgaggagagtgccgaactagaagaaagccctcccttaggctcagaaccccctgcccagcctgagtcacaagaagaagaaacccaggtcacagaggaaacagcatcaccccaaggttgatctgcaaaattctatagttgcttttgtatttttagtgaccttagcccttcttcctagaatattttaatataccttaaagaatttaactttactaatagatatttgattgggagttggtattttacaagtcttaatagtttttccaccctctaaaatcaggctgtgttaagaccttaaatagtgttaagtttggatttaagttttacgttttagaaactgagttatctatgcaaccggtgtcactttgattttcctttgcctttctcttactttgttctatgtaagaccagattactgggtttgctgtgaactcatttaaataaaattagaaaatcct

SEQ ID NO: 658566 - DNA, 357 bp, Homo sapiens
cttcaccagctaaagacagtaaggacaaataacatcaccatttaaaaaaaaacaaaaaacaaacaggctgggaacggtggctcacgcctgtaatcccaacactttgggaggccaagcgggggcaggtcggatcacttaaggtcaggagttcgagaccagcctggccaacatggcgaaatccgcctctatctaagaataacaaacattagctaggcatggtagtgcagtacctgtaaccccagtctactcaggaggcttgaggcaggagaatggcgtgaacccgggaggcagagtgtgcagtgagccgggattgcgccactgcactccagcctgggtgacagagcgcaactttgtatc
